United States Patent Application Publication US 2007/0054278 A1 - sequence listing, part 15

SEQ ID NO: 93285 - DNA, 104228 bp, Homo sapiens
  misc_feature (1)...(104228): n = A,T,C or G
tcaattaagtgacagaactccattttctggaaaacttagaagaagatcaggaaagatctcagtctgagatgaattaggcaatcagacagggatccaaaatagtgactaaaatacttgaaccaaggtatataagggcatgcttaatcatagaggaataaagtaacaatatcattatcagaaattgagtatagcatacaatcagaactgacttagaaagattcaattgcatgctgagcccaagaattattgatcatagactccttgtgttctcaattcttacggaaaggattggttttagattctaggggtaggacaagaagccagtcaaaatttatgggggtctaaaacattagagatctttttaaaaaagattatgtgagttacaagtataaaataaaataaagaagtgagtacttatttagaataagaaaagaaagcccaataatttagagaatccttggagctcagggcccttttttctaagatttccccaggccgtttccaagaagtgttttcttagtgattgttcctgattacagcttggcttcccttccagcctagcatatcgtacaactcccagacactcctagcacttacaggggcctttgcaagtgaggggcattgacatttaagcttcaatagtttcagggtaaatctgcctctgggcagagcagatgtcagagaaaggagctaaatggtcccgagaagcaggagaatgagagattataagggcagagagtcagttaaaaaaaaaaaaaaatcattagaaactactgttgaacaagaaaatgttgactatacacggtgattaatcataattaatgctaatctggtgttacctatgccaacacgtaggtcatcgtgtggaactttggtcaaacatatttggaagactgaatgtgaatgccacagtgattgctgaccctgaaggatgattcacggcctagacagttctgcccaatcattttgactagtcacaaacatctgctagaatcatcttcaaaatacttgtgtttgctggcattctttcctatcctggcatgctcttcttactttgaacttggctgagcttagttttacatctgacatcattttgctaggtacaagggtttcacaactcatatccacagaaagaagattccagataagcacactaagatgactaaaacgtagaattagtgttatttaaaaaatatactttgaagtgtccttatcttctcttgaagacaaataagaaatgaaagaaataaaacacctcagaaaataaaccatgctcattttccctgtgataaattactgtttttgttgcacgaggaaacctgttttacttttgtgttaagcaggtcatttattgtttaagtctagctcctaggaaattcttccctttactatttttgtttggttctttttatttttaacttcttaaaatgtagttggtctcatataggctttgtttgaaaggacgttcagccttgaaaaagtcacctggtaaatcattcctgtcaaattacagcttaaagaattaaaagggaaaactgctggggcccacggactatactgcaaacctctcatatataaaggggagcttcagatttgtggcaacttgatcatcctaaaattagagaggtcatcccctgacatctgcagcagagacctgatttagaatgaagagtcacagcacaaaagttctgcttcatggtattctctaagccctcatctccagtttatatcttatattcactgtagtttctactcccatctaagttctgatcttaaacttgtgtttcccaatgctataatcaatgacctctctgaggcttcctcctattccccagtctctcttctgtaatacttttcctatttatctgactttaacagtctcctttgctgatttcttttttcctctttcctcaaaagggtccgccctctctgagtttcagctcttggatgtctggtggtttttctttgtcctctaattcatttaacatcccccttcctctgtacctccagggttattccgcgaattcccaaagctttacttcttattcactccacaaatattcattgaataaatattcgttgactcctttttctctcctacgcccacattcagacatcaaattttgttgactctacattcaaatctatctggaaattgaccttcatttactgctactgacttgcttaaagcctccgtcatctctctcctggaccactgcattagctttcaagttggtctacaggtctacagactttctgttttatttctccactcactctcccttatcttcctctaatgtggcagctgtggactctgtgatcctttttaaatcctacttcagatcatgtcactgctctgcttagaaccatccaaatggcttttcaattcatccagggtaaaggacaaagctgttactaggttctacccttatcacactgtctgtttatctgcttgcctccgccctgcttgttaccttctcaggcttcatctcctactattcttatgcacagtcactgaacattcaattgccctcttgcttcctcacaacactccaggtatttctggtctcacagtccttgcacttcctgtttcttctgcctggaacacaggtcccctgtacatcctggccccctctttttctcaccactttcaggtctttgctcaagaatcgtcttctcagtggggctttcccaggatcccttactaaggttttggtatacctcccctccttattggtccttcccagttacctttcctgatttactttctctctaccacttattaccttatatgtttatctctgtttcacctgaaactaaagcacagtagatttttgttttttctgtcactaataaatttgtttttaccaatatctatctagaacaatgcctgagatatagtagtcatggaatattttttgaatgaatcaatgaataaacaaatgtgctactatggtacttactctttgatgatgaaaaataattgaatcctgaccttaacagacacactgtctaataataattctaagaaaagaccctgtcacaaatgagagaggtttgcttcagaagttagaaatcatggaacagggacatctaaacccatcctgaggtagggtaagttaccccagttgggcttcctgtaggaggtggcacttgagcttgacagacattagcccaatgaaggaaggaggacaggttttgtcatcctttttttttttagatatagggataacatgaacaaaggtatggttgctgagcaaatgctgcttctctcatttctcctcaaatttccttaccatttctgagcatgtcaccctgacttcttatgatcaagagttacatcatcagagtggctgctaccatagcaggttgggaatgcctgggaattaatgagtgtccctcagcccttaagtcaatgactgataggtgttgggaatatatatcccagttctctgacccattgaccaggatatttttgagtgatatatagtacatcaattttgtgggattaagctcccattacccactgtggttgatttaattggatattttccctttcctgtgtcattttagcttcacctatctggttttctcaaaactctccacaaaccgctagtcactgaatttgggctcatgcttgggcttcagaggaacccaaatgattcctacctaaactttagagaattaaagtgacaaagtatttggtctgctttaggagataataaagcaaactacgttggttgggtttagtttggcatgaaggaatctgaatactaggttagggaatgtggattgtttccaaatctgttatgaaatctgtttggggatgaagcaatcaaaaggatatctgagtatgattaatctagttgtggtatatagtggtattacactggtggtagggaaagtctacaggaaatggcataggatacactcaagagtgcattagttagtgaggtagcagtgagaatggaaaggaatagatgaagagagaacatgaagggaaaaaatgacaagatttggagtccggctctgtgagttggcgggtgtgggggatggaaagagagaagtaaaaatgtctgaggccatatgagttagagagcagtagtatcaacagagatgagggagccgagtgggatctggatttgatgagttaaaagacatatcaggccgggcttggtggctcacgcctgtaatcccaacactttgggaggccgaggcgggcggatcacgaggtcaggagatcgagaccatcctggctaacacggtgaaaccccgtttcgactaaaaatacaaaaaaaaaaaaaaaaaattagccgggcctggtggcgagcgcctgtagtcccagctactcaggaggctgaggcaggagaatggtgtgaacccgggaggcggagggagcttgcagtgaggggatatcgcaccaccgcactctagcctaggcaaaagagcgagactgtctcaaaaaaaaaaaaaaagacatatcgagtttttgccaatggaacatccaagtagaaatgttcagcagatggctggaaatgtaagaaagcaggaaggatttggtttgagaattggggctctttcagactgttagaaatgtctaggtatttgaaaatcccaacacttgctttatacgagtctcacagcacagatgttgtgactcttaacagagaaggaagaatgtcaaaataacctgaaattattagtggacttttggagtttaaacacacacacacacctgtgatgcagagaagccggtaagcattcatgaggggaacgggggtttgggagggcaggaagccaggttgtagctctccaagttcttaaagatactggagaaccaaggaagcaagaagtcaagttcaaggagtttggcaattgcaggtttggctttctggagacagatctggccaaaacaccagccattcctagcagagtccttggactcagaggactgatgctgtttgctttgtgcctagttttatgaagctgtacttgccacacatgaaaggctgttattaaggaatccatcttttagctttttttttccccttcagactaaataaaccttatttcattcttctcacaggtcatagtttccacttctttaattatttgttactcttctcagaactttctccagttttcctcttcttttaaaaaactgagaccaaaccttcaaaacagagtaataactggcttagttctgggcacaggaaatgattctttctaaaatgtcacatcccaggcaagatttctttgcagggttttccacctgtttttaatgctatcaagatgaaagcattaagttcatgttatcttgatatgttaattttagacaaaacgtgatcataatggaacacatttttccataattttctgtcttaatttcaaaggcccagagttataacgggtgttgtctcgattctgtttttttctaatttcacgaaaatttaggcaggagattccagaatggtagcagtttggttctctttctcctataaaatagcttatgtcattaaatgtatgaggcaaaactgtcaagcttttttcttaattgtgcttttgctcccactcattccaacaagttaaacccttggctagttaaaatgtgagaacagaaaaaagggaattttcttagacatcagtcaaaagtggaagcagtgggggccaaggctcagagatctcgacctctccgaccacgtctttgggagtaattttccatgcggactggagcacgatcttgtaagcacagccccggcattacacacgttgggctccgattccgcaggatttacaagcctcattactggaaagagtctaaggctctcttggcacaagcggcggagcaagaaatgttcactggacaataaaactttcggtttacggagtaaaataaaatcacggccttccttttacagggtgatgaacctgcccctgaattaatgaggggcgatccatttccatggcttaagagtctggcgaggtcccagtcagccaagattgccgcagatttgcagtcacttcagactgggtggagtatccaagtccatagaagagcaaattctcacccttcgaggctgctgtggaagctaccggggctgggacagcagagaggaacccagacgggaacaccgccctcccgccagactcccggcggctcctcctccctctcccaaacccactcccaaagctaagtgcaggcttccccgttccagccagaagcgctgcgtgagcctccacacgtagccgcagcactccttaaatagcgtccgcgctgagcaaacagtccagacgtggggcccaggaggcgagctgaggcaccgcaccggcggcaccgcggcgggtcagcggcggccaatagccagggcgcggcgcccccgtcgcctcccctcggagcctataaggctccgcagcgccccgggctgctgctccgtgcctccaccgacgacctcactcagctgcgttacggccgctccggtgccggcgcgcgccttgcccgccgctcccgcccgcaatcggcggctcagggcggacccgggtctctgcgttctcgcgagaagcgcggcgctgcggggccgtgggcgcctgagcccagccagcctcgagggccgaatatggggggatgcacggtgaagcctcagctgctgctcctggcgctcgtcctccacccctggaatccctgtctgggtgcggactcggagaagccctcgagcatccccacaggtgagcagcccccggtccgccgctgtcccgcgaggctcggccggcgggggggcagttcattcatccaccagcccttccgcggggctggccaggtgagtagtgggggcctgtccctcctctccaggaccgccggggtcttccccagaattgcggtcgggcggcgctggtccctggggaagtgtaggggcacccgccctcgttgactccttggagttctcggtgaactcagcgtgcccgaatttccctgcagaacaagttggagtttccttttggacttgcaggtcatgggcaccaacacctttcctgcagctctcctttcccctcctttccgagagttggcatggatttatccttgatggacgaggcagtactccttctgtgacctaaacacggggcttagtgtactttctaattgatggtgacacattccttccagcaccccaggaagcagccggtaacacctccctcttgccaaaaacaacgctcgctcgaaaaccttagttgttttcagtaaggctgcctggctacccagtacctccaggcggcagctttcttcctttgggatctgaaggggaagctgtggacacacagctgctccccttacctacccttttcttgagcccggtgctgtctctcgttttcagaagctgtgtaaaacaaaacgttttatatttagccagattaaagagagtttcaccacgtctgtctaaacatgctttgctgccttttgtggcacatgaaaaatccttggagttttccacatttgtgctctttgtgctcaactctctgaaattagatcttgcatttaaatgaccttctaatgtcctttttgttttgttttgttttttgttaagtcatcttggcaccattttttcccccaagtttataatagagtgcttttctacttgaacttttcttaagcctaaggacagaaatttctatttcagagttacattcagaaagtgacatttggtttgcagtccagctaatccatgtagcgatagttttgtcttcatctttaagtgtttcagaaagcgtcagcaggctgaactgcctatctttctacaaaacagtgcttgctttgttagcttgagaaacttcagcattcagatggatttctatcagttacaggatgcttttctttctgttaggtatatgtgaccatttaaaaatggatttctgaacccgtgtgattcctctaaatttgaactaaacttttgcataatttaaaaatatttcttctaacataatatctggaaagtagaaartaaatactttcagcaaatttggaagyagagaaatttaaaaaggaaaaacagaacaaaaagccttccccagaaaaatgtctttctttgttgaaacacccaaggagactttaactgggaaataaaataacctctaaggactttgtaatatttagagaggcctctttggcctttgtatattttattccacttcattgccaacacccctaactttttaatagaggacatccctttgtatctgcctttatatttatagtcaaaatcaaattcccttctcactctggattttaaatttcatggaactggacagtaaacttttaatggattgtgatatcagagaaagagaattttaggtatgaaagtttcctcaggaaacgaccacatgaaacccactgtttaaatctgaggactggtcacttggtaagcaggcatggagaattcggttagggtcgaaatgtgggaaaatactaatttgtgataggtgaagccagcagtagtcagtttgattacaaatttcggtgtaggtaggtgttctcataggttatgtgataaactaataaatgtagaggtaaactgcttgataaagtgggcagaatcatggactgtggtctattttattctttacawrtttcaactgaaaattactaaatagaagcttattcgttgacataaatatcaagatcttctataggaccctaaattgtctagcttaatagttctttaagaagagtgcttatcatctctaaccctgtatatttgtcaacatgtcccagctaaccaagaagaaatggtttaaatcacaatttcttggccctattgacattttgagccagacacttctttgctttgagggactatcctgtgcattgatgtttagcagtatccttaacctctgtgcactagatgccagtagtataacctttctaatctgagcaccaaaaaaacaaaaaaggcctaatgtccccagagggacaaaattgcccagggttaagaatccctggattagactaatctatttgtatttgaggcaatatggcattatagtgttactggaatgataacagcaaattatttttgaaaacaaatatttatagtgattttcagtttacccactgtagttgggaatgtgatacacattcatcaatttttggagtgtagtttttcctagctctggtgctttgttgaccagagttgagaacatagatttttgttaaatttttgagagttctgtgtgctgtattgattccttttggttgccactttattcttagcatggaaagactaaataagattttggctaaaataatcattttctctgaaaataacgtataggaattgttacctgaaaattatatccttatgggagctttcagaggcagaaccttcttaatcagtgccagtaaatcaggttcataccctgatttatctttcctgccctttctgccttctagatgggataaggagaaggtggatgtattcctgccaagtctttgccgtcatgtctccagacctggataaaatttgtgtgtgttttctgaggcaccttactattctatgatccaaactgggcagaaaccaagttttgggcaaaaacaaaggaaatggtttcaaatgtttctgtcaagaccagtatttttgtaccacattcattcatttataaactctctaatttactgtggtacattcaaggaaaaaaggaaaggtttgtccctatctactgatgcaaaccagcaatttatggggtggagaggaaaagagcaagggcctggagaaacctctggaagagagagggtcttgtcctctgtactttctgtattctgtgcttcagccacacagaatgacatatcatccataaacagactgtgccttttatttcacatgacaacagacatataaaactactatagagaatgtgaagacaagaaatgaaaattaaattgagctacccttttctatccaacacatgggacaaagcatcttaaaataaactctgattgtaccaaatgtcaggatgggaattgaccgttgatggaagcacagtgtctttggagaacaatttaataatatctactggaattgagaatccgcatgtcctgtaatcctagatatgtgcatgaatagcactctcaaatttctgttccttcctttttagttttttgaaatcctgtttattgtttaagtctagctcctaggaaattcttctcctggctatttttgtttggttctttttatttttaacttcttaatgtagctggtttatacaaatcatatttactttgtactataggtccttatgtttaataaattgtaaactcttcaaagtgaagggctgagttttattcatttttatgctcttcagtatctacactgttgttttgccacagacattctcaggttttgcttactgagtttctggcctgttctgagaattatgaaaagtagcgtgcagtcaatgaggttgctagtttcttcttcccccagaactttatctgaattcactgagcttcctttctctgcttgggaacccatatgctacatgatttaacagcttagaagtgaaatatctgctgccttgtttctgaaccatgtttggcaacccttctccacgggttgtatttcccgctttacctgctttactcaatacaaagtggcaccttcactattactttcaggtagttgggtgccataattttttttattggtggtgaaatggagatttgggatggttacataccttgcacaagctcacataggtggaaagcagtagaagaggggcctgtgccccttcttcaggctgtgcttgtctttcctgacctcataattgttctcttggacttttgggacctatgagaaagaaacagaaactggccatcagtgacttagagaaacaaaaggaaagctttgctaaaagggaaaaggcataatttgcaggttatgtaaaaggaggagaaaggagtaggcacaggctgaaggaaaactgggccctaggccagagtggtaaattatggcccataggccaaatctagcagaccccaaacagctacctgtgtttgtgtggtctgtgaactaacagagatgtttacatttttaaatggttgaaaaatatcaaaaggagaataatatattatgaaacatgaaaattatatgaaattaaagttttattggctctcagccacattcatttgtttacttattgtctggctgctttggtgctacaaggcagagctgagtagtagttacagagactatgaggcctgcaaagtctgagatattgactagctggtcctgtacagaaaaactttgccgaaccttgccttaggagatgacattcccacttaagttgtggctcatgccgatctgctgctctgtgggaaggagctggcttctggacagtagcagctggctctgggcatttcagagacctgtttttcattttagaatttgccggtgattcctgtggtgttttgcgttcaaacatagagtttctctgttacatctttttaaacacagcacttgaagctatcaagacatgttctttggtgtaagtagtgttctcatgatcaaaaatgaattaaaaacactgatggctagttggaaaggagatgcatatttcttcttcagagcttgagtatattctagaaatttgttctagaaacctggttatgaatttgtggctgagctcctgggaggaaataattagcacgtttatcaatgagtatttttatttttctttaatcattgctataaattaggctaaactgagaatttggtggcttttaaaatgacatattctttttaatttacatcttactcatttgcatttgttgtagaatgcttgcctccccaaactgaactgaacagaactaattttctttcttttttcttttttttttttttttttgagacagagtctcgttctstcgcccaggctggagtgcagtggcgtgatctcggctcactgcaacctctgcctcccgggttcaagcaattgtctgcctcagcctcctgagaagctgggattacaggtgcccgccaccatgcccagctaatttttgtattttttttttagtagagatggggtttcaccatcttggctaggctggtcttgaactcctgacctcgtgatccaaccccctcggcttcccaaactgctgggattgcaggtgtgagccaccgcgcctggccaatgaaactaattttcaaagctattgagattgcagttaaaaatagttatctagaatagtagaattatagagactgttatttwattaattaattaattaatttatttatagacagggtctcactctgtaggtcaggctagaatgcagtgaygctatcatagctcactacagcctgaaactgctgggctcagatgatcctgcttatcacctcagcctcccaagtagctgggactgcaactctgttgttgttatctttattctgcttaccaccttaaagcctacatgttgcaacccatatttggtaattacactactaaagatggtgcagcagtacagaattgattactgcccgactgtgtcacaaagatacctcttcaaaaaatagtttataatttaaaaatgtagtatcttcaaataagtttttgttttcagagtaactttacaagcaattcaaagagcaaagatacatcgtttttatacacaaaaggaagattttcattacagattttcttttgtgtattaaaagagggaagtgtacttttgttaattttaatttggttttcttcaaaacaatacaatcaggtttatgcatttacatacttagttactgattgactcatgcatttttttcaggccttgattgttttagtagcacattgtggcagatttaggaaaataaaaatcattttaaaatttctattaaaatatggatatactccccctttcttgaatttatttcttaaaggagatgtgattaagtgagaaaatgcttaatttgttagtgtggaaatatgcttcatgtttacaatttcttttccgctataagaaattaggtttaaagtttagtttgtataggtttgtaattaaattttaaccaggaaaaaatctataaatagcaactggataacctttgctcttcatttcaagagcaattaacactaacttttttttttttttgctgttcttttttattattagtcttctcacaagggagtatcagtttctgtgcaagttcatgagtgatggggatactccccaggcattatcaatacagaagtgacaaggtatactacattggagtgtcctttccttttttggttgaagaactactgtatttataataaaaatctacaccagaagtttaaagaaaaaaccgtatttcaagtttgaatacaataaagaacatgattattactgtaaatatactcaatagacttttaatacaaataaaagtcttggtgaacatatggctaaaatgaggggctacttgaggcaggaaagtggtcaggaaaagtgtttcatataaacattggtgaattttcaaaaatgggccagagttgaaattaaatatcatttgttacactgatagtttattgattttaatattgcttttattatcttgtgtgcataagacatcctggtgcattaactaatcatctgctcatttaatttggggttatattctcaaatttttacaaagaactttctcatttgctttctagttactgctaacctattttagggttccttccaaacggtaggtgagagataggactttcctctgatttaaatgctgtttttcttatctttttttttttttttgtgctgtggacaggtaaaaattctttatggaacaaaggaattttcaagtacacataatttttattgttcttgacagtactcctggtcagtctcggacactcaagtgcagtaaggagataytgaatatgcatcatgctccacagcttgaccctcccacaggcacagcaacaagcgaaatagatatgtggattttggcaaccttggctttgtgatgctagggcatcgatctggcctgggagaagaaaagctccagaagctatactttattccagagccccagcacacagtgtctcataggcaaggctgctctgtcattgactattctgttttaaatggtttgaagccacaacttttgtgggctttcaggtgcgaaatacttaacagatgctgcacacagggctaagaagggggccagtaacatttaggtcttttaaaatgcattctctaacaggttctttaaacatttaaatctttccttcctgtttctagcaatgtactaaacaccaacagctatctcatctttaaaaattctgcaaatacagaatttaaattatttctttttgaaaaaaggaaccagctaacagtttgctggtagactaaaatgatctccataatgtgatcacctggggaagtcttagagcgctgttgttatgaagagggcrgatgggttctttgatgggattttccggtcttgtccaagccagctctgaggcaccttgtcttcagaggcctcttctcctgctctggctatgctggttctttcctggcctccagctggcaccacagtggtgaccagaatgccctgctggtccagggcctctggaattcctgccggccacgtctagagaaggacaatcctccttttcttcttagtttagtttagacaaggttggaattttttaaacagtgactttactaagtaaccaagggcaaaacaaaacaaaacctcacactggaaaatcaccgaagcaaagaaatgaacagacttacaaagcagagattcagagttcttactcttctctgactttggtatagttctgtattgaaattctaagattcttgcagggaaaataatgtatatataaaactgagcaaatcaaagaagcacttatgggtaagcaacctggatacctgcacacccagcacattttgagggttcatgaattctgtgtccttgtccagcgtttctttctcccctcttcactctcattcctcacttcttcctaccactttcttttacacagatgactcttctccatgattggagtccatgagatccatgggtagacaagtggtaatagatggtctaggtatatttgtcatttcttagggacatattacattacatattagcataactgtagccattggacacttaattttcttcactagatagaattttttttttttgagacggagtcttgctctgtcgtccagactggagtggagtggtgcaatctcggctcactgcaacctctgcctcccgggttcaagcgatgctcctgcctcagcctcctgagtagctrgcattacaggtgcgtgccaccacggccaggtaatttttgtatatttagtagaaacgggggtttcaccatattggtcaggctggtcttaaactcctgacctcagatgatccacctgcctcagcctcccaaagtgctgggattacaggcatgagccactgcacctggccaataggtagaaaatttttatgctgttgcccatgactatttttgtattgctttaattcttgattttagtagcagtttgtgtatgcttttataaacctatataatttagtaaatctacattagtttatttagctaagctttacaaattccctcataatacaacttttttagaggtaactaacagcattgtaaatttttagatgcaaatgtatgccaacaataattcccattgtgtaatactgtgaaattttggtaattaatattttaaaaaataattggagtatttattgactggctagtctgtgttctgttgctttgtgtgaaggaaaaacagaaaaaacaaaccagaatgaacaaacaaaaaccacacaaggctcagttcctgttctgtattgaaattctaagattcttacagggaaaataatgtatgtataaaacggagcaaatctgagaagcacttacgggtaagcaacctgggctgcagggaagaacacacacatctggcatcaggaaacctacatctaagttctcatccttccactcaccaaccttgagccgattcttgagcctcgtcagattttacttgtaatttgtgatccttacagtgctgtgatttgatgtctcttgactttttttttttttgaaacggagtttcgttcttcttgtccaggctggagtgcaatggcgcgatcttggctcactgcaacctccgcctctcgggttcaagcgattcttctgcctcagcctcctcagttgctgggattacaggcatgcgctactatgccctgctaattttgtatttttagaagagaccgggtttctctatttttgtcaggctggtcttgaactcccaacctcaggtgatccgcccacctcagcctcttgaagtgctgggattacaggcgtgagccaccgtgcttggccaatgtctcttgacttttaagtgtcagaatggtggtagagacagagtgctgcaggaatcagaaaagaggtctcaagaaaacttactattatttgttaggccaaagaaggcatagatataaggttgttttgtgttttaaattctactttttctactggttgttgtatcaagatctggacttggccaggacttggtgttgcttttttctcttaattagcttttgatttagatgcaggacagtaggccaagaataactagaattaaatttacatttaaaaaggttccaagtgtttttatatgagaagagaaaacaagtctggtgtttttatgaagctattttctgttttcagagaggaaccgtatcctcttcagtacatttaaatattgtatgctgttaaaaaaataaacttatattcatctgtttcagtcctgacctttaagtcaaataaattaataacaattatgctggtaacttttttttttaacttttatttagggttcaggggtacatgtgamggtttgttacacaggtgaactcatgtaatgggagtttgttgtacagactatttcatcacccaggtattaagcccagtactcagtagttatcttctttgctcctctgtctcctctcactgtcacccttaagttgagcccagtatctgttgttcctttctttgtgtttatgagttctcatcatttagcttccacatataagtgagaatattcggtatttggatttctgttcctgtgttagtttgctaaggataatagcctccagctccatccatgttctcgcaaaaaacatgatctcattttttttttaatggctacgtagaagttaaaacgaagttttatgrtatgtgctacttaaaaattggggacccttttctaacttgttacataaatagtcatcagaatacctagattcaacttttggattcattaattatctttaaaatatgattgcatttagtgaactgaaaacatggcaaataaaaacgaaatcagtttgtgggagcaaagtatttatgtgcatacgtatatgtgtatatgtgtatgtacacatttgtgtttactagccatggaggttattgttgagccttaagaaaggaatagaaagtatgaatacattttaatctggacttctttgatatcttgctaggtcattgtcacagcagcatttgttctacatgtgtttgcatctttagaatggagcatatctagtgagtggtacactctgagacttaatccttggagaagatggtggtgtgcastgcttttttttctggctatttttcctacygtttccaggtggattttatgtaaattgaaggaagcagttcaagcagaacaactggaagggaaagagtgtgacttaattttaaaaacatatatagttacttatacagttgttttttacgtgtaagattagcaaatattaacagaagtatttagcctgggtgttggttttggaaattaactgttatttattgaataagcaaataaataccagtagctgagtcttttgtacagtatattaggttgaagaaaaatttggtttattaaaatgataaacttttatcttattaatatcacttgatattttatgttcctcaagcataaacatatttttttaaaaaatgaagtattacattttaaacagcaagtaaatatcctaaaaaaccgggctccttctcactgaatggctgtgttacaccagtactgtcagctccatgggttatggcagagtggataagtgagatttttttttcatgttgagataaaagataaactaagaagtctacttttgaaccatagacacaaacttaaaaaataactataattgataattatatctgattttctataaccagatttaaattctttattgatgcaagacatgaatttttcttaataattctcagaatatcccacacttaaattagtttaaaagcatatttggtttgtagaaacttctttcgaaaaagagtcctattcagtttgaagaggtgatgggagtgagagggtcagtgaaatagaggaagggaagttgcttttaagtgtggtacaaaattacaaaatatgtgacttgaatgagttcacaattaattcagaaaaatctgaactagaagccactgctgagtgctggcaagggaaattatgcttatgtaaaatgtgacactgaattcttccctgaacagaaatttggtttgggtagtttcatccttgggatttatttctgtggattatgcttattgyggttgtagcatttcatattaaccgtaacaaatggaatatcccagccattctttgcatgctatgactttcagcctatggtccagtgtgcatggaccctcttgcaacatatacactgagacagtgtatagtgctgaatttgttttttatttggtttcaggaagtcagctggttacttcagtaatcagcagagattcagaaatatagatgttgtaatattatgcaaccatggatgtgtttyatatcacttggtatttctgataaattgaggtacaagtctgttgtgctttgaattattggagagttgtgttatttcctcttttattatgattaagtgtattacaaagaatttgaggatgatgtttttaaaatactaggstaaatgcagaaacagtacagaggagtgtttgctttcttgatatagccagagggcgctcactatacaaggagactagagacctctaactttgaacttcaaaactttgaagtcatttttttctcattcctctgatttattcttcgtatttaggtatagtgctttgctcattattttgtctctgtctttttttgtttgtttcatctgtagtgaaaagtgtgtgtgtgtgtgtgtgtgtgtgtgtgtgtgygcgtgcctgcctgcctgcctgcctgtataaataattagatatctattagatatttgaaacgggtaaagattatttttaacatgatcttaatattgttattgcattcaacagtgattccttaatgttatttaatacctatccaaattcacctttgcctctttttctcaagtatgtctttttatagttggtttgtttgatccggatccataaatttatcttcctaaacaccttccaagctgtcacttaccttagtctacactgcaggactctggtagcttcagggtcaaatctagcctaaatattgtttttcaaaagcctcaaattaagttctrtgtttcaggaaattttacttaaaaatcagaatctttcttgttttggaggagaaaaaaggaaaagaaggcctggaaaccctgggttttccttcccgtatggcaacaacagctggctgactctgagaagtcctctccttggatggggtgcttgtgcactccagtcaccatagcaggtgcctggcctcttcactgatgtgtttgcagccccctctctgtatacatcactgaattagataattatcattgtttctgaaattatttttcttgtctcatctttcttaagtccagtgactcttcgcatgctatgactttcagcctatggtccagtggttttgtcccccctggaatatttggtaacgtctrgagacattttgttttgagcagtgggtgctacttgcatcctgtcggttgagtccagggaccctgctaaagtgtcctgcattacacagcatgaccccatcactctctcccagccccaccccaagaaagaattatctggccccaaatgtcaatagtgctgaagttgggaaactctgctacagtctgatggcacacttctaatttcactgccccgcttctagtgtcttctctatttccaaatgtatttattatcatttcccaatttgcactctgttcatactggattcctcactatccagtcaagagatcatgcttttacacatcttttggaggaggggggattatatttccaggttccttgactgtgaaaatactgtctgtcattttttaaggcctgaacatagatatattaagtcttatattctagtgatttttttgtagatttttattgttccttcaatgttgaactcctacagtattctctgcaaatatataatctgtgatttaaattagtatttagtatgttattctcagtcttttcatatgaactaactttacattcttagttggattttaacctgcaagaggatagagatcgtatctcttgaattgctgtgccttagaactcccaacctcggaagcttctctgcctataggccttacagagggatagtccattaacccatggcttgcsctagtcacaactaacaagataagcaggaaccctatgttggtcagggttctattcaaacgaagaacccattttagatatcttgagcaaaaacagatttaacaaaagtaattacaagcttatacaattactggaaagcctggaagaatgggctttagcaaaactttcagcagtgacttctagaatagcagaaatagctgaccaaactaggaggctactacctctgtcccagyggggaatcaggagcccaccattggaagtattgaattcagaaataggcttccataaatgtaacccagggatggagaagctgtctctgttgattccttaygcccatgaggcagtgactataccaacaatgcagaattcagccacagcctttgctgctgtccatatgtctgtctgtctctctgcctctctctctctttctctccctctccgtccacccgccctcctccccagttcccacaaagtgtgagattgaccctagaacactggtgtagggtaaaccgtatccttctgaccatgcttaccaatggaaatggccaaaagtgatagggatagraccatctgtttttcaaatctcacaggaatacatcttagaggaggggtataatttacatccaaatgtttagctccaaagaacttggagaaatgcacctttaatatttgattttctcatgactttcttcagtaattgttcttcctgaagcttggcaaagcattaaattattttaaatttttatggatgtttttgacaatagggacccaagtaagggcttagcattacatgaaatacatgctttttaacgtggagctctattataaagttctaagcatgttgaatactttgtcagcttttaagaagaccaatttctaataaagtcatgggaaaaaaagaaacttatgaaatagaggcaactaagtaatagaaatttatgtcccctcaccatccttattgttttraggccagtggattgtaacttttatggaagagacggcatggtacaacttaatcctaattacaattttatgatatttgtttgacttattcattcatttcttatttactagtgctcttattttatacagcaccctataactttcagtaaattcttagctgactagtgtcacttttctgagataaaaccagtggggcttactcacagcttctggattttgataatgtcagtaataaaattctggctcattaaggaaggaaggatttaatttgactcagccttttaaaaattcatgataacaaaagtacaaaagaaaactttgtggactaccataactgtactttctaattgtaaatttatgtttcacaatttttatttgaaagtttggtttttatgtaattgttttttacttttgtagtttctttgctcgtaacagtaactatagttaagcttatggctgaaactcctgctgaacaaatctacagaggagtatcttgcattcaaattagaatgttgatcttcctcacattatttggagttgggacaccccaactacacatggtatttatttattttaaaatttcatttgttttgctcattgtgataatttcaggtggtaggtagatgtaccttagtgttcaaattaacacatagacaaaactagattgggaatggctggattagattaatacatgcctatctaggtttattatgtcaccatagcagttttagtttttggttttgtatgtgtgtgtttaaaatgatacagctaaaaacatttgcttttattttgatgaagacaaaaatatttggggaatctggatttgttttggtgatatgcctaggatgtagtcagtttagcccttcaaatgacgtttgtcatctaaattattctgaaagctctagtaagaaatgacagagctcctataagaaatgttgaagcaccagtagaaatcagtaagaactaggatatggtagatctaatgaagatggcataacttcgtttaagagttgtattttcggttacaatgacaataaatgcttgtaactgaaaacagagatagttaagaataaatttaaatttgtccatgaacacactatcaattagtaaacaatgtaaaacactgtgatagtattcatttttttctgtttgtatatcttcatgtattttctttataaaatcaagatatacatacatattgataaacaataaagccacagttttgtatttgtcttatttacaaaatagtatattttaagcatttcccatggcattgaatattcttcaagccatgatttttaagtaacatttttatatctgtcacgggattataccataagttttataaccattaccttattcgatatatagcttgtttgccatttgacactaacaaaaataatattgtaagggtattattgaaaataagttttggtttccatttttacctatttttataggaaaagttcatgaaacaaaatatttaaataaaaagatatgtacyctgtctcttgttacatattgtggagttgatttccagaaggttttatggattttcacttccacgarcagtgtacaaaagggtatggaaatcttggcaagcattacttttcaaaatactttcttcaaggttttaggggaaaatagtgtctgattctctttatcctccttttttatttcttaaatttatagtgatttatttacttgctaaaatattttttgccacttctgtttcttatgtgagttgcatattcgtatcagtggtgtgtacattctagtggagttagaaaggacggtaaacaaatgtattgggaaggtataaatcttaaaaagaaaaataaaatgagattagagtgattaggttgaagaataccattataagtactgttttcaggagatgctttttatctttggttacatttgagcatagaagggtggaggctttctgagagaggaggattacaggcagcrgggaccacagtataaacgctcttagctgaggatgtgtttgatgtgtctgcagagcagccaggagaacagtgtgcctgcattagggacaaggaggggatagtgatggaagagatcagattgacagtcaagaccagatctcttaggtacttggagtgtggactagggtaaggagtttggattttattgagaacaagaggtaaacccttaaaaaaatttggagagaaacgcaagatatgtgtgtgaattagaataggttattttatctggacttttggttggtgaatgtagtacaggctgatttcagccccattttcccctttagcctctctaaagggtggctgtattatatagtacagttgctaaactatatacattgtggccctgaattgatagagttacagctatatcattccggccagtagaaagaagggattgacaatggccagggtagatacagggaaattctttaagagatgatttcagtagtctagggagaagaggatggtkcctaggtttagactactcacagaaaagatggttaggagaggctggatcctgtaatgctgatagaatttgtggtcaacttagatggggaatgtgagagaaaaacaggagttaaggatgactccaaattttattcttaaaattttgcatcttagaagttttaatttgtttaagtcttaacaccaattgagtatatactctacatgctttttttttatattctcactcatgtttacatagattgtaaacacgagttactctggtgactgctttactcttattttaatacttactattaaaacttatagtcttctttgtgtctgtaatgttatctaaatgtttattcagcagaatgctagtggtggaaaacaggaccctaaaaatatttttacaagggcggtcggagtgtttaactctaggaagtaggccaaaatagctgctgtgatgcactgagcagtgagtttgggaaaaagcattctgcaaaatgtcagccgatagcattgaaaaatagcagagctgcttgaagcagatttttcagtttacagaaattgtgttataaccaaagcatggaagatgggaacaaatggcaggggaaatctggctacatgactgtaagatcagtgctgctgcagagagtccctgagtcagctttggtttgtaccaaggcatcaagtgtatttggtttgacaagagattggaatgtgctgacaatgcccctttcttataatcttaggcagtatattacaaagctttattttgaatgtagcttttatcgtttgttatttattgtacttaaattatgtttaaaggcaagcactgggatatttgtgtgcttaaactttgtttaagggcaagaactggagatttgtgtgcctggaacagaccctactctgcctccactttccatttaggtcagtgggcaattaatcttgtaatatgaaaggtttcaggtttgtagtgtttttattgaccaacctttacatgaaagtacatctaccatgtagctggaaaaagatccctgataacttttctatgtrccacccttagtttttggaaataggtaaaggaagaaaaagtgacagactgagaatgaataggcagagagatggaaaaaacagtagagagaagcaccaggaggggtagattcatacagctggatggtgaattttgcactgatttgttttgctaacttaaaacttgttggattacataaatttctattaaaaaagaaaacactgcattcgtattaatttaggcattatttttcttgatgacaaaaatctgaataaaaaaactagttccttttaataaaggacattaaatatcagtagataatagctttacttgtagtttatttagagatactttcaagggataaatacttttctcatctttttgaaagttataatttggcaattgttttctgacaggaacatttggttacatacagtagatgtatggttagatacagtaaatgatgtttttgccaattttctaactctctgggaacagaagtggagaatgttgaatcccattcccctgttacacacatttcttcacctggtgaactcatttgtcctcagttttagggcraattcctcacaatttttttcataaacttccaatttaaaataactttctctgttaaaacctttcatcctcttcgtgttgttgaacttattcttagttttactgcagtttccattttaaattgtttgtggaattatttgccactgtctcccctcacaactgtattgtaagacccatgaagacagggattgatttttccaaaaatgtttattgagtgacttccttccaaaaatatttattgagtgcctactgtgtatcaactaggatttggggatctattaggtttacattctcttcaattccagcatttacttcgtttaccattatgtctccaacatgtagcacagtgcctgataaacagtgaatgtcagtatctgttgaaagaataaagatgaaagccctttgaggagtatttgcagggctcaaatgtggtgtggagtcaggggttaaatctgtagttgaggaacatgaacttctcctgaggttggggatttctttccccatctcaatctgaaatttccaactgtccctgttctaacttttctttcaataaaaacgagaacttccttagtgttagatccattttgtaaactgcgtctggggaatgtatgcagtttaagtaaactgcaagataaatcacagaagagttaatgcagtagtgatcattttattagcggtccacattaatagaatacagcaatttaaattgtaatgtagttaactttgtccttttttggggttgtaattaatctaaacatccagctatttatgttacttataattaaaggtaggaaagccattagataactcatttgttcatactgtgtattcaattatctgatttattatttatctagtttatgtactgagagtacataataaaacttaataaaacctcataataaaacttattagggggcagtaaatgaagaaacatgttgtgttcttgacagagcaggtacatggacactcagacattaaaatggagaccaggaaattaaagatcagaagcagcatgtggaaaacattctgtctggggccacttattataggaataaacagctctgtagatttagatgttctggggaagtaccctatcattggaaaatatggtaagtgatcatgagtcctcaagaagaggttatatttgtttggtattctttgcttaattatcacayttgacagaatgatttgcattattaacattattaatagaaagtgtttagagaaagttgaaaggcaccatggtttaattgactggaatgctttatgactaaaaatgcagagagtagtttgtgaattttcaggaactgatcctattctttattaaagcgtattgtgtatttctgaaaaagcacacatagtatagtttaattcagactctctgagctgtatatacttctaattatatactagtttatgaaattactgagttccttctactttgagaaattctggaattaagaatgagtgaggattgttggggagaggtcgttgaagctgacaaaacactgaatgcttaccctcgtttctaggkcacagtgaaatcagacttcactggggagcagttttctgatgaggaatgtcatgaatcctttcagaaatgggaatgtctctgtgtttgtctctgtaatgtagaggcatcttgagaggctggacttttgatgaattgtcataagaactgaccccatatagcattggctcagctttctaacaaggggattcttatttcctgctacataaattccccaaatgaaacattgactctttcagacataacctgacccagtgcactgggtcatactggagtatcctgaccctgtatggatttatactgctgagaaaatttaaattgcgttcaaaagagagctattttatgaacatctaccttaaatatgcatcttgcttatgactrattaatgccttgctatgtttttgtggagcagtcttgaagaaccaggtggcgaaccattcatttctaatgtgttgtagctaggaattagttgaatttgactgtatacgaggtgaggaaagagaaagggaggaaggcagggaaagaccagcttttccacagtgacattcttcaacagtattttttgccagcagctgatatttcttccctagtgctgtttcaatgtgtatattctaagccttgtaataaatttcttgctaatgacttaaagtgatggcatttgtacaggaatgtgtaactgttggcttgattttattttacaaactggtttgaaaaagagagaaaatcctctgaatattcatttctgcttaagtccagtggaaatctcagtaaaatattggatgtgcagaaaagctttacactttaggatgagctgcattattatctttttcctgcatcataataaaacccttaatccaacatttaggttgtttgatagttggcgtttataacgctaccggggtgagcatttatcaagataaattgtggagatttgtgttccttcaggatagggaatgtggcatttagaattcttattgtttagaaagtcacagaagatactttaaacatttcttaaaattttatttatgtaacagactcatcttttcaggttagatttatgagataatttggagtccttcactactttaaacattttcttaaaattttattgatgcaggagactcatcttttaagattagtcttatgaaataacttggaatccttcttcactgctctttttcacaaaccctgtttaatctgtccatcaatgttgtttagtctgccttagaaacatattcaaatggatgactttttacctcctttactaccgttccttgtctgtatcaccatggtctctaacctagaacactgttcagaacactcttcaacagatttcctaattttgtccttggcctctcctgtgatagcaaccagggtaatcctgttaaacttgagtcagattatgagatgcagtattgcatagcagttaagagcacagcctctggagctagtctttctcggttcaaatatgagctctgccacttaccatatatttaaagttgggcaacacagttaaatgtaatattggaagagcagtaatacttggattaaatgaattaatagtatctatatggtagacattgttattattgtattgttattactgttattttagtagctattatatcatctctttactcagaatcctctactagcttgctattacatttgaagtaaaaaccagaatctttacaatgacctcctaggccctgcacagtctattcattctgacttctgaactcatctcattttcccttgcatagtctcttctggccattctggatgcctgctgtcctcccttttcttccactgccaatgtatgaggcctgaacccagcccagtcatattctctgtatttgttgtttccttttactggaaagatgtccctcaaatatctgcatagctcacttcctttgcttcaggtcaccctctcagtgaaacttggttatgtcatccaagatagcaacccattcaagactccctgcgacactctatgacacttcgttctttatctttagccctgaaagttaaatgcaaatttttgtttgttttttttttttggttccctgtattggaatataaactccatgatggcagaggcttatttttggtctcttgtcctgtcttgaatgctgagtctctagaacagtggcacatagtaggcacacagtaacattgaaggaattagtgaacttatggcacctggttaattctctgctcacaacctcatgtggtatcatctttcccatgtatacccagtattctcttagctgtgccccctgtggtctgtgatctgctccatcttggcttccagctgtccactcttaattctaaatggtaatttgcaattaaccatttcctgtcttttgaataatgaaaacacgaatccctctccatttctgactagcaaaatattctcatgtctttgagacccacttaactgtttcttccccctgcggtattacctcaacttgtcttgatttcttcctcctgtgatttatcgttgcccttcattgtttaacctcctcatagggctgttatctagaatcagaaataccaatttttttattatttggcatacctaggatggtattttttttagtgtgatccctgttgagcgtcatccgcatctcttcatgatgatacctggtactcggaatttattccccaggagctccccatacaaactgaatcagaaactcttggggtgtgacccaacaatctcttgtttatacaagtmtttgggtagttgttctagtccatgctaatgcttgaaaagcactgagcaaggacattggcatgatggtccagtttccagactgggaatatctgagattaagggtccagttggggccagtgctgtggctcatgtctgtaatcccagcacttggggagcccaaggcaggcagatcacttgagaccaggagttatagaccagcctgaccaacatagtaaaaccctatgtctaccagaaatacaaatttattagcggggtttggtggtgagcacctgtagtcccagctactcaggaggctgaggtgggagtatcacacttaaacagtgggagctaattgaatcagaggtcattacgtcttaggagagtttttgtgaatgtggcagatagagcttcttactgmatcaaaatggtgctataaagccaattatttagaagcaacattatggagctgtattcctgttattttcagaatttttatgctttgatatatggaaaataccttttagtcaattccatcttttttaaaaaatcgcaggtcatcttggaatcatagttgaaataaatagtatttctcattaaagcattaacatgtcagttcatcataagtttggtaattcagaatggaaccaaagaacttcattgtttggaatacaggttggatatcccttatgcaaaatgcttgggaccagaagtgtttcagatttccagtttttacagattttggaatacaatcatctgttgcataacgacaaagataccttctgagaattgagtcattaggcaatttcgtcattgtagaaacatcatagagtgtacctatgtaaacctagatggtgtagcttaccacacctagacaatatagtttacactactgtttctacactacaaacctgtaaggaatgttactgtaccgaatatttaggtagttgtcacacaatggtatttgtgtatctaaatatatctaaacataaaaaaggcaacccattgtgctatgactgctactatatcactagatgacaggaatttttcagctccattgtaatattatgggaccagtgttgtatatgtggctcatcattgatgggaacatcatgtggcacattactgtatttatatacacataatgagatatcttggggatgggacccaagtctcaacatgaaattcgtgtatgtttcatatataccttttacatataatgcaatattatataatgttttaaataattttatgcaagaagtaaagttttcgctgtcctcctcacattaggtcaggtgtagaattttacacttgtggtctttcagcactcaaaaagttttagtttgaattttggatttctgggctaggaatgctcaacctgtaatatgaattggtaaagtctcatcaggttcagtatttcatttattcagcactatgcatatgacaagatatcagtgtaaaaaatgaaactataaaagtactggaagaaaatatgaataattattttataattgcaacatgtagaaggcatttctgaagtgtgagaaacaaaacccagaagatgtaagaattaatggccgattttaaaaagtcatagaaaaataaaaattctatctggaaaaaaaatcatacaatcaaaacaaagttcaaagataaatggtaagtggggagaaaatgttcaacccacaaggtttacttggaatttattgtagagatacaatcttacatgtaagaaattacttgtgaccatctttatcaattgcagttttttgatatttaatttttttttttggacagcagtgcaatggaaacagcttaaatttttaccagcatgctggttaaataatggttcattcatacaacagaatattatatgtctgtactctatttggaaatatctcgaagaaatacaaaaattttaaaaagatgccgagtggaatagagagtatgcacrtgtatgagaagtatccacttgtgcatgcattaaaatatctcttaaagcatacatcagaaccagttttattgatattttctgaagggaagtcagttaaatatctggtaaagattatcactttctacgtcacctagtccaaaatttaaattacaaataaggaaagatcagtcacatatataaatatattttttagatctccaacttggcacggtgaatgctagaatgtttcttgtattttctgggatatactccataaaaagatacctccttacataaagatgagaatttatgacagttttcaacacagagtgaataataaacttttttggagtcttgtggtaattccatagaagatgatatttgtagttgtcttcatcaaatcatcatttaattttatgtactgaaaatacataatatacagattcaattttctagtaatatcttatatagcaacttcaactcgtagaacaatgtggagaacttcagcaacttgttaggggaggattctgagctgccaaaactgatgcyataaaactttcaagacagtatgaggatgggctgctcctcaatttaaatgtattcattttatgcaaggtagatgcaatggaagatataaaatcaactataaaaatcatgttattatgtgttcatggcaatgtggagtaaagtaagcaaatatttcactataattgaagatggtaaatgaaagttatgacttctgtccatttttgttcctgtttcagtcacaccacrctttatcaggtctgcttttaattttgtgtaactsatccatttattttcattgctttaatttcggcagacttgtacataaaggctgtttattttccgttatgaagaataaaatgttatcttgattcaggcacctcacccttacaactttctcttagagcatggcttgcctaagcataagcctaactcaagctttctgctccagggcaactctccttattcatatgcgaattggcaggaatgtattacctcagcctgtgctggtttgtcctggttcctgactttactattgatccccttttcatataagcattgaaaatatttttagtgtctgtgtaaaatatgaaataaacagtaacagatcatatgtgtttcagcaagctacataaccttggtatcagatttctggcaggcagttcatattctctaataaagcatttggctagcagatgggttaccccatcccactcaaagaaggtttctcattcatttgtggaggttgctgaaacctttgaacccttggaattcagcagattaaagtccgctctatttgtgaaggggcagatccattttcctttgacattaaaattatatctagtatatacatttttataacatttgaagggatcaaatgtgttttccaagtcataaattctggaaaatggtcctatactctttgttttaatttttataaagataggaaacatactgcttttccaagataatcttttcattttggatattgtttattgtactttgtattgatatgtaatccgcactcctcattaattcccttctctatttccaccccagccagttctttccactaaaatcatatagagaaaatctagtattgttttctcttcaaatgtaatgagttggtggggagatagtgaatctttcttctttttttcatgtagaaaaattctcaatccctcaactattcagtaatgatgtgattgctagacccctgaacctactggttaaactccttatttgtcaaaattctccttaatttagcatcccaagctcttataattttccacagatgggctatacagattacagtgtaatcatcacttctcttgttaagatagcttttgtttttgtttgtttggtttggtcagccatctcacattttggctcatttttgagtttgtattcaagtaaggcccataacacacttttttcccccaactttttaaagtcaagttttactctgattgaacctcctccccgccmtgtgtgatcattctttgctgtttgaattttacttttcccttctgaactctggaaagaatttgctgaaactcagtgtatagtccttggctgcaatccagccctttcatttcatctctctgtttctgggaagggattggcatacatgtggaggagcagctcccaccttttttaactgcttatcatgtttaggttgagttcttaccttttaggtcatggacaattgttgagacgcagaagtagagaggtataggggtgatgagggcctgtgggatttactgaagggagttattgcaagcagttctaagtaaagtgtttttttgtacagattggaaaaattatatggttcatatgtatgtattaatgactttctgaagtatatggatacttttgagattgtgagaatgtaaatttatttaaatgtcactgtatttatttcaaggttttctcataattttcttgatcagttgttgctataacatggttatagagtagcccacaatattttatattaaaaattacacctcatactaggaaaatggagccttttattttyatttttttgagacggaatcttgctctgtcgcccaggccggaatgcagtggcgtgatctccgctcactgcaagctccgcctcctgggttcacgccattctcctgcctcagcttcccaagtagctgggactacaggtgccmgccaccacacccggctaatttttttgtatttttagtagagaccgggtttcaccatagccaggatggtctcgatctcctgacctcatgatccgcccaccttggcctcccaaagtgctgggattacaggcatgagctaccggatccagccaggcttttattttaaaattcaaatctttgtctaatatttattcaagttttattgaccataaatatacaaattttgattttttttgcagtataatctgtatgttttaaaaaatrtcttgaagctttcatagcattttgaaagttactagctactagaaattcttgatcataatattcctttgagttctgtcttgaaatttgtcaaacattcactattgggttacctaacagaccaaagcacacatgtgggtatatcactggaaaaaatgagtatccaaagggatgatcaggaaacctaaaaaaaaaagttcttaatgttggcatgtataaaatttttatttgaaaagaatgataaagatatatcatggtttggtttgaagtatctataaaggatggggatggtctcggtgcaccttggtctttcacatatctattatctctggaagtcttgatctatccttctacatttggtatctagttagtattggaccttatggttctagaagagtttatttttaacttcatgactcctatccaggaccatttgtcttacagcctttctgtaaataactggcgatacttgccctctccatcccactgcacatactgctatggtgaccaactcattccagtttgcctaggacttttccagttttaaaaytgaaagccctgtatttctggaatctcctcagccctgggcatactgggatggtgagtcattctgcatactaccctccacttttcagcacttctcttaatttgtggtttgtctgttcrttgtccagagtgggctgtggaagcccaggcatccatgtgaaagmtagtgtgtgtgaagatgccctctatgtagcattagaggttggaagtgacttttttctttaagcataccattgcccctctttttctacaaaaatggtaggaaatcattggatgtctcttgacacatcctttttaggtttttttttcttgttgaaattgtgacgtgaattactcttgaggaatttttgtcttgaatttttttcaacagttctgcaaaataaaattaattctcttcaacaattccacaaaataaaattagacttcgtgccttcagttcgtcatagtttttggtgactcagtacttaacaaagcaacaaaattgtgtgcaatgaaacctaggaaaaccaagttttttagtaactgtgaatcccgagttgtcttagattggttaccacttaactgcaggatcctggataagtcttgttttctctttagattatggtttcctccttcatgaaagaagtgggctttgctagactgaccctgaggtcataattcacattaaaggaaatgactttcagtcagtggaagagcagggtatgattactttatgtaccaaatacttattttctggaatccatttggagtcatttttatatctctctagcttcgcctctgagtacagaacacagcataatgcactatccccatagtacctctttcagataagactttctgactgtagctaggataatatgtcggacatccccaagaccacctgcgggttcagtgattcaccagsaggacctacaggattcagcatatggttgtactcatgtctatgacttattattgtgaaaggatacaaagcaaaatcagcaatgagaaaaaacacatgggtgaggtccagggaaaccaggaataagcttctaacagttcttttccagtgaagtcacacaagatctgcttaattctccaagcaactaactggttgtgacaacatgtgtgaaatgtttacctaccatggaagctcattagagattcagtgcccataacttttctggagaatggtcacataggcagcctctgtaccaaaatttcaagcacccagaaggaaggcaggtgttcagcataaaccgcattgtttgtataatttagccacagtgagccatcttatctaggaatgatgggaacccttcccattggaagaccatctggaaaccatatggaatccaacttttcagatgcctgccaaggaccaaccttacaagcagatctttctaaggatagaagtcttaagttgctatctcttttctgaacataataaaactcaatgattgcttcagcccttaacctgttgtcaccaggggaggccacatgacattgaggaataactctgaagttctacttctggccctactagtaatttgttaggtgactttggctaagtcgattactttactggagtttaaccacctgtgaatttgagatgattatgctaactacatagggattttgttaaattatttcattcacacctacatgcaagacatatgatattacttgcccctgagtccactcattctgaaatgttttttaagaacctactgtgtgcttaatattgtgataagctctggaggtctaattgtgagcaaaagaatgttctctgcctttctgtaacttacagtctcattggagagagagactttaatctcacataatttgagattattcataatttgagattatgcaaattaatwtgtaattacaatttgtggtgagtgccctgaaagaaaggtagaaagtgcagtgaaaacatgggtactggcctactctagtaggtcagagagggtctctctaaggaaatagcatatgtgtaagaatctcaggtttacctaggcagtggccacatcaagatgtcagggaggaatattagataatggtcttgaaaaggctcttctctttgaatgggagggtgcaggcattattagaaaataaaaatacaggccaatgtggttggagaagagagaacaaagtggagagagaaagtggatgagattggagaggagagaagtaacctaggaccacattgtggtaatggagtttctctactatcctaagagggtatttaccaatgaagtgacatggtcagatatctaactgttttgaaatgatcactctagctgctttgtaaacagaggtttagagtgtacaaagttggcctaagagacgattgcagaaacctgagctagtgctgattataacttgagttagagttattatagcttgctgggagatggagaggaatgtaaagatttgagaaggcgtatctagagttacttgctaaactgtttgaataaacagcttcacgactatttttccataatttttaaaaacaatctggatagcatctctggtagagaaagggatgggagttataactcgctgagttttgcacatcacctacagtctatcttgcacwtgcatcctttgaatatatgtgtgagatgctgcctaacacatatgtaggagtttgtgtcgactgctttatatatactaactcattttactstcatggaaatactgtcaggtagatgctattacagacatattacagttgagacgcagagtttaagtaactgaccaagtcaaaaccaagaagaaataatagagctgggatttaagctttactttgccttcagatccatatggccaactatatggataagtagcaaacttatgacccttaggccaattctggcccttggctgtttttgcacagccagccagacaactacaaatgttttttacatttttaaaaggttgtaaaaaaataaggaaaaaatcaaattgtattagacagtgtatgtggcccakaaggcctgaaatatttactatttgaccttttgcagaagaagtttctcaacatctctattatgcttttactacgaaaacatttttctttagtagaaagttgagaaacagtaatctttacagataaaagacatgtctggtcataaaatcagttagttgtagaatgagaacagtgtactcacagttacttctgtggcacaataatttttttttattgttgccagtttaaaattaagaactgtgtttaaagttacttgagaagatatggataaaaggcagctgggctagtgctgttatttaactgtgatgccctcattaagaaaattgatttcagtgccactgagactccgtctcaaaaaaaaaaaaaaaaaaaaaaaaaaaggatttcagatggacttcagaagctgctttagcatttggtgacaggatatattagcaaaaacactttctgttttaaaaccatggtttgtttttgaatagaaaaattgtgtcaccactgaatattggtaaattgtgttcagatatcaacagctatttggagaaaaaaatgactccaacaatgcattttttttttcttctagagctttgaggacatagcatgttttggcctttctaaacaaattgacttcttgatttttggggaaattatgaaattcatctgaattttcagacagagcaaaatatwcagccatttaacaaatatttattaaatcttactgtwgtgataggcattttggaggattatgtaaagatgattacatagtctgccactgattttcatttggtaagttgttgttcaaatctaccacactgtatagatgcatcacctgtttcttattcatggaaactgtattgatctgttatctaatagagtccaaaggtggcaatagaggttacatttggctactgatgagcttccatttgcttgtttttttaacctcatggtgccaggtatcttgctgaaacgaagaaaatgagatagcttttgctgttatagattggtggtattagtggttggcaggtgcctgttattgaagcaccattccttagtcatctcactgtatcattcatttggcttgtggagggtggattggaaaaggtattaattatagttatttaaattataatactgtttggttaaagaactctgtayattttatctttccttatccttagatgtgtcagtytgctaaaagatttacattgcataattttctatctttcttttgattggaagtttagagattttacataaagttgtactctgtctttataggaattctatatttttagttatttgataactttccatactattttccatggaggttgaactaatttacattcccacaagcaatgtgtaagtgttcccttttctttgcatccatgccaacatctgttgttttttgacctgttaacaatagccattctgactggtgtgaaatggtatctcattgtggctttgattttcacttctctgatgattagtgatgttgaggatttgttcatatatttcttggccactcgtatttcttcgtttgagaagtatctcttcagccatcgcagtactgggtatctactcaaagggaaagaagtcattacataaaaaagacgcctatactcataagtttattgcagcactattcacaacaacaaagtcatggaaccaacctaaaagtccatcagtggttgactggataaagaaaatgtgatatatatatatacgatgggatatgacacagctattaaaaaaaaatgaaatcctgtcctttgcagcaggatgaatggagctggaggccattatcctatgtgagctaacttggaaaaccgaatgccacgtgttctcgcttataagtgggagctaaacaatgggtacacatggacataaagatggaaaaaatagacactggggactccaaaaagcaggaggttgggagagggttgaaaagggttgaaaagttacctgttgggtacagtgttcactatgtgggtaatggatatactagaagccaaatccccaccaatatgcaatatacctatgtaacaaacacgctcctgtatcctctgaatctaaaatgaaatttaaataaataataaaaagaactattcagctgagctcatattgctgaaccatacgaaaataaagttttatgttttttaacactgaattttgtgtttgtatgcaacaatgagtaactgaacgagggacttggaaaatatgtgttgactgaataagtgaatgaatagatggaaaaatagtaattatagggatttttaaacataacaaaaaatgcagtttcagtatttatcacatatggccagtcttgttttaatctatctaccccaattaactttaaaacagattgcaggcatgatatcatttgatagggtattacttcagtatgtgtctctaaattataaggactcttttttaaaaaaagtaaatgaaattagcatgctaaaaaattaactaatttctcaacatcaccaaatacctaattagtgttcaaatttctctaattttctcacaaatgcttttttatagcttttacaaatcaggtcccaactcaggtcygtgactaacatttgtttgaaatgtctcttatgttaatattctatatatttcccttcccttttstgtcttttgccatcgattacataaatcatttgtcctatagaatttctcatgttctgaattttattgctgacatctctttcctgtcaccatatctttgtctctttatttctggtaaatttgtagcataaatggtagtgaaatctgaaaagtacgtatccagtttaggttacrttttctaacagtaatacttcataaatggtgagatggttgaattcttgaattggttaaaaaaaagcatgtgggtgatacatgtcaacactatttttttttctccaactaagatttttttcttatcatagtcatgatactgaatagcaacttagaggaaacagctgttcatgtgtaatattactaaccagacctttctttaacaaaattatgtatttgtgatttggttgaggttatttataaagagcaatagtactgaaacagtaggagttcttatttggcataggattgctggacatggtcagactacacatgattaagctttgccttctgagtcattggatttggtaacatttttgtctactcaagggtctggccaactttacttttcctattaaggatgatgaaatccttgctgttaactttatactggaattgtaagtgtgaaaatccatccagtaaaaactgaaacttgtagttaattcttatgatttatatagacaaatttaagaaatgtaactttaaatagagtaattttattacagatagactttaaaaagctctttgttcttataaaataaaatgtggtattccctattttgaaatttactctgaataatgttaaattttcataatcagttaagctctgtttgaaactttataaatgaaaacttttttaaatagttaattttaaaaagtattcttaaaatacatttactagggcctcatcacctaggctggagtgcagccgtgtgatcttggctcactaccatctccgccccccgagttcaagcgattctcctatctcagcctcttgagtagctgggattacaagtgtgtgccaccatacccgactaatttttgtattttcagtagagatgaggtttcaccatgttgaccaggctggtctcaaactgctgctctcaagtgatatgctcacctcggcctcccaaagtgctgagattacaggcatgacctaccgtgcctggccaagaaatacctttttcttagaaaaaaatctaagaatgttgatgtttatcttcatggaaattatttttttttggttgactattgaatgtttgaatttagtatttctttgtatattgtacttacttatattttattgtagttactttcaaaatttgacagatagatacattggttcatctgctataatttttaactgattcctataatgcattattgccatgtttggtgattgttgcttaggggatactcaaaacctgaattattttcttataaatagagggcaagtgagaaacaaatgatgttactcagagaatattgaaaagatgttagttttgctttcttagtgtgtaggtccttctaaatcttcagttaaaaaaaaaatgttccagcccttttggcatttgttgatgcacttgtttcttttgtgcatttttccaacatgccttttcctattaaaaataatcattatctgtagtagcttatgtaggtgttttgagacaattccttaaatctatctaattttactaaaaagaagtgttatgttggattgaaagtaatatttcattataaaatggtagctaatagttgtatatttactagggcagtggttattttgattccatttattctttaaagagaaaccaaaacacaataaataatgttgtcgcttataagaattttcatgaaaaagcaatcccggataggagaaaaaaattaagattttgttttaaatatttgctcccagttgtcacaatttattttagaaaattagaatcagatttaatgattgtatctgtttttttgtgtatgtcattattttgatgaatgtaatttgctgatctcctcactgatgatgtcataaatcaggaatgatttatcgatgatgttgaagtttgttgattagataatgtcagagaatcttaatcatggattataaagttcattttatggaagtttttctcaatattgaaatactttattgatggcatgatttttcttaatcatcaatatacttttttgcgttgaaataattgtcatttgaaggttcatcatttggcagtaatacarccaatttgagtcatctattttttcgacagctctttgtttagtcttgtgtagataagtaaaccagaatattcccacgggtttagtgaggtctcaattactgtagtgagttgtaaaatgtgagcatttgatatcttggtaaaccttcttttgtttccttttgtctttgcagataaattattagtcataactgtagcaacaaaagaaagtgatggattccatcgatttatgcagtcagccaaatatttcaattatactgtgaaggtatggtatatcctttaacctatgaagatcctataatgtgtgcctaaagtatgtttttcataacagcagtrcaatctgtaatcctcacaaggaagatagcatttggttacataattactgttagttcatgtagtttttggctttattaatatttcctaacacaaagaaatggtggtaaatgcttgaggtgaggggatagccaaagtattctgatttgatcattacacattatatgcctgtatcaaaatatcacatgtaccccataaatatgcaactattatgcacctgtaataattaagataaaataatgctgtgccactcaaacaataatttctgaatttttgccaatgctttgtataaatatactctataaaacagcaaaaaaaaagttaatatgtatttgcatatatatatataatttctttctggcaggtcatgtacaaatacaatgtaaataagatttggcagggatttttttcactgactgcataattttttctgtaatgggttttgctatcgtaggatgattctttgtttgcagggarttagaaacaaatgtgaagagggtgccttttctgtctattattgagaattgcttttgtttttgctttttttgtttgtttgtttgtttgttttcatttagaggtatttgggaggattgttaatgtatttttaaccaaagcattttagaaaacttatctccaggtgaacatctcattgacaagtgatcagaggaaacttggggaaattgatagaactattaaactcagctatgagaggcctgccattttatttacttacttgttttttttaatagaaagaaggatctgtcagccaagtcttttctacaaataagaggagaacaaggagatacctaggtaggaacacaaaaagcaaaaaactttttttttaaaaaagaagaaagattactttttggagaaaaactgatccatttgagtatstagtatattaaaaaggtagtttttattaaataaccactggaatactaagtatagatgtaaatatagaacagctaagtgttaatatagaacagctaataaacagctaaactttgctgaaaaagagatgtagtggtaacaactagatgtttaatataggataaatgaaaaacatgttagaaatatgttactatgatagatggaaaatgtagcagtatgcactgataggagacactgtggaaataaaattaggataaaataatgctgaaatctagttggggaatcgttagggttcagaatggagagagagtagaatgtttcttatgtgcaaggcaccttgtaaggaactttatatatgatatgctgttaagtcactatatgaaccatgtaaggtagatactactttatttctggatgaggaaaacttgtcccaaggcaartaactatataaagtataatatcagatcttggaccccatccccacttaacttactggagtttatgatccttttgctctctcctcatgtaatgcagtggttcccaaagtgtggaccccagaccaccaacatctgcattgcctggctactgataagaaagaaaaaataatcaggctccccctcagaccgactgaattacaaatcctgggagtgataccctgaagtctgtgtttgaacaaggcttccatgagattcagatgcacactgaaatttgacaaccactagtgtagtggaaagaacatagagggtggtgcttaacatggtgtattgcacagagtagactctcagatgtcgttgggtccaatgttgcattaggattagggattccagatgggttgtggaacaaatctcagggccagaggaggccaatttttagagcaagtactattaatgcttctagattagcctagtttgaatccagatccaaaacagcttgagttttcttgggttgtgtttttccctcaacctgccacataggaagtgataagttataacaggacatttgaggctgggagccccacaggctttgccagcaagatttatctccggctcagtattaagtaaagttagaactagtggtatttattattaaattttattttatccttttcttgtgtgtttatttttaatttcattctccattaatttcccagatctcttagtagatcattataatggcaacttcagactttgttttgatgaaatgaagagaaaaggtktgtgttgtgtgggggaagggacgtgtattgcactttctgttcccttagagtcagtgtgtcatcatgcatttccaattcagggagcagctgctgaggctcaagcaaatagtgaagagaaagggtacagggtaattaaaatcaaatttaaattaatcatacttaggcaatatcttgcattgaaaaatccttattaagctttagacaattacataagtttaagatgtataaggtaaagaaggtgatttttttcttgatgccctctgcaattccctgaaaaacccattttggttcagtaggaaaattgcttaaaggcccctcatcaaggagtcactgagcttcaatgttgatcataaagatttcctgccagattgaaaaaaaagtgatatgggaaatttattcatttttcttctttatggtctaaacaaataggaataaaatgatgtaatgtgagaaatactttctgggtctacttccttggattagactcacaacttttgagatggtaaaaattgagaagggcattttggggatggataacattgaagaattatgatctgatttaggcatctagatttttttttctagaatcatgattccatgaaacattagaagagtggttacggtacagtactgttcaagttgatgatgtctttaagtttttcatagtactttcataatttgagttttgctcaggaatgaaatgttgattttgtttataggtccttggtcaaggagaagaatggagaggtggtgatggaattaatagtattggagggggccagaaagtgagattaatgaaagaagtcatggaacactatgctgatcaagatgatctggttgtcatgtttactgaatggtargagaaacaccctgtggattttaaaatctatattcaattactttttaaagagctgagatttatatttgtagatgatgtattaaaatatggttgggcacggtggctcacgcctgtaatcctagcactttgggaggcctaggcagctggatcacaaggtcaggagttcaagaccagcctggccaagatggtgaaaccctgtctctactaaaaatacaaaaaattagccgggcgtggtggcaggtgcctgtaatcacagctacttgggaggctgaggcagagaattgcttgaacccaggagcaaggttgcagtgagccgagattgcgccactctactccatcctggcaacagagcgagactccatttcaaaaaaaaattattgacaaggaattattgttttaaaaagtagatattactattctgtaggttgcccgttcactctgatggtagtttcttttgctgtgcagaagctccttagcttaattagatcccatttgtcaattttggcttttgttgccattacttttggtgttttagacatgaagtccttgcccatgcctatgtcctgaatggtattgcctaggttttcttctagggcttttatggtttcaggtctaacatttaagtctttaatccatcttgaattaatttttgtgtaaggtgtaaggaagggatcaagtttcagctttctacatatggctagccagttttcccagcaccatacagaaagggagaaaatttttgcaatctactcatctgacaaagggctaatatccagaatctacaatgaactcaaacaaatttacaagaaaaaaacaaatagggccatcaaaaagtgtgtgaaggatgtgaacagacacttctcaaaagaagacatttatgcagccaaaatacacatgaaaaaatgctcatcatcactggccatcagagaaatgcaaatcaaaaccacaatgagataccatctcacacgagttagaatggcgatcattaaaaaaatcaggaaacaacaggtgctggagaggatgtggagaaataggaacacttttacactgttggtgggactgtaaactagttcaaccattgtggaagtcagtgtggtgattcctcagggatctagaactagaaataccatttgacccagccatcccattactgggtatatacccaaaggattataaatcatgctgctataaagacacatgcacaggtatgtttatcgcggcactattcacgatagcaaagacttggaaccaacccagatgtccaacaatgatagactggattaagaaaatgtggcacatacacaccatggaatactatgcagccataaaaaatgatgagttcatgtcctttgtagggacatggatgaagctggaaaccatcattctcrgcaaactatcgcaaggacaaaaaaccaaacactgcatattctcactcataggtgggaattgaacaatgagatcacatggacacaggaaggggaacatcacacacgggggcctgttgtggagtgggggaacgggggagggatagcattaggagatatacctaatgttaaatgacaagttactgggtgcagcacaccaacatggcacatgtatacatatgtaactaacctgcacgttgtgcacatgtaccctaaaacttaaagtataataaaaaaaaaagaggcaaaagtagatattactagttataaaactattgtattaatcagttcttgtgctgctacaaattcctgagactgcataatttataaagaaaagagatttagttggctcacaatttcacaggctgtacaggaaacatgatgctggccagctgcttggcttctggagaggcctcaggaaacttaggatcatggcagaaggcaaaggaggaatgaaggtctcacatgattggagcaggaggaagtgaggggatgtgctacatgcttttaaacaatcagatctcatgagaactctataatgagaacatcactagggkgatggtgctaaaccattagaaactgccctcatgatccaatcacctcccacccaaccccacctccagcactgagggttacgtttcaacatgagatgtgggtggggacgtagattcaaattatatcaactatggtctgagatgatgtaattaaagatgatgaattaccataaacactaatgagacaacatggcaagagctaacgtttttgtgaaattcatactttagtcttgagttaagaataaagatcatagtgagctttactattgagacgggtaacttaatggattctggttaaacagaagaaaaaagaccacgcaaagttataaatacaagtgagacattagaaagcctgtgttactaagaaagaagaacctttttaatgtaaatgtattttgtgtaatatttcactctcctaattaaaatatccactcttttttgccatcttcttataattttataataacatcaaattgtcatgagttattagttactacttcctttattttattttctgtgtcttatttgtttttgttattgattgctcattttaagtccccatgaattttcccctctaacttaggaaggtctttttacatattttttctcaatttgaaaatataaagacacaaattatttgcagatgaaaataagagtaatatttttatgcattagtataaataagaaagttrtaaattatgaaatgaaaatagatgttaatataatgaagtcccagtgccgtacacacttaaaaattttcaaaagatacataacacttgcatctgtaaaattttcctgttatattttacacaaaatattaagttctgcttgtggttacctattttgcaagatgaagtatggtaaggcaagtgttagccatagtgtactgggaatttttctacagcatttgttattttttttacacttagaaaaagaataccaagttcattaaaatagctctgtagaataaatactgggtatgttttggtttaaaattaccatggatttcaaacaaccatattagtcagcttaaacttgccacatgtacattttcactttggctctgaggcagattctccttgtaagagttactacatgtgagtcagaaatgattttacatcctcaagcttccttttgggttttaggaagaacttttctctaccatcactctcgcatcrccatcccccacctccggccccctatctaatatttgtccttgtggacaactggtatagtgagggacctatttttttctcatgagaagaaggacactgtgatatacctaaagcctgcttgaggttgagtttgttgatttagatgatactttaggacccagcttgacagaaaagataataaaattttaatggaagacacagtgtcttccaggcactgttagtgtttgggatatatcatggaaacaaacagataaaatttctgacatctcctgtgagaacagccagctaactgaaaacatgggtgcccactcagccaagttgttgtctaagaagagtcattaacattttctgcatcattaccyaccatgactatcctgtggaaaaaacctaggggtcatgagaaagtaaccaggaggttaaagagggatgagcaattgaagccacataagaaattttttttacccttcttattttttaaaaacaacamcctttttaaaaagtttatacagagtaatgaatctagttgaaaattgtaatctagggcctgggagaatgaattaaactgtttgtaaatggtttgaaatatgatgcccattctgtaacacaattcctaaactcttaattaaggttagctctggtaaaggtccagaattcaggatatrttcattttaataaagcaaaacattcttattttttatgtggtatttttaaggacaactcaactgttttatggaagcataggtcactatcatatgaaaatatacacagatgtatatacttagtggtttagatgagccttttaagaaacacagctttgttagggcataatttatataacatgccataaacatttgtaagtgtaaaattcaatgaatttaattaaatttacagagtcgtgcagtcatccccattatkcaattttagaatgtttccaataccccataattatcccgtattccatttagacatgctaaaaagcctgaattaatttagaaacaattttgtcgcattccttccatggaatatgtattctaaacttacttttggatgaacgtttaaaattagaaactggctctttataatctgtagggtaagatttattatatttaatttagataaaaaaatttagatatttggcaaggttttaggttattctcagaacaaaaggaaaactgaagatatccatatatgagtgagaccatctgatactgtctttttgtgcatggcttatatcattaacctagtaacctccagttgtaaccattttgttgttgcaaataacaggatttccttcttttttatgggtgaataatattccattatgtatgtactccatatttcctttatccattcatctgttgatacatacttagatttgttccatatatttactattataagtagtgttgcagtaaacatggaagtataggtatcccattgatatacttattttctttccaacagcacaacaaaaatatcccccatgatcaagtgggatttatcccaggaatgccaggatggttcaatatttatctgttaaaattgtatttgttttatgccaactaactccctttccctccctccaaaatttataaaataattttaatcattttattgtgattttatcataatctgttgtgcaaagtcaactgggtacgtgggtgtttttaactgtgtgtgtgcgtgtgtgtgtctgtgtgtctgtgtctgtgtgtctgtgtctgtgtgttttgagggtgggtggttaggagtggatccatagtattggtttgtgatgttaattatctctggaaatatagacatatgcttcaggtgaagatatgatgaaagaattatcaggtgtgaagctacttctgtgctgctaatagtttggatgattataatttttgctgaagtttatgccaataatgataaaggattggggctaaatgacaaggttagggaacacttctgttgctttcttttttggctatatgggagcttttgcttcttgttgagactcaagatgatggattctgtggcttgtaccactgcctgtttttgtaaaaagttttattgaaatgcagctgtgctcatttgtttacatattgtctgtggtggcttttgcaacacagtgacagagttcagtcactgtgacagacaatatggtcatcaggacctaaaatattttctgtaaaaggccagagagtaaatatttactgactcccgctttaggccatagttgagaaccattgatacagtctgggaactggcacagaatcatttttaaaatagtttgtcagacagtcttatttatgagtgaggaagagatgggtaatgtagaggtctctagggttttaaaattaatctagccttgtgccttctagtgggagtggagaggatttgaatgcaaaataaattaagtagatggaatcaataggattaaggaaaagattccatgagataggccatggaaagagaggagtgaagggtgaatgaaagattttcaacctaggtgactatgtggttgatgktgtcacagaagtagggaacacagaaggacaaaaaggaaaaacacttagaaaatctcaatcatctattgagatagaacactgacatgtctggcaggggactcagtatgaccacatcaggtagaatcttatggttttttcaggacccaggcatacttaccacagttatatgtggaaaattttattttcttcacatgtagatcgactcaatttctgtgagaatatttttatgacctgtgtatcgggggaaccacccccaatatttcaacgtaggttctttcctatttccctaagtgttggccggtctgagaaataaagggaaagagtacaaaagagagaaattttaaagctgggtgtccgggggagacatcacatgttggcaggttccrtgctgccccccaagccgcaaaaccagcaagtttttttgttttgttttgttttctatattcattttattaattcatcccccccaagttttctacagaatcctggaattcttctcagtgtagtcaatacattgatagtttgtcgattttaatgaagacatccctctcagagcctgtgctgttccgcagttgggattgatgcgtctctaggcctgcagggacttcccttcaccatcatatgggaatcctctgtgactctaccctgtgtggattcttctgtgccctgtttttcatgtcttcctctttcttagtttattcccttaatttggtggagcacgttctccagtagctacctctactttccttttccccactcttcgtaccaaattttgcagattgggttctccagaaagtagaatcttaggtggaaattagtgtgtgggaggcttattaggaatgcttgttggatcaatgcttatgattatgcagtttggttggattcatctgtgttcttctactgatttttcctggggtcacttttgtggctgcagtaatctggctgctccactgagagtatgtctggttgttagctgggactgttggctggatacttttgcttatctacaggtcatctcttcgaggataatttgggtttcttttgctgtattagtccattttcacgctgctataagaaatacctgagacgtacttggttttcagggcactacattgccttgaaaaccagcaagtttttattagtgattttcaaaggggaggcagtgtatgaatagggtgtgggtcacagaggcacacagaggcaataaaatatcacaaggcaaatgggggcaaagcgagatcacaggaccggggcgaaattaaaattgctaatgaaatttcgggtatgcattgtcattgataacgtcttatcaggagacagggtttgagagcagacaactggtctgactaaaatttactaggcaggaatttcctcgtcctaataggcctgggagtgctaccagagactggggctatttcatcccttatctgcaaccgtgtaagacagacattcctagagcggccattttagagacctacccctaggaaagcattttctttctcagggctgttccttactgagaaaaagaattmagcgatatttctcctattcgcttttgtaagaagagaaatatggctctgttccgcccggctctcaggcagtcagacctgatggttacctcccttgttccctgaacatcgctgttatcctgttcttttttcaaggtgcccagatttcatattgtttaaacacacatgatttactaacgatttgcacagttaatgcaatcatcacagggtcctaaggctrcgcacatcctcagcttacgaagatgacgggattaagagattaaagtaaagacaggcataggaaatcacaagagtattgattagggaagtgataaatgtccatgaaatcttcataatttatgttcagagattgcagtaaagacaggcataagaaattataaaagtattaatttggggaactaataaatgtccatgaaatcttcacaatttatgttcttctgccatggcttcagccggtccctccatttggggtccctgacttcccgcaacacytgtgtgcatttttttaaatttgacaatttgactttttacagccaaaataaatttaagtaggaaaccttccttgccctttgagaagttttaagtaagttcaaataacttttctaaagtatttaaacacagaaatagcagtgctactcgaatgagataggaaaggtttcagcaacgtgaaatttttcttcaaaggcaattatgtgataacttttgtcttractttttgctttaaaataattgtgttttgttataaagataatacaggcttataaaacgctaaattataaaagttgccataactctttttcaaacaactgacatttattaatagtttgagctatactgtttatataatctgtatccatcattagggtttcaaagacaaaaaatattcactcacattccaaaagtgcatttataactttttttaatttttaaattttattattattttacttcaagttctgggatatatgtgcagaacgtgcaggtttgttacataggtatacatgtgccatggtggtttgccgcacctattaccccatcatctagagtttttttttttttttttttgagaccaagtctcactctgtcaccaggctggagtgcagtggcatgatctcagctcactgcaacctccacctctcgggttcaagcaattctcctgccttagcctcccaagtagctgggattacaggcgcacatcaccacgcacagctaatttttgtatttttagtagagatgggttttcactatgttggccaggatggtcttgatctcttgacctcatgatccgcccgccttgacctcccaaagtgctgggattgcaggcatgagccactgtgcccagcctcatctaggttttaagccctgcatgaattaggtatttgtcctaatgctctccctctccttgccccccgcccaccgacaaactccactgtgtgatgttcccctctctgtgtccatgtattctcattgttcagctcccacttatgagtgagaacacgtggtgtttggttttctgtttctgtgttagtttgctgagaattatgggattccaccttcatccatgtccctgcaaaggacatgaactcattctttttatggctgaatagtattccatgttgtatatgtgtcacattttcttyttccagtttatcattaatgggcatttgggttggttccaagtctttgctattgtaaataatgctgcagtagacatatgtgtgcatgtaactttatagaagaatgatttgtaattgtttgggtttatacccagcaatgggattgctgggtcaaatggcatttctgattctagatcyttgaggaattgccacactgtatgcatgctgctacctgcaaaatttcagactcagtttagtcagagtctccaatcgtaagatgctctgacatcacaagctatttttccccatctccaggcaatgcacaaagggtctgtttatcactcgcatggtagtcgctctttcagagactttagtttatttgcctcacttctcatggcccaattacccataaaactggtcttatttcccagtcttcattattaaaaaaaaaattatcaacaacttatagtcttgaggaaaatatcaccgttaaatccggttgaggaaatcagttgtacttagcagaaaaagtacagtgttgtgttttgtaatgtcagattaatcagtttttttttttaataaacagggcaaagtttgaggtttcagtcagaaaaattttattgtaacttaaagttcagtttcaaaagtacaagtatttggctaaaaataaaattttttaacatacacatttgtaaaaactttgaagtgagttttcctctgtctctcccttyactgtagtccctttcatgttaatttttaactttgttcagtgtttacagtgtgccaggagttatttttaatttttttaaattataacttgaggatatagatactacttttccctccattttatactttacacttaagtgtaaagaggttaagtgacttgtcctaaggttattctcatatcaagtggcagaggtgggattagaaacccacctggcagacttcaaattgtatgctgtgagtgactttacaattatgctgttagctacctgggatggtaagtcattaatttatcatcattggaaacctttggtcttaaggtgcactgatgtaaaaaaatgtaaaataatttgtgattgtaatgaataaagaacttattgcagagtagaaaaattttagatagtggctgttatacttcacrttttgttaagtcattgtgattctgtgaatgaaccatgaggaagaaagtcatcagaaaaatcaatgaaattatattatattaattaaattatagtgtcagtttttacaaaaattatagtgtcagtttttacaaaaattttctcccaagtgtattgagctttaaaaacctgcagttgtctgaacgcacttattttaagattccatgctaaacagtcattcagatattaaacatacattgatgacatttagcagttaaacacattttgtcaaaaataattcttcagaaactaatggactggtacaaatttacttgaaatattaggcagttatggcaacttccgtaaatgattctatctgtattataaagttatacaacaagtaactgtatttctaacattttaatgctgttttagaatttcaatttgggaataagtgattmctgaaaaaaaaattaaggctaacactaaaaaagctgacttttatttggacttcatttgctaatgtaaactaataattcaatacaattcatataatttaagttgagagaaattttgtttggtgttctgtgtaaatagttggcacaggtattaatcttgcattgtattcttgattctgacttttgttagagaacttttcatggtttatgtgcctagattctgacaagtgtattttaaaacacattttttcctcattgaacagctttgatgtcatatttgctggtggtccagaagaagttctaaaaaaattccaaaaggcaaaccacaaagtggtctttgcagcagatggaattttgtggccagataaaagactagcagacaagtatcctgttgtgcacattgggaaacgctatctgaattcaggaggtgagttagatactggaagaaaartttaatgcaagttataaagactaatgaaacaaccatttttgtagatgtagtaactttagatatgaagttttaaataacccttattttattattagtatattgacaaagsattttcccatgtattatgtgagttggtgttcctaaaaacactaggtaatataaatgttataattaccaaattataagtgaggaaactcatgtttttcaaatttaagtgacttctagagatattctgttgttaaaggaagaaaagtatggatccagttcctttaattatgacacattgagaattttcttgctctaggataataagtttagtaagcttccttacttgaaaaaaaattattctcagtccgcaatcaagtagcttttaagaataggtattacttaatattatctgattttaaacattatgggattaaataaatgatttgtcttgaacccagtagtgaaaaatatctaacattgagtgtctgggtatacttaaaatattgcattagctgtgctaccacggattaaaggaatgaattaccacattcctcagtccagcctttagaaaattaaataaaatttgaccttggaaattatratggctacaaatttatttttactagtttgagattaatgtaaacatagggacaaaagacataaccaaataggatgaaggacatgttagagaaacaaattgggtacaaattgcaaaccacattggaaaaatggattttgggggtgatctacgtgtatataaccagtactatccaggctagttaaaataagtgctgcttcaggtagcagcatatctgggttctaggctttgcttagccactaggaagtgatttagtttcttggtaatgcctcaatttcagctctttgcacctgcactttattttatcaacatattcccacagttgtaccttggaactttgatagctcatatagattttgtacttttgaaaccttaaattccagtttgcactgcctggyttgaaatctcttttcctcttcgtctcaatatttctacagataatgctttctgggatctcttgaccattttcttttctccaaatctatctaccacctttggatttaacttccatattcaagtgagaacccaaggtttatcatattggttactctgtgcttcttgccttagcagtctttctctgttagatttccagcttgtgaaccgtcaaagcctctccctaatatggctacccaccatcacttctctgcttgagcatgcggctcatggatgggtgctgcttccacatcatggcctccatactgtcaagacctcagtaatatatggctaatcttgcaacttattctaagtcctccattgtttaaaaccaattttttaaaggaagtatgtagccatgggactctgagacatgttttattttatacttgttgaaatttttctgaagatgacttgcatagtgaaatctcgtaaatttatttcaaatagtgatgtatgtactcaggtggttaggtttcagacagactcacagtgctttggaagcagcaagaaattagcaagcaagtgcagttgtaagtcagtttaattaaggaaaaggtgttttaagtgggaaagtaatcataaaaggacatcgaagcatcatccttatgctttctgtagtcaaaataattagagaagggcagaaaatataaatatgtttaataaaagtttgaataatttcatagatcacatatttacagttatttaagggacatgagttgtttgtgggcatactatttagtttttaaaaatagtttttggccaggcacggtgtctcaaacctgtaatcccagcactttgggaggcctagacaggaaggtgacttgagcccaggtgttcaggccaggctgtgcaacgtagggaaatcccatttctactaaaatttttttttaaattatctgggcatggtggcacatggctgtggtcctagctactttggagactgaggtgaggagattgtttgagcccaggaggtcgaggctgcagtgagccatgagtgcaccattgcactctagcctgggtggcagagtgagagccccatctccaaaaacaacaacaaaaagagtttttaatagaaaaatataaatcacataaaatatgtaatgtgaaaatagatgtttttttttcatttattgaggacatttggggtctgtaaaataaggaaacaatttttgaagaacagtaatataaaccattggaaaatgttgagtgtctctgtgtggtacatttttcatcayagaaaattggccatgggatttaaaaaatgtattgtcttctccccagaatttttttatttgatgccaggcatggtggctcacgcctctaatctcagcactttgggaggctgaggcgggcagatcacctgaggtcaggagttcgagaccagtctgaccaacatggcgaaaccccatctctactaaaaatacaaaaattagtcgggcatggtgatgggtgcctgtaatcccaactacttgaraggctraggcaggaggtggaaggcggaggggaactcgggaggcataggttgcagtgagccaagattgtgcctttgcrctccagcctgggtgacagagcgagactctgtctccaaaaaaaaaaaaaaaaaaaaaaaaaaaaaaatttatatggcaagaaccaaaaaatgagcaaccattgattggttttggtcatgttttcattttttcttttttctccaataacagtaatttccctggacctatttttttaattcttttaagaaaattttaattttgacagttaaaaaatagatttttcttcaactcacaggagtaacattggttcctttttaaaagtattgaatgtcaatgaaacatagcagcttggctgcatttccataattcagaggaagattcagacaagaaaaatgattccgttcgtgtctttaatagacaaatgttattggcggtcttaatgcttatgctttaaggccaaggagaacaatccaattttagacttcctttttccagactatgacacaaaaaacctagccagaaaatggtttagcaggcacaataatgactggccaaagtaatggaaacatttccaaaatgtcttagatataaaatttctttgggatgtttgcagttagtgacaaatccagcattcgtttgattgcattagcatctctggcactgacagtaaaaccactgtagtagagattttattctgtaagaaagagtgagttctccgcagagaatccaagaagagctttttagaaggtcagagaaaaaattcttgtctcagtctattcttttcctagtaaatctgtttcccttaggagccttggaaaacattagttctccctcttttgtcaattacttttggagacacatttatttaaaaagagtttggttattttctgttttgcagttggtagcaaacactctattggagtttatatataaaacaaggggcactcaataattcatatttctttcatggtgagctgtgaaattccagcctaagaattaggcttcatgacttcacaactctgttcaactggtyagtgaaattaacatgacaccagtttyggtctttgaatcctaaattatctactttctctctgctgtgttgcaggatttattggctatgctccatatgtcaaccgtatagttcaacaatggaatctccaggataatgatgatgatcagctcttttacactaaagtttacattgatccactgaaaagggtgtgtaacagctgcaatttttttgttttattgatttggttgttttgtgtgttatattgtgttaatgtggagtggtcagaaacaaaggttttatgatagtatggcaaatggtaaactgaatttcaaaatgttgaaaacatattttaataggtgagattggtttatgtcacctggctggatatcagcactagcttagtatgtctttrtggcttctcttttgtggccaagttggcaaacttgccgaacttggttggatcaggcagaaggaaagaagaactatrtaatgcagtgctrtatgtattgaaacacatattgaaatgacttgatactaaaatgaaatggcagccctcacaccactgtcatggccctacctccactgcatactcacttaggctgccttaaaataacagaataggttrcattatcaaaacttctgagcttggagatttaaagagacaataatgaaatcctaaagattctagacaatgtcttcttttatattcttgaataaataactgtcatttattaacatagagcattagaaatgtgtattcttgtagtcactccatcttggcagctataattgttttctcaaaagctacaccaaagccatttgataccagagtgaacttttgcagtttaaaaaaatgcagtgtattctcatttgtagtctttagccttgcaaagccctttgtacctctctgagcttctttgatcctagataggctagaggctagactctgtatccacactttatcagtagagaaactgagaccacatagtctgtgacattgtagggactggatccttggttccctgaaaaccaaaatctggactttttttctgtttcatatgatgataacatagactttatgtgtttaattggctacaattttaaaagaacacattttctggtattttgaaatgacatgtgaataaagccactcaaaagacagtttttaatttgaaaattacctgtgatacccttgaggacagagaccttcctctgagatttggagcctggagattatgggtgttgagaaaacattgaagccaaaagccctggtcattgttcaagtgtttggtggcccagagtggatagagcctgtaaggatgggtgtgatcctttttaggagactttatagccaatttgtggatttcaaatatttgagaatttggagcctgaagattcaaagagatgataatgaaatccctaagaggttagagcctgaggatccacgggactgtgctatagacacaggcttttgtcttttattcataagaacacttaaactgtaataaataaagcaactcaaaatagcagtggtctaaataagaaatatgttttatttaagttttttccttctgtcacattgaaagtaattaagaagtagggagcacaaggctgttagggaggctttatgctgtcaagagggatagctcttttgttgctccaccattggtccatagctcccagttttaatcttacttccttgtccaaaattgctacttgagtttcagtcgttgcattcgtattctgggcagctaagagaggcacggtagtaaaaacaggccatctcagtttcatcactctctttaagttgcctttctagaagtcttaccaaatagtttctcatactttgatcagaacgtatgtatgtgcccactcataatacccaaaggaaaatctgtttttttattttaagcagatatatgctcctgaaatctgagttcccttattggggagttgagggaatgttgggtacaataagcagtcttccatagrccctagagagaatattcctgaaattgatgtgagtgaaactctggagtacagtaaagcaagattttctaatttgagaatacttttatcatatttaccaatataagttgatatttaataaatttactgtatatattggatacagatataaaagttacttgtgtgtttgtagttgctgtcattaggaaacaagattttctttaagtgtattttgcaatgagttgcaactatcgcagtttctaccttttagctaaatactttagtcatctaaatattttgattagacacttaagatataagaatattaaactttaaattccctcaaagaacaaactatattaatatgataggaatgtttgctgtttttgttgtcattttcaatatcatttctattcttatgttttaggaagctattaacatcacattggatcacaaatgcaaaattttccagaccttaaatggagctgtaggtatgcttcctaaataccggattgcttacgtatacaaacaaacacctgtgttttcaactatctttcctttgttatgtccatttgggggctgtgactaaggtcgacagtgtaaatattgtaattattgtaacttaacaaaaatactagacttgaacttaacatcagtacattaaattaaaatcatttcctatgactagtgtgaaaaagataagcttctggctttaggtaacttaaaatttagtgtctcaccatttgggaactttagataagtttataaattaattacactttattattacacattttctagtgaaattctttgtattacgaattacccagagtattagagtagatccttttgacccagctgaaagataactggtgacaactagacagtagactggggaagagtgtgtgtgtgtgtgtgtgtgtgtgtgtgtgtgtgtacatgctcgtgtggatatgcatatgtgcctgtgtattatagatacatatatcttgataaaatacattaaaactaatcaatacagtaaaatttaaaatataatttattaacacataaatacttttaaatatacatataaaaattgagaatatattgcaattcaatcaatacttcaagtcagtccatttagtaaaaagattcttaaaatctagtcaggcatggtggtgcgtgcctatagtcccagctatatgagaggctgaggattgattgatcccaggagttcgaggctgcaatgacctgtgattgtgtccttgcactccagccggggccagaaagtgagacccagtctctaaaaaaaaaaaaaaaattcccacaatgcaaaatgtttagtttggagtgctcaggaaattttaagacgatggctctgctcctctctgacttgagttttatcttgcttartgtgctaagtctgatttttaagaactggaaatattatcattggtagccaattgtagaacccttgcttatgccagacaatattctactcaccatgcatatattgttattatcttcataataaccctaaaagacagacgtggataccatttgatagatgactaaactgagttactaatttaacttggcaagaataacaatactatgaaggggcaaaggcaggattgcaagatgaattattctgacagacagctcactggcttagcacctcaatcactttactggtgccaggttggagtgagtttggtatctgtatctgttgtcactgtcatccttcattttgggtatctgctggcttggagtagatgaagttactagaagtgttgtagcacttggaatattacatccatgagaaattttgtaatgatgatacacacacatacacacacagacacacraatacagacacacacayacgtattttaaattactaaagcctattttctctttttaacccagatgaagttgttttaaaatttgaaaatggcaaagccagagctaagaatacattttatgaaacattaccagtggcaattaatggaaatggacccaccaaggtaagtaacagttacttttatttggccaattcttggagatagactatggattgatatgtggaatgtcatctattttatttttaaaaatttctttcaaagactttattttggtgctaaaataaagacttcatcttttacacagtatatcatctggttttatactaattaattaatcaaactgatttttcctcagcagagtgatagccttttattctatttacagcacatttggcgttttattaaataataacaactaacttgggagtgagccacatttctctcatactgggtatcctttctcattaggaattgctcaggacattaagagatcatttgtttcacctgacttgccgttttctaagttaacaacactgttaagattggggtattacaatatggccagaaagcttcctctttctcttatttcattaactacagttaatgaaagtgacataatttgaccaataaaattttggatgcctttctgtttcaaatgtgtataattgagcttgctaaaaatgttattgactgcaaaatttatagatgaaaagtttgttttgcttgggtccaatcaagctggaacataaattgcattgaaaaaatatagtaatactgtgcttacaacaaccttctgacatgctgaaatgcctggtttaagtacctagaaaagggattaacagatttttgttgtgggaagaaaatactgggggatgtgggcttctgttccagaggagtgagtgatctgaattccaggaaaagctatgtgaatggaaagaaatgcaaggaaaacgcatgctggcaacttctgctccatcaaamtgaaagaagtagattcccgtctcttctagttaatctttcccctttggttttcatcccattccagccttcctacaaagcaatctctatcttgtgccctccttcagtctctatcttataatcagtttccccagctctgtcatctcctcattagcattttaaagaccagtaagtctcctccatcttacaaatgaaaccaaaccaagccaacacaaggtagaacatcctcttcaatccacactgccttccaggctgcacctggcttttctcctccccttcacagccaaagtttcttaaaatatagataactcgctgtcactactccacctcttcccatcacagtaagaaatgctcctgttaaggtccattgtgaaatctttgttgagtagtggacattgttcagcccttatttttatttcacctaaagacagcatctgacaattcattgatttcgtttggtcctacttgaatgctccttccctttgcttccacgatgctctgctgctttgtctatttattttctgggctttcctcttcaatctctatggttcttcaaaatatttattttaaaaattttacagctcagtttgtgtgcatgtagtgaccctcatccttactgttttagtaaatgttcacaggggcctgtctgrggcctcttccttttcttttccatatacattgttgggtaatttgagtcatttcctcatcagtgaattctctcaatgctggtggttttcaaatccttcctctaactcctgtgtctttcctaagctccaggtcagaatactcaagtggtagatttctgtgttacatatacccagagattaagacttgcagcattacctccccttataacccagtggttaaccagaacctgggttttgttttggctctaggcacttcccactccaaaagccctctgttctaactcctgtgcatgctggttttatctgattttctcagtggccatagcaactttcttagttcaggccacctgcaacctccttctagtagcaatcacacccccagcagcctggaactagagtattctgccaaagcagaaaccctgtcactctactcacctatataatgattttctgtgaacttaggtatgaagttgaaaatcctcaacttgtcatacaaggctctttatgttgctcctgctttagtggccaccaatctaccaccccattcactctcccactcccaaccctacacatgcacaccctcttcacattcaatttcttctcctttctccctctccgctcagcaatactacattactttcaactttgcagaagtttcatgttgctgtgtctgcaaatcttctgtacatacatgctttttatatatcctggaatcctctccccctaattcccacctgctgcatctctacctgctaagtccttcttatcttttaggtgtcagtgtagtctttactttttgggtctcttgtatgcttttgtaatctctggagctacttctgttacagtatgtatcacacactggacaggaatgatatttgcctgttttctggtctctcttactaggcctttggtctaggaattacagaaaccttatctgtcttgtttacttttgtttccccagggtccagcacatgtgtagcgaatactacgctttcaacaaatcttaattgaatgttagagtcaataatctaatgacctagcattattcttgggagtagtaaggcagattattttctggcagggcaaaagcattatcaaattactattggttggctgggcatggtggctcacacctgtatcccagcactttgcaaggcttaggtgggtggatcacttgagggcaggagttcaagaccagcctgaccaacatggtgaaaccccgtctctactaaaaatacaaaattagccggggttggtggcacatgcctttaatcccagctactgtagagggctgaggcaggagaatcgcttcaacccgggagacaggttgcagtgagccaagatcacgccattactctccagcctgggcaacaagaacaaaactctgtctcaaaaaaaaaaaaaaaaaaaagttggtcactgtaactttccctaggcaaatttaatagatgaatccctttactatgtgtgtgtagtcactgttttagctgtctgtgatactgtcagtgccagttagtcaagagctggtagaaccccacttttcccataactacatagtgttctgttcctccttggtaatataatattttaatcaaatttaggctggtgcggtgkttcacacctcatgtcacgttaggaggctgaggcaggcagatcacttgaggccaggagttcgagactggccagcatggtgaaaccctgtctctactaaaaatacaaagaaaaaaaaaagaaaaaaaattaggcagctgcttgtaatctcagctacttggcaggctgaggcacgagaatcgcttaaacctgggaggcagaggttgcagtcagccaagatcgggccattgcactccagcctgggcgacaaagcgagattgtgtctcaaaaatttaaatgtctttgaggagtgattttggtcctgagaatttagtgattatggataaggccttatgttcagtgatttcaacgtgatcaccaattccttccaaatttccaggatgatgctgactggagctttaaaaagtgactaaaggacatatcacaagaaaaggagcactaatccttaatcatttagaaagacctaggtgtactaagaaatattaagtcttcttggaaacattttcagtttgcactatcactgtttctggcatttcaagctatgtgatgctcctattatgttttctctgatattatcatatctagttcattttgttattctattagacaataaaatatgaagttttattatagatattatatttggtataatacaaaaactcgagaaaatttgaatatgtaaacatttaacactaatactttatartattaggttaaagttaaataaattcaaatgagtatgtcacgtattcttcttatccaggctgatggggaaagaaggctgattattacaaacattttttaacctttataaaaggtggaaggattttttggtatgattttttgtaagttagttttacttattattttgtttagtaatggatgtttataatgatagtggttttgagccataatattgaactaaacatttaagcagttttttcattaaaaatgtatataatctataagtggtgaagtgattatagtatgttgatgatactaaagtataaaaaatgagcttatttcctactttctccaaattttatgccattggaaaaaatattaacaattttaagtaattttaaaaatcatttatactgccctcccatatggttttaattcatagctgttttcagtttttatgtctcctcagtatatatctatgaacatttatattttcctttgttttcatagtagtatataaacaattttgtgtttcttaattaacattttatttaaaacmtatttaggtattttaaataattattttcatacttggtctgtataaatctaatatgaatcaatttttagatagaaactggtttctaatttgaaggtttactttttcttgaaacccatttattgttagtaatgtataagatgcatattttaatgttcagccttttcttttaaatatcaaacaatatacatcttaattatgaatttggtagctttttaaaattttactttaagttcttggatacatgtgctgaacgtgcaggtttgttgtacataggtatgcatgtgctgtggtggtttgctgcacctgtcaatccgtcatctaggtttttaactctgcatgcattatgtatttgtcctaatgccctccctcccctttccctccacccctcaacaggctccagtgtgtgatgttcccctccctgtgtccacgagttctcattgttcagctcccacttatgagtgagaacatgcagtgtttgtttcccgtttctgtgttagtttggtgaggatgatggtttccagcttcatccttgtcyctgcaaaggacatgaactcattctttttcatggctgcatagtatttcatggtgtatatatgccacattttctttttttattattattattattattatttttttttttttattgatcattcttgggtgtttctcgcagagggggatttggcagggtcataggacaatagtggagggaaggtcagcagataaacaagtgaacaaaggtctctggttttcctaggcagaggaccctgcrgccttccgmagtgtttgtgtmcctgggtacttaagattagggagtggtgatgactcttaacgagcatgctgccttcaagcatctgtttaacaaagcacatcttgcaccgcccttaatccatttaaccctgagtggacacagcacatgtttcagagagcacagggttggggataaggtcacagatcaacaggatcccaaggcagragaatttttcttagtacagaacaaaatgaaaagtctcccatgtctacytctatccacacagacccggcaaccatccgatttctcaattttttccccacccttcccgcctttctattccacaaaaccgccattgtcatcatggcccatccccartgagccgctgggcacacctcccagacggggtcgtggccgggcagaggggctcctcacttcccagtaggggcggccgggcagaagcgcccctcacctcccggatggggcggctggccgggcggggggctgaccccccacctccctcccggactgggcggctggccgggcggggggctgacccccccacctccctcctggacagggcgactggccgggcagaggggctcctcacttcccagtaggggcggccgggcagaggagcccctcacctcccggacggggcggctggccgggcggggggctgacccccccacctccctcccggccggggcggctggccgggcagaggggtcctcacttcccagtaggggcggccgggcagaggcgcccctcacctcctggacggggcggctggccgactccccccccccacctccctcccggacggggcagctggccgggcagaggggctcctcacttcccagtaggggcggccgggcagaggagcccctcacctcccggacggggtggctggctgggcggggggctgaccccccccacctccctcccggacggggtggcttccgggcggagacgctcctcacttcccagacagggtggttgccggacggaggggctcctcacttctcagacggggcggttgccaggcagagggtttcctcacttctcagacggagcggccgggcagagacactcctcacctcccagacagggttgcggcccagcagaggcgctcctcacatcccagacagggcggtggggcagaggtgctccccacatctcagacgatgggcggccgggcagagacgctcctcacttcctagatgggatggcggcggggaagaggcgcttctcgcttcctagatgggatggcggccgggcagagacgctcctcactttccacactgggcagccaggcagaggggctcctcatatcccagacgatgggtggccaagcagagacgctcctcacttcccagacggggtggcggccgggcagaggctgcaatctcggctctttgggaggccaaggcaggcggctgggaggtggttgtagcgagccgagatcacgccactgcactccagcctgggcaccattgagcactgagtgaacgagactccatctgcaatcccggcacctcgggaggccgaggctggcggatcactcgcggttaggagctggagaccagcccggccaacacagcgaaaccccatctccaccaaaaaaaaacgaaaaccagtcaggcgtggcggcgcgcgcctgcaatcgcaggcactcggcaggctgaggcaggagaatcaggcagggaggttgcagtgagccgagatggcagcagtaccgtccagctttggctcggcatcagagggagactgtggagggagaggggggaggggggagaggggagaggggagaggggagaggggagaggggagagggtatatgccacattttctttatccagtctatcattgatgggcatttgggttggttccaagtctttgctattgtaaatagtgctgcaataaacatacatgtgcatatgtctttatagtagaatgacttagaatcctttggatatataccctgtaatgagattactgggtcaaatggtatttctggttctagatccttgaggaatcactacactctcttccacaatggttgaaataatttacactcccaccagcagcgtaaaagcgttcctatttctccgtatcctcaccagcatccgttatttccagactttagcgattgccattctaactggcatgagatggtatctcattgtggttttgatttgcatttctctgatgaccagtgatgatgagcttttttttcatgtttgttggccacataaatgtcttcttttgagaagtatctgttcatatccttcgaccactttttgatggagtggttttttttttttcttgtaaatttgtttaagttccttgtagattctggatattggatggatagatagcaaaatttttttcccattctgtaggttgcctgttcactctgatgatggtttcttttgcagagcagaagttccttagtttaattagatcccatttgccaattttggcttttgttgcaattgtttctggtgttttagtcgtgaagtctttgcccatgcctgtgtcctgaatgatattgcctaggttttcatctagggtttttatagttttaggttttaggtttgcctttaatccatcttgagttgattttttataaggtgtgaggaagaggtccagtttctgttttctgcatatggctagccagttttcccagcactacatattaaatagggaatcctttccccattgcttgtttttgtcaggtttgtcgaagatcagatggttgtagatgtgtggtgttatttctgaggcctctgttctgttccattggtctatatatctgttttgttaccagtaccttsctgttttggttactctagccttgtagtatagtttgaagtcaggtagcatgatgcctccagctttgttctttttacttaggattgtcttggctatacgggctcttttttggttccatatgaaatttaaagtagttttttctagttttgtgaataaagtcaatggtagcttgatgggaataacattgaatctataaattactttggacagtttggccattttcacgttattatgagcatggaatgtttttccattcgtttgtgttctctcttatttccttgagcagtggtttgtaattctccttgaagagatccttcacgtccctygtaygttgtattcctaggtattttattttctttgtagcagttgtgaatggaagttcactcataatttggctctctgtctattattggtgtataggaatgcttgcaatttttgcacactgattacaaaagataaacaggggaagagctaattacctgatctacacatgaacataactcatttctgaaactaatttgatttgtaataaaaatagagatgtgaattttgtgcataaaagctgtagtacttgggtcactgtgaccttgaataattggatatgatttttaaaaggaagaaagaggaaaggatttgggcggaaaagtttctctgtcaatgaaaatgacatcatacttggaaacattttgatattgtgaaagaagaatcaggaaaatactatcacctagtagcccaggagtgcccagagcagcctaactgcataaacagscttctgcaccgtctagagctgccagcaaaaatgtctctagttttcatgaggaaaacagatgtaaatggggggtggtgatggtggataacctctgcctgtgtggtgagaggtccaaaagagggaagtttctagtcaaaagtaatgtttctaaaatatcttagttatctaggaaacaaattgagataaaaagcagagggtaggaaagtgacaagtttaattccgaaaactaaaagtgctgtcttttatgctctaacattttaaaactagtgatcattttaatattcatatagggattctagtagactgatcaataactcatgaaataaattttacatttttaataagatttctgagatggtggaaataccagtctttatatataatagagattttagacatggccaaatatttgggaaattttttctgtcttttaaaaaaactttttctcaggatattttaaataaaactatgcttttcacccttgcatattctttatctttttaagaaataatgctaaataggggatacatttccacatagatatttttccttcaaaaccatattttgtagaacacaaatgattaatgtttgcctttgtcatttgacaacagtaaaatatttatttctgtttttattatcaagacacattaaaatgaccacattgactcttgaaatgtcgttaatatcatgactacatctttcctgccttgtaatttgtttcctgaattatcctgtagtccagaagaaatgtgaatggcttacttgtccatgtcttctaattttgctgtagagattaaatgtagctatatctataatatctgtacaacacaaagtttttcccattttaaagttcttgtttcagcagtgtttgtttcagtgtttcagtacaataagaatatttgaacaggatcccaaatatttgagaggaatctggcaaaatggtacccaactacttcatgtattccacactttaacatcccctttaggactttaagaagctagaaaactctagttgacactttggtacattttttgatccccatgtttaacatggacttttttcttttgatttcattttacctttccaatgaaaaattattgatcatataatgataatagggattttaggtgcttttaaatagcatgaggcaaaattatagtttgtggaaagaaaatttaaaaagcctattaatatgaatgctcataccactactgggtattaaaattgcagaagatgtagtaatttcacttgctgtttactcagcmggatcttccctaacatgttcaaattctagggatattaaaaattttgtttgagggttcagagcaaatctaagtgtgtctacctctgtcacctatccttcttccttcacaccacccctccccaaaacacacagaagagcacagaattttttttttacagttaaaatgaataccaatagctgtttaagaacagatacytcacaaaggggatactcagagagatctgaaagaaaatgggtagagaaataatattgtactttagcttactgtcactaggatttgtcagatgactgttattagtggttgccctagatctgttttgatctgcaagctctcttttcctgaatcagtacccctgaatcactgcccagaagcttagcttatagtagcatagtttcctggaagagcttagtgtcttttggtgacaaagcttacttagtatttattttgtgtggcgttgtgttagttagaggtcacattactactgccccatttactgtaggtgtctgtgctcagcctttaaacaggtttatcttattactaaattactattcatgtgactcttatttgtatttttcctaataagtctcactakcccatttaaaactctatttcattgtttgctttttcttttttgatcatcctttccggtattatatctaatataatatgaaataaaatgacctttatgatttataagactttttttttgacatttctagacatactttgtcctgctttacaattcatattctggagaagactattcagtgtgcacctacagatgatatattagtagaattactaaaggaatatacctgctgcagaaaacatgcttttaaattagatgattatrgaatgaaaccacaccgatgagaggcctgctttcattaataaccttttccttcatttacaagattctcctgaattattttggaaactatgtacccaattcatggacacaggataatggctgcactctttgtgaattcgatacagtcgacttgtctgcagtagatgtaagtggaattgattatgtgtgaaatgtagtaatagaaagtacattgtcatgaaatactgtgatttataggaaaaaaggcaaattattttatagttttgattttatgatagataatggggatatagtgttaaaacatgatgattcagccatttgctagatttgtgtttcagaactgttttttgacagaaaaaccagctaataattgaacctaatgaaagagtcctgtggttaatatttaatagcttactacgattgrgtgctcttgtgtttattctgttagcttagtcaaagcattgagaaaaaatcattacaaggcttcagcatttttattgactaattttatctgtgctggattttcaaarttgatatgtaaaaattaatactacctgattatataacaaacgactgttttaactactttacatataataactcatttaaacttcacaaaactcctaaaataggtagtacaattgactcagttttacagacgagaaaactgaggtgcmtaaatgtaagtaacgtgtttaagggcacacaattttaagtgttggagttgggatttgaatatagggagtctggctccagactactgtatgttcttgacactgtgcatttttacctgtgtgatgtgtatattctaggcatgttgctacttgtatgtatttcatagatagttatattttatcattcatgttttgagggtgaacaaagagttgaaaatattcattattaatctataaaacatttttatgtatctttgttctaacatcagccagagctgatatcttacaacaacatttttattccaaaaaattgctgacataacatggaagattatatgtatgaagcattgattctagggagttttgtcattaagactgattttttccttcattcactgtaagttcattgagtatctacagcagccagaaacgtagaagcaatataggcaaaaataaagctcttaggaatatagtactactaactcctgaacccatgcaaatgcaaaatacttttactgtaatatgttcaagctcctgaattaaatagtttctattcttatcattgtctgaaaggagtataaagagtaacttgtgtacatgtaggagcttatgaatagagccctattttacttgaaagtaaggtttttggccagtctctcagatagcaaactgtttcctatctgcaaagaatgccagaatatttctgaatgaagctgcatcatgaagatgtttaaaaatttatcctgatmtttttttgccgaaagtagtgttgtcttctggagggcgagttaatrctttttatctgtttcgtttccttttgtataaactttctggtgcaaagatagaaaaatatttatattaacattttttctttttgcatgtaggagtatgtaatttaatacttaagctgttttgtcttacagcttgttaaaatgtgatagaaaggaaaactrttcattccattatgcayaataaaattacgtgctatatacagctgtttttcaatagggatataaaaattaaaattgtgtaggtagttaaatcccaagcctatcataatgttagatgtgggccataggcaagtttctttatatgtaaagtcatagtgattatctcagagtgttggtaggaatgttaaatgaaattttacccacatatatatatgaatatayataacaaatatataaatgatattctatttgtataaatttaatatacatacacaaagtggtcagtattcaataaatgttaactgttataatgttgttgttatataaacatgaacttaggttaataatggtgatgtagtggattgaaacccagcactttaccctcaaatatatgtgttctgggttacttaaatttctctaaatctcattttcctcatgtgcatatttgggaaaataacctctaaggcttttatgtaaattaaatgaaatgcatcatctcatttgataaaggagagttgtgacctacttttaaaattatttttcctattaaattgagaactactggagagtagatattttgtgttctttgtatttgtttattcatttaataataaatatttgggcaagtgaatgaatagatgaagaaatatgatagtgtacaaggtgtacttttatgtgagcatatgttattatacagataatggagtaatgtgtgaggtaccgtgtatgaaaaaatggaagaaggttgctaattcagcacttaatgtataaggtatttaaaaatatttgtaattcttttgttcagactttaagacatggctttagtaagacattataaacaagtcttccatagatttctggtcatgacactgttacatgggtgtttacttatgttcctgtcttccccatctacttgtaagtctttcaagccaggaactttcattccttttgccaaatattgcccatcttgtggattggaatgtataatggctatttcagaattgtttgtgcaattaatgaaggataaactccacaccaaaacatatctaaagagaacttaagaaaatatattaaaatatatacattaagataagatatattaacattaatgaaagaaaatagctctccttatacataatataataatgaaaggaaataaaaggataaagtctcaggtctcccatgattgctttttatgtgctcaaaattaagccctgaactttaagccgaggaaacaaaaagagaaacacaattagtatttggtttcttagacgaaactttcaaaatagctttcagatgtgaagaagtttctgcaagggctattttaaaggaagcactgactagtagtgtaggcagtaccatgaattacattcatgtaataaataggataatttcatctttaaacctaactcataaccaagatgggattcagtaaaatcactttgattgggggggccacaaaaatttgtttcaagtgttagagaactgccatggagcaattcaaatttagcagattatgttgaattgatattctagtattttttatgtcatgctgattaacatttgaataaaatttaaaacaaaaccatactaatgataattttatttttatgtttggtgtaaaacaaaggtccatccaaacgtatcaataggtgtttttattgagcaaccaaccccttttctacctcggtttctggacatattgttgacactggattacccaaaagaagcacttaaactttttattcataacaaagtaagtatttgagaaatgaatattttatgtcaaaactatttttggtcttttttggaactatttgttatttatgtcaaataaaattcattgggttaagttcagtggaggatttttggagtaattacagccctgcctttttaggacctaaggattttagattctagagactagcaccacaatattgatatgagccacatgaaactgccagtttctgtagatcaaaaatggctgaatattagccatcatcatatagcttaaattaatatataatcaaggagattcaaagggccttaaatccctttgcctttgggttagttctggtactttcttctatagaattggtcattaaattgtttgtgatttaagacaataacatataagaacttgaaacagtttccagatagagtactgttttgattaattacacaagggcatgccattccccaaaggattttgatactgtcattttcttcaaaaatattcagagccccctacatacctcctacatattatccaaacttgaaaatatttttcctcagtatttttacagttatttcttgtctactaaaaccactggtatttaacattgtctagaaaaactcaatagctgtgaagtgtgcgattttctctcttctgtcctaatactgtttgtttaccattgttcctttttcctaatgtaaatgtcagctaaccattcacattgtccagagaatattttaactgcagaaaactagcttaaatggatttaaaatggtgaaaaattgagcatttgctttgtaaaatatgttgtaatatatatactttcactaaagtattttgtttttatgtattgtcttttgtttatattttccctgctttcatggggccttaaaatccttgatggcggacgtttttgtcttatctttggttatttagtattaactctatgttgcttttatgtgataagttattttaaaaatctgcaaaaagcaacagcttttcagaaaacttagagacttgacaaataaaaatctctgaaatgctctaatgatggagacagataatcttacctgaattttagcacagtcgaatcacactaaaattggtaacytttatgttgatggttttcccattaatctgtccatagaattktgttaaatttttcctttttttgttaagtaaawtttttttatatatgaccatttattttactctctggtttcaaagggtattttgtaaaatgtgattatttaagtttataactcagattgatggctattatgcttagtagacattttttctagatatttcacaacatatatctaagatttctaggctacaggccgtgtttttcttctccagttggaaacattttatattactaaggatttaagtatttatgcaaacacctattaaagatttaagtatttatacaaagacttgtctagcagtagatattgacagaattttgaagcatcttctctttaagaatattgatatatatgtatttaagattattcatgtgacatttaagtgatatttaaatataccgtgtttaatatggttattattttatatgtaattgaatatctgaattgtagaattcatgaccttgaatgtgaagcactctctaatatgaatacttcagtcatctgattgtcttattctctaatttttgatttttaaaatatgttacaggaagtttatcatgaaaaggacatcaaggtattttttgataaagctaagcatgaaatcaaaactataaaaatagtaggaccagaagaaaatctaagtcaagcggaagccagaaacatgggaatgtatgttttaataaattaaaattaaattaaattattttactaaggaaackttaagaaaaaataaacttttaaattaaaattgttatgccaaatttgggtgtctcaaactatttgtttgcgtatgcagtagccaacttagactgtgtctatgtttgtacrtatttatacataaagggctgtagaagttacttatgtttttcttttaatggctacgagtccacatatttaatcaaatgatgaatcaaggtaagatcaattttttttaaatgcagataaatgaatagtatgactttcatagcagtgacttaaatttaaatgtacactctgaaggttgtgtgtggtaaaagtgtgtttatttagactgtgggggaaacaggtgctcttactctccagttagtcactgagctagataatactgtaatcccaagaaacgggcattgtaggccttttgtttagccctgttaatgcttcattctactaataaaactctagtaatagtaaaaaaaatcgtgtattcaatgaatattaattgaatatgccaggaactgtgttaagagtaggtgataaaaaggtgaagacatgatccattctcatcaggaaataatcttatctactacgaaccctcatgcctgtgctgcagaagctgaggtcccagagggatggattctgactagattaggggtctagggatagacagaaaagaggcctctgaaaaaccaaactgatgttattactaatgattccataatttattcattggagaatcctctgggtccacattcagaacatattttctttaatatttttcatgattgtacctagtgcttctgtctggtattttgtttgatagttgcttcgaacaaatatggtgtggagacacacactgacaacagcaaaaagtgctgactgggaccgacagtgagggaggggagcccagagggaagttgataacccaaatgtcatctggtatctccagttgttcattccttgatattgctgatgataatgttacaaactgtaccagggaaagcaaacatagtcactgcccctggtaagaaggcaggggaataactatcttagaaaatttgatgaaaatcaagtttgtaaaatattaatacctgaaaagtcatatacttacatctccaacattcatttaaaactgagttgtgggatatgtaagttgcatttgtgtgcatgtgtatgtatgtatgtatgtatgcagaaacattttgatttgtggatgttttatgccttaaaatatttactggcttgaaaatatattttaactggcttaaaattttagaggtgagctccctgtgaatatccgtgttaaattgaccattttgaaatttaagacaatatatatatcgtttcagatattgttccactattttgatcagaaaagtatgctagagaaccatattttacatawaagrwtatayatattaacatttttcagtcagcagatatttattttatgtcatgcccatttcattttctttttcactgttagggacttttgccgtcaggatgaaaagtgtgattattactttagtgtggatgcagatgttgttttgacaaatccaaggactttaaaaattttgattgaacaaaacaggtactttctaaaattcgatatcaatttattgttaaaatgattatttttcatattgatgtgaacatactgtagtaattgtgtatttagtaaattgagggaacttagttatgttctacagctaataaactttcaattcaagttaattatttttcatttaaaggagtcatagaaaacaacctgaatacatctggaattatttaatattagttataatcacaaatacagttacttggcccatttttctgtttaaagctaggtgaaattatgatacatctgatactaaaatttagagttgttttattctctatagatatttttaaagtagaatttcacaaaacttctgaccaagatagttattgcatacagagttgtagtccttagtatcagaaggaaatttcagaggtacaaatcatcccacagtcatatgtgtagctttatttactgttgaactagttatcacttcacagtgtctgtttgctcatttaactcaattgaaatgggaaaaagacaccatgtatatcagcttacaatgatactaagtttgtttgtcaatactactgctaatactaataataccatttttactactcctgctaagacctcacctttaacaagtgcttattaagtgccaggtattgttgtaagtacatgtattaacacaattatttctcataataaatagaatgtttagcgggtgaaatgttagaatgattgtttttattttgttaagtaagatacatgggaaatgtagtatgctttattaacccaccctatatataatatctatctatatatatatatcactagaatttgtaaatttgagaatttagttcttacttcaaaaatctaagacctctctgtagcaacctgtatatacagcccaactgtatagctgtgttatagatactcagtatctaagttaactatctatatacatcgtaggtaattttccaaagcatatgaatgaggttttgatcatttggcaaggaaaagcagttgtgacaccctagagatatgaaatagtgtatgatttgtaactcttaaaacctagtttaattcagtactrttttcttgaatttgcattgttttctcttaatttgattgaaatgctatagtgtgtaatgcccatatgctttttaataattagatattttcattttatgactataatttatatatttattaattattctcttagtgaactatttaatgaatttacactatgtatttgacatatatccctcttaatattaaacattttaaatcttctaaaagaaaaaaaattcccggccgggtgtggtggctcacgcctgtaatcccagcactttgggaggccaaggtgggtggatcacgaggtcaggagatcgagatcatcctggctaacacagtgaaacgccatctctactaaaaatacaaaaaattagccgggcgtggtagcgggcacctgtagtcccagctactcgggaagctgaggcaggagaatggtgtgaacccaggaggtggagctggcagtgagccaagattgcgccactgcactctagcctgggcgacacagcgagactccgtctcaaaaaaaaaaaaaaaaaaaaaagaaagaaaaaagacttacctgccatctggggcccttgccccttaaagagtaaaactcaggctgtgtctccrtggaattctgttagttaatcaaaggtttaggtttatgtaatacctatggttcttgcttctgtatctagacatgtggtttctatagtctattgacatatgccaggaatgttgcaagatttagtagattggactgaagngtagagaaagagatttgacacatcttgggcatgtggctttctascttctcatcagctctcttttttcctcttctctccctatctctatttgctcccttgctctaaattttactccttaaattgtataataatatgaatcattcctcagctgccatccttacatttttattcacaaaaacattgaggtatacagcagatgaattttggtttcccaaatttgttggtttaaaccttttcaggaggcagctgggattataaattacaagttctttttaaattaaatgtttgatattcatattgaattatttcccaaattaatgtatgtagattctaattcatgttattatttccagtattgtaggtattcaaaacaaaacaaaacatgtgtttctgattaatagtttagtaggaattcggaagaataaaccaaaatttattattttgcatgatgtgtatttatttttatttatttatttttttgagatggagtcttgctctgtcgcccaggctggagtgcagtggcatgatcttggctcactgcaacctccgcctcccgggttcaagcgattctcctgtgtcagcctcttgattagctgggattataggtgcgtgccaccatgcctggctaactttttttggtattattagtagagatgggatttcaccatgttggtcaggctggtctcaaactcctgaccttgtgatccgcccgcctcggcttcccaaagtgctgggattacaggcatgagccactgcgccgggcccgatgtgtgtttatttatttcacttttgtgcatgtaatagaaagggccyggctggtcttcacaagatagaggtgaaataggttttcttttttcatataaagaatagttgttccataaatttgctttctaaaatagttaaaggaaagttcagtgttgccaggactagcttactgtaatcacaagtcattttttaaagtcatggaaaactggaaacatacttaagtaatttgagacttaattacaggaaagctttgcctgtttacaaacatctcagttcatcttcattcattttttacaaattcaacaaatattcattgaatatcttaaatgcaccaggggctgttgttcacccagtgacaatgaaaatatttggtttcatttaatataggttccgaaatactttagttaaacttaaatataattaaataactaaagtagtttccctctgttggatgtaagcaaggcatttttaaaagtyatttttatgtattcattagcattttcaattactttttccttctttgttactctttttaagaaatatgattgaaaattagcaatatacttacttaagaaaagatgttgggaaagaagatccttattttatttttattaactacaggtttgttgaatgagctttcttgtgttatatgtcatactaagcccaaaatacataattctgtggtaatttaaaaataaataattatataggtttctctctctcacacacactctctctgtctttagaaagatcattgctcctcttgtaactcgtcatggaaagctgtggtccaatttctggggagcattgagtcctgatggatactatgcacgatctgaagattatgtggatattgttcaagggaatagagtgtaagttacttggtttaatattttaatgtgaaataccataatctaaagatgtagtcttgttagtattacttgaaattttttttgcattcatctcttttctttatagttaatgggaatttgagaacccaagaccacttggaatcctgaaatactagtataaaactaatattttaaaaaaatgtttttaaagtcccaaatcttcaaaggaacaagctcattgctgtggggaatactaagagataatatatgtttaccatactcacattatggttgatagaagagtaatactctttatttaaaagcttggaaaggggatttagtttactaactttttaatggttataattaagggttgttttgataggttttaaaatttataattaagccaacagtaacactaacagccagaacattccagtattcctgattgcatgagtttttttgtgtgaaatagctattattctgctttaaatacaagttttttttaccaatattagattttcacttctagagattgaaaagaatatatttgctgaaaagtgtgtgcatgatttatatttatttcagagacaatggttgattactaaaaataatcacaattgaaatagttttgctaaggtaatattggagaagaatgtcattctttttttcatacatatgatggaccagagtgactaagacattacatgctttgccttagttctcaaacatgtcagcctgattaaaaaggggcagtayactctcaggactaaaagkatgtgcccttacatttagaaaaaaaaaggcacacgtttctgttcaaacagttgagtggtaaaaagatgtgttgcttgtggaaatagtaattggtgtggaaagcttcaatctgaatgatgtaaatacaataaaggtttttgttagctgcaattaaaatgcacagtggaggagaaaagactattaagatcgtattctgttgtttctgtgcagttgtattgactctgggtgagttgtatagacaatatacctgattgtatctttgggcacatcacaaatgagggtttgtgaaagtagaatgcaaaatttgtttcaagttgctttaggcattggtgattttctgtccaacctcctgtcattcttgtctaaagtataaggaaaaaaatatggcagaagcttttgatctggaatacacttcatgtccaaaagctacacgaaggagcaactgtgtgtgtgtgtgtrtgtgtgtgtgtataagttgaaacactgaataattccccagagattaatttctgaatttagctgacacgttgtatacagtaattcccctttatctatggttttgctttccatggtttcaagtctactgtggattgaaaatacgaagatatgttgagatagagaaagtgtaaacattcatgtaacttttattacagcatattgttatagttgttctattattgttgttagtcttactgtactttatgtataaattaaactttattataagtatatatgtgtaggaaaaaacgtagtgtatgtgtagcgtttgttactatctgctttcaagcatccactggggtcatggaatgtatcaccctcacataaggcggggactgctgtactccttaaggcatttttctttgaggctagtctagtaagacataatatcatatttccgttaatatctaactgcatttcttggtcaagatcttgccttgatgttctctaaaagaaaggcgcacagtcttaggggcaaaacttgttttgcagtttttatgaaatcagtcatgttcagagtgagaatatagatgtgggaaaggatgcaacgttcatgtgctcccagctgtatttcttcatgttttcctttttctataaaatatttaagatggcttaatgaatggtaagagaatataattttggagaattttaggctatattcagtggtattttggtaaatgtgtaacaactggcttttggaggtggaggattccctgatttaaagtgcttgcccatttgtttggtgtaaatacttctaccatggctgatttcaagtttccaatgtgaaattactgaacatggacttggcagaaaaagttaactttggggagccagtatgagctgggtctagtgcaccactggttgtatgttatgattcatgctatcaaattctttaattttaaatagaaacaccgtctatacaatagattataatagtctaattgtaacaactgattgagatatgatagctataatacaaatgccaaacagataccaacccaaaattkaaatgtatccaaaggggcagtggtttatctcctaaatctcattaaatatagtgtatacaatgtaatcttatatatatatcattgaatatatttgtatgttgattcaataatttatgtatacaaaatctaaacacaaagcatttattttaaaaaggtaaaaatgaaacttaaaattgtttgtatttgtggtatataagaatgtcttctctttactttcagaggagtatggaatgtcccatatatggctaatgtgtacttaattaaaggaaagacactccgatcagagatgaatgaaaggaactattttgttcgtgataaactggatcctgatatggctctttgccgaaatgctagagaaatggtaagatatgcrgtgatggcttgcttgaatgttcttataagatggcttgctttaccagttggtgtgtcactgtgttttgatgccctttgtcttgctaatttgtaagtactagccaatttttttggttctgtgttaaaaaatttgggagtaattttggagataatttaacatttacttatagaaatggtatgaaaaatgttagtttttgtgctcgggctaattcataggcaaccgagttggatttcagtaataaagatgtatttgttacaaatcagctttgctcttttaagaatacatctttaatttgaaattctatagtgaaaacttgacctaattaaaattaattagataagcttcgatgaaacaatatttccagatttaagaatatttttgttctaaaattaatgtccacattttctctaactaggtaaaattttaaaattattattaacttcacattcttagaaagcaggattattaccaccaaactagtagaagtgttgagatacatagtgtatttactctaaataaaatactaatgataccttgctgcactacaaatgtacttttattataaaacttaaaatgactagaaaataatttttcaaaatgcataaacatggcttagaatatattgatatgatttttggttttagaaatgatggggctattttatttccgatttccaaatttatataagcaattgtgatttgatgaaaagtcagaaaagttggcaagtatttttttcttagtttaacaaagcatgtattgtttgaatatgtttgttttctctacaaacctgtgtgcattattattgaatatcctcagtacttgtgatagtattttgtgctcatgtttggctaatttgactcaacagcgcatcatggaatggcctctcttactcattttttccgttgtcttatgtgtctaatgaaagttctgctaaggaatgagcttagacttatgtttgaccccaccacacctcccaaaaagaaaagaaaagaagggctgaaagagctggagatgtttctttgtgtgtgctataagctttgcttgttctgcatgttgtctatgaaggacatttcagaatgttagcttttgatcaacagctgctattatttttatttaccaaagaatacctgagagagcgggtgtacaggtcaacttacccaatgcttctcttcattttagactttacaaagggaaaaagactcccctactccggaaacattccaaatgctcagccccccaaaggtgttatttttacttattttatttatttttgtttatttaatatttgatatagtatattgcctmgtagtaaagtttctttaagggccttayttgcatttagcttggtaaaatgttgattttcatcagtcatctgtgtgtttgcgtgttttgtgtgacttgggcatgggtcttgtgtgatagtcaactcttggttctttgagctgatttatattttatggctgacaggtgasaaagttaaacctaagtccctttcattctttttttaggtttttatttctttttaaagggagagaagagggtagaagtaggtataaaatagaatttgattacagtaaggtttaggtgcaccttattgagttattaatcactaactcttttactattaaaacaggtccaaaaagaaacacattacctagtggtgtttgccacatttgtctggtttggggcaagaatatgagactggttttctttatctgcctttataatgtatgactcatttgcgtgttagyctttaaacattagaaaaagaaaggaatgaaacagactggtgaaatataactggcagtgaattcttgattaaaaatgtgatgctttctttgaaagagaaagaagccaaaagaggtataattcattgcactgtgtctcaaaaatatttctgctttcaaacaggaattttttccccgatgtctacatctaggatcaatgagaaagggacaaaaacagtccattcttctttttttcagttgagtgtcagtgctatctactagttttgtgtggtgtctgaattcataatcaaaatttgagttttttattttaaactatgcacattttatatgaatactaaaaatgcatgttcataaatgaaatagatagaaattaatatcttctatatatttttcctatgattaaatttacttttgtacctacctctaagattaatactgttattttctggcatatagggtgtatttatgtacatttctaatagacatgaatttggaaggctattatccactgctaattacaatacttcccattataacaatgacctctggcagatttttgaaaatcctgtggtatgtatttcatactcaactttattatttttctataactgtaagtggttataaatcagttggttaataatatgaaatgtggttagaggctttttaaaatgacataaggtgaaatgcacatcaaaaccacaatgagatactgtctcacaccagtcagaatggctattattaaaaagtcaaaaacaacagatatgggtgaggctacggagaaaagggaatgcttgtacgttgttggtcggaatgtaaattagtttagcaatttggaaagcagtttgaagatttctcaaagatcttaaaacagagctaccatttgacccagcaattccattactgggtatatagccaaaagaaagtaagtcatttgaccaaaaacacacatgaacctgtatctgttcgttgcagcactattcacagtagcaaagacatggacttaaactaggtgttcattaatggtggattggataaagaaaatgtgttacatacacaccatagaatactatacagccataaaaaagaacaatattatgtcattttcagcaacatggagagaactggaggccattaccctaagtgaattaatggcacagaaaaccaaatactgcatgttctcacttatgagtgggagctaaacattgggtacttgtgaacataaatataggaacagtagaccctggggatcactagaggagtgagggagtagggagggggacaagggttgaaaaaccaactaatgggtactgtgctcactaccttggtgwtgggatcagtcataccctaaaccttagcatcatgcattatacacttgtaacaaacctgcacatatactccctgaatccaaaagctgaaattgtttttaaaaagtaaataaaaagaaaaaaattaaaaygacataattaattgtatttcatgatctatagagtagatctaaacttgaccaataacttgtttttattaagacacttattagctttggggaagggaattatcaatttgttctcttycaatattctattatttttgttttgtgtattcaaaagcaccatccagttttaatcacaattttagaaacatgtttacaaatagttcacatattataatagtttgattttttagaagaaaattcaaaaagttttgtttaggaaaatacattttttaaaattattttttgacarttttgtgaatgtacatcaaagatagccagagagaattgcagagaaagctgattgattcagcatatggagtcttaacttgaagaaacaatttccttttaaaatctgttttcttcttctttttttttttttttttttttttacagatttgagtggtacagtaattagctccttttgtgttttacagggacatctttttgttaggcaagtggcacacttattcaagggaaaatgctgtcttcaacaatcaaacctgtaacactgctgtaatgattttccccttgccaatagtaaaagttttaaattgcagactcaatccacctgatgagaattgtcctttattttgtaggaatagttgagatatggggatastaaatgtagtagtctytgaatattctgaataggaaaatattatcttttgacattttgttattttaaaagtacttttgttccattttaaccacataccttcctctttcacagaaataaagctgaaaagaggtgttttctagtcgtgagggtagaattccatatttcacttcaccattgaatctcttggtgtcttgagggatagaattatttgatttcttgggtgacattaggttcctggtcagatatcctgaattatatcctgaattgtagatatttgtgtaagaattcaagtctttggaaagtaagcaatgaaaatatcagaactgagtaggaacaagttttctttccatggctttctttgttaaagcagcctgattaatatgccttgtgagggataccccatagcaaaatgcttattgattatcccattatcagaatttctaagaaattaataaagtcacagtttgctcaatgatttgaaaggtgatctaaaatgaaatgtgaatactaatgccctaaaataaaatcttaggggattttttttttactttaacttgaagaaaaatcagtattgatgcacaggaaaaatgctataggtaaaagttcttwaatcttatggatgattattcaatttcttgccacattttagaatcagaaagctaattaatattagagggaataatgagataatatagaaatctgatccatatatactatataaacatgaaatttattaaaattttgaagatacctttgtttcctccacataaaaaatgtttgagttacatataaacagatatgcaaaaccagtgacataaattatggtataaatattcagcccctaaaatctagcctcaaaagatgtatttaaggcaaatatcttttaaaacatcttttgattggaattattttgagtctgtgtctcacttcctccctgctggctctctgtatttgyactttgtaaagagaaaattaataatttctagaaatattctaaatttcagaagakatctttttggatatttatattactccatgtattaataatattttagtaaatatccatatttgaataaagaacttgtcccaataaaataattctttagcttttgttgaaaaaagttgagatatctttgtgtgtggattttatgccagagattggtcaaaaagaatcaaattcatggattagaataaagagaaaccattttttaatatagagccctaacccttaattttagtaactgaaagaagtgcaagtgctagtaaactcatgattattccttgataaatattaataactgaagtgaaggcagaaattttaaaaactcatttaaaaaatcaaatttagagtaatttactatagacatataagacagaccctagttaattagttcactaattcatttttacaaatacttgttggtagaattttgctccttgtcttttacctttaagcacacctttatttacctactctgtgtatatattaaaatactgatggtccccaacttacggtggctttacttaggaattttcagctttatgttggatttatcggggtactgtgtgtttttaacctcccacgggtttattgggacataaccccatcgtgagtcaaggagcatctgtaaaatgtgtaaatctattcactgtaagattacttaagttttaaaatcctgaggtacaatatttcataaataaaaattttgtatttcatagaatgacataagcatattcagaaccaggcaaagattargctatatactgtgatttctgaaaattactattttgtccactatacataatcatttataagttraataatttctaaaatgcatatgctttatacttttcagtgaagtatttataaagatatttgttttaatatgtacttctttttataggactggaaggaaaagtatataaaccgtgattattcaaagattttcactgaaaatatagttgaacaggtttgtattaatgattacaaagtatagaaaattttgctgttattttccagaagaaatattattaatactactttcacagaagatgtgaaagtggagaaactaccttttaggtaaaatttatttgattcaattactgattaaatagcattaaggaacatacagttgtaaaatgtagaacatagaaattaacattttaaaagcatgcctttttaaaaagcatgctcctatgtgtcatagctttctgaaaccactaaaaatagaaactgttgamagatctctgatgtagaactcttgcagtgaaagcttatctttggaagaaactgggctgtctttctggaagagtcttttctcagagacatctttgaaacatgaattctcttttagcttagtgttcaaaactattgttaatacctaatttttgagaatgtaagatgtcatcaattctgaggtgcaccattatttatgtaccatgagaaaaaaaatactgtcaataaaccatgacagaaaactatgtttcctagtcatacaggattttttattttacacatattaaawtaactattttagactattaagacacagaagttattatgtcttctaacgatgatgcatattttatagccctgtccagatgtcttttggttccccatattttctgaaaaagcctgtgatgaattggtagaagaaatggaacattacggcaaatggtctgggggaaaacatcatgtaagttgtaatttcacactaagaactaaaatgtatgtgggggttaagtagatactcagagaattcggaggggttatatactttttctcatatgtctctgagttctagacttagataaattggctagccaaggctctgatttcagtctacttctcccaccaaccaatttttttaacacttaagtaatttcattagtttgggcgggtttctcatttatgcatgtaattacactggatgttccctaagggtcgatgtcctcaggccagagtttgttaggtaacacgtctttacagagtgatatcactcttttccaaggccactttttattccttgcgttttcacagtgagctgtggtgaaaattctaaggcaaatgttatctggctctgaaaactgtttttgtgtgtaaagataggaaggagggatctgagtgccttaggtgtaattcagttttgcatttgcattcagtgtcaaagacttggcaggaaatactactgccagtggttagatgtgtttctttycctctgagaacagacatgccattttagcagaatactctggaatattactgcctctgcacggttatgtcccccaggtaatgagctgataagggagagggaagcttaaagtataaggaagaacttaagtyagygggtgatgaaataatgaaaagcaatcattcaaaaacttttgagtgttacaaatagaagtgargaagggcggggaaagcttgtttttrgtgtttggtaatacagacagcagatatgcyaagtgtatgctcatcaagcagctgagactgcctaaagggtcactgtaaaaaaagactcatttttaagaaaggatgtgagggcttaggaagtcaattttatttactttatagctaaacttcacatatacatttaagaagtaggaaaggagtctactgaccttacattactttgtttcgtcattgtatcattgacaaagctgttacctaagttattttgataattttacagttaaagcagatgatataccacattggaacaactgttatttttattgtctattatgatctgtggttgaaaaaaaatactataatataaatgggaattgcacgtggagtacagcttattatgtcattaatgttgtttctaggatagccgtatatctggtggttatgaaaatgtcccaactgatgatatccacatgaagcaagttgatctggagaatgtatggcttsattttatccgggagttcattgcaccagttacactgaaggtctttgcaggctattatacgaaggtagttatcctctcacccctccagcctatttcktacccatttttacacaggtgttctttttaatgtttttattaataagcaaatccactggcttactttgctttttcagggatttgcactactgaattttgtagtaaaatactcccctgaacgacagcgttctcttcgtcctcatcatgatgcttctacatttaccataaacattgcacttaataacgtgggagaagactttcaggtaattatgactcttgtgtttttagrtttttcaaaagaaatatatcattatgaaaaggactttgccttaggccttagtttcttttttaaattttgctcaaatgacataatttgaattttgccactggttaaatataatctgatgtatttcttcattttaacttttttagggaggtggttgcaaatttctaaggtacaattgctctattgagtcaccacgaaaaggctggagcttcatgcatcctgggagactcacacatttgcatgaaggacttcctgttaaaaatggaacaagatacattgcagtgtcatttatagatccctaagttatttacttttcattgaattgaaatttattttggrtgaatgactggcatgaacacgtctttgaagttgtggctgagaagatgagaggaatatttaaataacatcaacagaacaacttcactttgggccaaacatttgaaaaactttttataaaaaattgtttgatattkcttaatgtctgctctgagccttaaaacacagattgaagaagaaaagaaagaaaaaacttaaatatttatttctatgctttgttgcctctgagaataatgacaatttatgaatttgtgtttcaaattgataaaatatttaggtacaaataacaagactaataatattttcttatttaaaaaaagcatgggaagatttttatttatcaaaatatagaggaaatgtagacaaaatggatataaatgaaaattaccatgttgtaaaaccttgaaaatcagattctaactggatttgtatgcaactaagtatttttctgaacacctatgcaggtcttatttacagtagttactaagggaacacacaaagaattacacaacgttttcctcaagaaaatggtacaaaacacaaccgaggagcgtatacagttgaaaacatttttgttttgattggaaggcagattattttatattagtattaaaaatcaaaccctatgtttctttcagatgaatcttccaaagtggattatattaagcaggtattagatttaggaaaacctttccatttcttaaagtattatcaagtgtcaagatcagcaagtgtccttaagtcaaacaggttttttttgttgttgtttttgctttgtttccttttttagaaagttctagaaaataggaaaacgaaaaatttcattgagatgagtagtgcatttaattattttttaaaaaactttttaagtacttgaattttatatcaggaaaacaaagttgttgagccttgcttcttccgttttgccctttgtctcgctccttattctttttttggggggagggttatttgcttttttatcttcctggcataatttccattttattcttctgagtgtctatgttaacttccctctatcccgcttataaaaaaattctccaacaaaaatacttgttgacttgatgttttatcacttctctaagtaaggttgaaatatccttattgtagctactgtttttaatgtaaaggttaaacttgaaaagaaattyttaatcmcggkgccaaaattcattttctaacaccatgtgttagaaaattataaaaaataaaataattttagaaagttttgttgttctattattggtgtttatcttccaaagtgaatacatgatggaattgtctgaaagaatgaagcctttgatttttcattttgcttagtagatttaatgatatacgaaactattgaattataaatgaaattataaaatcttcaattttaggatgactagggatttgatctaactcgttttccaagtgagaaaatagaagccaaatgttattcaatataggtttatttgtttattaatattttctgggtctctattatgggtcaggcactgttccaggcaccaaggatatgttgatgaagaagacattatagtcactgtgagatggacttaaaaagataaggaagttggttctactcctgttctcttctttggcgacacttaatacccaaagaaaatttctactatccatcaactaggataaggagacattttagtaatgatttgtgaattatgttactgtacatcaggaatggttttcaaaatatgtaacacctggtatgatgtagatgccaactcatcggaacagactctggttataaaagcagatcggttcgttcctaccagtgcaagccagcttaatatctcttgtggtacagttcaaagacatctcccaggtactagttattttccattttggtatccatgggtggttacttagcataactatttcagtctcatgccatgttttcagaaatgggatccaggtagtctattgagcacagtttttttgtctttcctcttatcctacattccatgaaataatataaaatgtagctttaaaaagatgattcataattactgagagaaaattagaaaaattcccataagtagattaaaaaatttgaaaaacggaaaacgagtagaattggaaggatggagaaaaatacagcttgaaacacacagagcagaagatacagaaagtacatctattgtttgattcattcattttatgcaatataataaaggctttttaaaaaaaatacacacacacacccatatatataaacaattatcccctgaataatatgggcgttagaggcactgatccccatgcagtcgaaaatccacatgtaccttttgactccctcaacacttatcaactaataacctactgttgactggaagcctcactgataacataaacagctgatgaacatttattttatatgttatatgcattatacactgtattgttacaataagctagagaaaacgttatttaaaaaattataaagaaagataaaatatatttactattcattaagtggaagtggatcatcataaaggttttcatccttgttgtcttcgcgctgagtaggctgagaaggaaggggaagaggaagggtgtctcaggggtggcagagacagaaaaaaccggcatacacatgagcccgcgtagtttaagcacatgtagtccaagggcttattgtgtatctgcaacaatcagatatctctgacagatgaacctgataaagtcacactatttagagtatgataccatttatgttaaaaacaaaatactatatatgtgtgcataaacctacagaaaatttcctagagaggaacaactctggagagtggtatgagatcacggaggagtaaataggatttatgccttttaccttttacacttgtgtttttgaaatattatagaaatatatttgtatattgattgtttaaagaaaaaaagactagaaggaaaaggagacattcacgtaactaatttgaataaatggaagcatatggatgtcaatagtaaccgtgtgtgtgtgcgcatgtgtgtgcacaagtgtgcatgtgtgtgtatgtgtatacatacattaccaaggtgctttaaatgctcaccgtggtagaattttttctaattcttaatgcgcataggaatcaatatgaatattttccttaatatagatacttcagtagtcatccagtgcattaatcttcattctgcttcatctttgaaaacactagtaatttatctgtattggtaacttaactaagaggtcaaatatccttctatggaatagaaatgtggaaaacaatgaacatatgagttgagtggtccatcctcgtcacagaatctctttatgtactcacttctgttttcctgtctgacatacgtatgtcttgatttatttgctttttatgccctaaagcccattttacatgacatgctggtaacttgtcattcatttggaatttggaatggttattcaacagatgtcttaaagtttcagaagagcccagtagaatttttagtcataattgagtctgtgtaaataactccctctgactagactagaggttaactgttgcggaatattgaagtcttcaagacttcatgaaagcagtgtatcaaacagaactgtttgttttgtggtcttttagaatagcaagccacagcattatttaagaataattattaacaaaaagccattgggaagaaaaatagggaaatgtataaaactttttaatgcaatgagttttggattaaaatagaagtacactaagaaataatgagaagagaaaattgtacatgtagaaatgctttaaaaatgtgaagtattgcataattacattattttgataaaataaattagactgggaaggtaagtaaacaggctagggatttgtgaactttataagtcttaaatctttctaatagcatttaaaaatgtacgcaacatcactgttcatcagagaaatgccaatcaaaactacagtgagatattatctcaccctaattagaatgtcttatattcaaaagacaggcaataacaaatgcttgagaggatgtggagaaaagggacccctccacattgggaccactgctgttgagaatgtaattaattacaaccactatggagtacagtttggaggttcctcaaaaaaactaaaaatggagctgccatatgatacagcaattccagtgcttgatatatacccagaagaaaaagaaatcagtgtaccgaagcaatatctgcactcctgtgtttgttgcagcactgttcacaataggtaagatttggagacagcctaaatgtccatccacagatgtatggatatatttttgttttattcttaatatattaaaatagatcaggaaacattcatttggaaaagtggtttcattcctgacagatattattgaagtggtggtaatgtttgtttatttaataattcaagagacgatgagtttagcatgctagtctatcttcactgaaatttggttgactcaaaatctgaatactctcttttgaaaattagaagtttctgcctgtttaacaatacaaaacacaaataatcaactgaaagaattattttagaagatataatggatgatcctctagtcaatattggataacaaaataaggatgtaatgtaaccattacattttgtaatggttaatgaattattctgtgattaattacaaaataattttgaaagacattttaacactggtttaaagtcactaaatctgggatcgtgatgtgaaatgacagaataattctgcatctactgaagacaatttatatatgataaagctcaataactgctaagtgagaactggacaaattaaatgatagttttcttctgataattaatgtttggagaattgattaattttaaatagtgcatatttgcaagatgagattatcctattttattaaattattttcgtctgtatttacatagtttttgtatcttacaaatcttgccaaattgtgacatcacagctccaccttgtggtcaaaatagttagctaaatttaaagcaaatgcaagagctttataaaatcatgctatcaaattttttcccaaaggctaatactaataaaatgataaatattggatgcttttattcaggaattatttatatatttttaagtatgatacaatacaacattttaaaaggaagaattgtgacaccttattctgaaataaggagtagctagcatatttctagttaatactgttgaagtgatttgttttctgtttttatctaatttgtaaactgctaatctatgttcaatagagaatatttacttggattaataataaaataagcataagagtagtcagattcgactacaactgataaagcaatttgtttagagtagataaaattacttaatttacataatattaaaacaacagctccatagggtcctattgtaaaaacaaaattttaaaaattgttctttgttaggaaaaggtcaatagtaatttttctttattatcagtacggaactggtaagtgcaacaatgaggacaagagtcttgtagtaaaatttgggtgattcagatactgtgaaagttacaatccttgttttgactttttgaagattaacaaaatttattcctgctgaagttatgcactaaattagttctaatttactccagctgttgcacatttacttactgaccgcacagccacgctgatcacccttttcttcctttgggtcacttagtgtcttggctgctggatgaaatcaaggggatcttcagctaatgctagagtggcatcattgattttcatattgtctcagacagctttcccattgacctatgagccaagaggagagggaattttaaaaatatgtgtttttgaaacgattttgtgcctgtgatagcaagtcgacaaagatggtcctcaatgaaccatgcctcccagtactcataccattgtgaacccaggtgggtcctttgtaaccaatagaatgcagtagaagtgactgcctaatttccacattgagttatgagaagctttgtggttttgagctcttggaacatttactgttagggcattctctgtagaatccaggtaccatgctgtgcccatgccacatggcaaggccatgtgcaagcactgtggccaacagctgaaaccaagctcctgcatcaacttctaccacatgagtgaattatttggacatcagtcccagacaaatcccagttcagatgaatatagctcctgtcaacatctgcctgcaaccacatgtgagacccctcagccaagaaacacccagctgagctaagcaaacccatacagaactataaaagatgataatttattgagtcactaagtttccacatggtttgttacacagaaatggataactgaaacaggattaattgcctataatgtatctctaataggctttccttctcagagcactttgcatactggattgttacttacctttcattctcctcaataaggccgtgggctccttgagggcaaggactgggtcttattccaccttttcagttttagcatatagtctggcatatagtaggtatttgtgtgttaactggaagttggttttatatctgaaattttattgtatttgaatcaaaatgatccctgagggggaataggtgttttgaatttaagaggtagccaaaaaataaacctatgtgtactgtagttgtgtgaagtaaagatgtgtgaaatattgtacagtttgtccctgaataaaggaatatgtaggtggcctcaagttggatacagtgatgcactaagacagtataaaaggaaactgctatcactgttatcctcagcattctgggccaaaggactgagagagggagggttcagtttatgagtaatttgcttagtgtatgcttactgtgtgtatttgtattaaacattcaataagtgtttcaaattgaatttacttttatacatcttaaagcagttttctaaaaggtgctttaaaaagtgttattttatatagtgactacaaattctatatcttatcctctaagtttaaactagaaaatagttctaaaatagaaatatgtgaagacagtggattttcaaatgccaaggaaagtgtagctttgatatgtactgactctggaactagtgttgttaccccagttacagattcgattgcccattgggtgtggcctttcttggttttgaccaaatgtcattttaacatctattcagtctggtcttaaaaatgtgataaataatggaatgaaaactttataatttcagaattatggacctgtaggactctgttcaaa

SEQ ID NO: 93286 - DNA, 27504 bp, Homo sapiens
attttattacttttgacagagtatatacccatgaaaccatcaccacaatcaagataatgaacatatccatcatgctcaaaagtttctgtgttcccttttgagtatattttccaaattgtaactacaaagaggaaaagactagttctggattaaatagtcttatatttaactagcccataactaaacagagttttcactgtcatttagattcaaatgataatactactaaagtttaagaaagagattctgaaacatgatttgtacagttcctcctgccttcgtattataatgaagaattgagtgttttctcagagatacagagtgctgcctgtgacttcttttttctctctycatttctttgctcaggggtcacagttattgataaaccattatgagcctgaaggacattttcagcatatttatacatgagaaacagccttcaacaagtatttgtgaagtgactgagaatctagcacttctccacttgtagctgcactttaagtctcagcagaagatacgatcgtctgcctttataggcctcagatactgaagattatttttggtagaagcaccgtgtaggctttttctgcaatgagcagcagctgactgaattttcataagaaacttggactgcaggacttaatctgtagtctttagacaacagttgctttcataaagactagttcttatcaaccttgaatgactacagattattttgtgaaggaggatgaagtaatgtgtgttcttgtaaaattaaattttatctttatttcttctaaaaatctgtataccaggaactgaaaatctttgaacagatattaaaatctacgtaagtatacaaactagttgagggatacactgtttgcttttataaaataactttgattacatgaatataataaattatgtgcatataaatgtgtgtctatatgctttcctttaaatatgtttgaaaagatgtttgaaacttgattatactatttataattggcacagtactttgaattatgccagtactacattgtaaaacagagttgtattttttgatatttaacaatgcttaacactttaaatgccacttctgaggaatggacctggtgtaacacacttgaatatgtgtgatgccaaactttttaaaatacaatataaattatgcttatttattattttctttagtttaatcttggtcatgttttggtgtgtatttttaatttttttcttaaattaacactttggcatgaacattactgcaggtttttgatgaatataatgaatgtatggaattcaattgaatttgcatggtcttcggaattttttctgtgtgtataaatttagctgctattaacagaagagagaactttctgtgagtagccatgtgtgttgatcagatacagtttttctgagatcttcaattaatctcactttaaaaatgaccaaaacatgtctttcttgaattaactttgaataaaagtttgtatattatttgtttcacagtgttcttgatttttatctatttagttttgtgttaaagtttcctgttagtttttttgctcttttatagtttgcattttgtcacttcacaaatctgcatttttaatttattgccaaagtgacctcacctacaagacaaaactattaaatgaataaccgaagtcaataaaaatggttctgtttccaaggaaaagtaacttcaactatcaaggagaggtctgtcaaggattggtaaaatttaaaccttttatatttttgtgtccctgatatgggtagggcatgagataaggataaaacaagtagtattagaccaaaaggaaagtcaaagaaaaaaaatacctactccaaagtaactgagaaataaactgtggttttgataccaaataaaaggaattgaggaaataggaatagtggagtcaggtaggcagctgaggtgctggacacagcagaggaagggaagagggggaaggaggaggtgatgggatattgtgaccattcctcaggaattaaaaaagttggcatgagctgttgctagaccagttgataatcaagaggaaagattgctatgataacatttcgattcaaatttaaacatggaaccacatttaatacttagttgaactttccattataaatgaatttaatcagaaaaagcctatgctcagttgatgaaaacatgaatttctgccttacagcacatcattgtcaacaaacatattgaaggtctaatgaacttggagtagtcagctgtttctgacagaggcaccaagaaaaatgtatgaggtctctgtctgtcctgatcacttccaaacactaatgttctatatgaatctatcaattaaagatttatctgaaaaatcttaaagcttttcttaaaatataatctcagcctattaaagtaacaaagacttaactacatagcatgtcaaatacctctatctttactttcttaatctttgaagctttaatagctatactataattgccaaggtttgtcagtagctggattcatagctatgatttcagagactttagacatacctccttcccccatgccaacctttgtctttccagtttgaaatttttttaaaggcatatggaagtgttctcagcctgttccattgttgtatgaaaaataagaaggcagagaggtgtcttagaaatcctgccaaggaagcagccccacgtttgagcagagttcaaggctggatccacatacctgcgttgtgaagcaactcgtctgcctgctttgttgggatctatgcctccttggctgaaagcagtgatgactgtggttaaggcggaaggtgtatttactgtcagaagactatcagttctttccctgtttcttatggagtctggtgtatgattcctggtatttattatctctttatcgttccttacagcataagaacccaggtatttgtaatcctaactgctgttgcgttatgagacttaactttatgaggtgtaaaagggtcacatgaaattacatagcagtgtgctgacaccatcttggtttagttttgtcttaagcacactgcctcctactgacttccatggctgccagtgtctcattttggagaggaggctacgctggagaatggaactatattttgagtcaagattctggggttctaatcctggctttaaggaaaaaagccatgtggtatattggaaagcccatgggcatagaaacaaaagggttctgggtttgcagctccctctatcaattgctagctgtgactttcaacacattacttaacctctaatccttattttgtttttaaaatggcaataggagtgtctgtgtcacaaggttgttgcgtttgaaagaaatgatgcatgttaatatgcttgaaatccagcgggccctcaataaattacagctattgttccctgagccccctgttaatcttcattgtagggaaataagtgagttgagctgctgcatcagcatttttttccagctctaagcctttaaggtttaaaataatctgacccctccatacacctacacctgctctgatttagaaaatgtaatactgtggtagaattccaaatcagaaataattgctgacatttactgatcatatcttgtatgccagagactgtgcaaagggctttacatacgttatctcatgtaatcatcataaataactcttcgaggtgtaggtattattatttcacagaagtaccagataagacagagaagtaacttatccactgctaataaaatgccaagcctagtaagtgtggcccgatagtgtgtgctattgatgctcacctgatagaggatggcaggtttgggcagagagaaaagttgggtggcagtgcagtcatcacacaaccaataggatggggagctctggagctgggatggccaagcaaagtagccctacattggtttaggggattttatacccgtttcaaccagttacttgactagctgttgcctaraaagggggtatacccgtggggagaggtgcttctctttggcagtactcagcagctggaggaatgcctgcttaggtcttgaagagggggatctgggtggtgtgccacagcatccactacaggaccaacagattcatatgcccactgcacagtatacactgagacagcagggtttgcagaagagaaagagtttagtgatggcagggtgccgagaggagatgggaggaaaccctcaaattcatctctctgaggagttctgtgctggggcttttaaggggatcctggagggcaatgggctggaaaattagggtcctcgattggctggggtaaggaggaatgaaaccatcaggatgtgggaactgcattctttggtgagtcagctccttgtcagaccagctgagtcagtagtttcatcagtacgaaggacctgaaaggttatctcaaagcacaaacttaacgtttcataatgttcaagttgttgtctatagagcagttaggggaaactataaccttgtaacagagtctacatgattctgaagcaataggcaaacaattatgaggaaggggtcagacagcaagctgacctaattattaatcctcagtgtgctgcaagcttggtttaatttcgttccccccacccctttttcccagattaacttcataaagtatataggcatggtttcagacaccactgtaaaggcatcctaaagacagggctgactctgacaaccaagggacagatcccatttcttttcatttgacgtgaccgctgtcatgatactttacaaagaatgtgtgtgccaaacatgagggatagacgaataagtacaggtcacactgaatctaaaaaagacacttttcaagagggaacttcctcaaggagatagtacctgaattgatggggcggcatggagatggctgattattccaggcagaagggccagtttgagcaaaagcatggaggaatgaaacaatagtattctgttttcagaagctgtatatatttgacacaatatacacataatcaaaacatgtgtacgccgtaaacacaatttttgtcaattataccttaataaagaaggaggaaaaagggccttcactagcccaaatgatgcccctgtgcggttttttctttaaaggcacctcttccgttaagtgaaagttttagtatattatcacatctgtacagttttattattaaaccccagtacacaatattttaatgttgagagatggtgtaaactgagctttagagctgcaaagacctgcgtcaagcccccgcccccgcccccgcccccgggcactcatcgtccagcacaacaattgcaacaacacctgggcgttctctgcccatgtagcgaggtcaaggtcctgggagccgaactctcccttgatgttcaatctttttaaatctttcccagcctttatttctcatctgcaaaatgacgataatcgcatttgaaattctccgttttcaaaatgcaggaatttattaaaggatacgtaggctggggaaacaagggagacgaaagatctaaatctaaatggtagaccagaaaaaggaaggcaagggtgtctggaaacacaaaacagtcaacatagattttaagactcatctatactctcttcttcccgggtttgggaactgcggttgctacacaggtcacatttgaaataaaagtcctgggacggcggccggcgcgacactctcccccgcacagcgcaggctctcactgggaatctgccgggaccgcagttgccaaggcgactccgcgctgcagggcgaggcggccatccgtctgtgcccgccccctcacgccgtggcgcgctctcacgcttccccgcctccgggcgctccgcggtgccgaccattggctggctctgcaggtctcactatcctcactccatccgcggagccaatggctgggaccgccaggagctcgttcgcgcgagtcacacgatgtcggcaactgcacagaccaatcaccgcgccgagaaggcggggcgggagctctcgcaggccaataacgacaggacgggccgcctggcccacccggctccacccccaagccaggcgaggcaggttccgaggttggaacacctggcgagtcctcggtgtcggtggccggcagtcatctcgcggccgttcaggtgagggggttggaggagtggctcatgagcgaggaagggggagcaggcgggctcccacccggtgctccgtgagatcgaggggagcgggttctgggtgcggatgcacgcgctgggcgggacgctggcagtggtacccgagacggggcggaaggagactggagtgaaggtgggcctaggctaaggtacgtgctagaaaggatgaaaacggagtgaaattcttaagtgatggamctaggctagggcatgtttcttgccctttaaaatgtgttgtcttcgggagacaggacgtagaagatagttgcagcacagggtgataggctggcgaaagttatacaaaagcaggaaccactagaaggaggtaagatgtagtgtgctttgggagtagtggggttgggaagggcgtccgagaggaggttactgaaggatgactaggagttgaatgggaggacatcacctgtaagggaacgatatttccgtgggcagagaggaatgaagcagtagcaaccatgagtgatcagatactgcaaaaatgtgaagtgtaggatggcgagaatgtaagaaatgaagagtgaagaagtctggaagggcctcgtgtgcatcaatcacagcggggcttgatctttatgcttagggcaagcactcccttgaactttgagtgttttaaggaggttatctctgatgtttaaatttatatagatcgtggcattgcatcttagaaataaggtttaggaagggcaagcttggaggcagggcaagtccagaaaatgaaggagctggtgaaatccgtgttaaagtgccaaaggacagagactggctgacagctaaacttcaaggtttctgagaatccacaaataactaaatttatctagtcaacctgttccagaacaggcttccagtcatttaggttgcccaagaatgagtaaaggaaaaggaaattcaattttccaagaccttgtttcccctctcctctttaattccttgttcggttagcaacagtatatccattccctcgctcctttgtgaaaagtaaattcctgaatgttaactaaaccaagtgtttctaaattgggtaagagtttgaagacttaaggcagcagaatgggagagacttaaaacgttatgtctgagaattaggcattaaaggaggcctagtatttgggcgggggttgtgaggagcacatactgaacctttggacctgttgagtgagttcatgtgcctctgaactctctgactggatatgaccagtaaacttggataattagatcctggagtttaggggagagggctagagatagagatgatggatgtcagcatatttttaaaacagaaaatagttaagatcacccaagacaatctggaatcgttagaagggagtaaggaaggcattattgggaaactttccagcttcaattctcatattttttctaatctcctggttgagtctttggagttgctgttctctctatgcaaaacccctcccttgaccctctctccctcactctattttttaatttgtcacctccttctcctgttctaggtctcagtttagatagcacctttctctagaagttcatagcactgtgtattcccccctttattgttcttatcacataatttttgatggtttggacactagttgttattcctcactaaattttatgttttatgaactcaggggtaagggcaccagctagcacaatgaatgcacaatacttgtcagagtgaatgcatttaagttccaagaaccaaggaaaggcggtatttcaagaagagaagtatcaaatcttccagattagtcaaataaactccaaaaaaaaaaaaaaaggtttattggatttggcagctggagatccatagcgatttttttttttttttttttttttttttgagacggagtctcactctgtcgcccaggctggaatgcagtgtcgtgatctctgctcgctgcaacctcagcctcccgggttcaagcaattctcctgcctcagcctccccagtaggtggaattacagrcatacgccaccacacccggctaatttttttgtatttttttggtggagatgtttcaccatattggccagactggtctggaactcctgaccttgtgatccgcccacctcagcctcccaaagtgctgggattaccagcgtaagccaccacacccagcctccttagtgattttagtaagagtaagttcagtgcagtgatgacaatagaatgcagattgcagttgctagaatataaacaggaaataagaagataaagacaactcgtggaataccttttcatagagcttaggtaaactgtaggaattattctccttgtactctaatacttattatgggttttatttataattatagtgtaatataatggatgagtgcatgggcttccccacttagcatttgttaagcattaacttaacattaagcattagactttgggcaagttgcttaatctttctaaacctcagttattttatctataaaatggtgataaaataatacctacctcacgaaggtgtggtaaggattaaagtgaaaatgtagagagcaggtagcatgctttgaacacagttcttggcacagaaagtgcccaataattgttagtttcttgtagctattacatgccaggtcctgtgctaactaagcgctttatatgcattgtctcttggactcattggaagacctactgttttaatttttgctgctgataaaactgcatcacagagaggttacctaatttgcccaaggtcacaggacaggactagtaagtggtcttggttcattattgtcaaatttactaatcaccttgagaaaaattaagattggatggttgccttattttacaacttagaagatgattgaagacattttggtgcaggtggggagccagattgcaagtagctcagtgagttgtgtgggtgagttaagcaaccttttttattctttttttttgagacsgagttttgctgttggtgcccaggctagagtgcagtcacagcttactgaaacctccacctcctcatttcaagcgattcacctgaactcctgaccttaggtgatctgcccgcatcagcctccccaaggtgctgggattacaggcgtgagccaccatgcccagctgagttaagcaatctttatgtagagctctcctttgagaaagaagttggttggttcaaagaaagataaatgggacagtggcttggaagaggtaatggaggctaggaaggtgtttatcaacaaaggaagatgtaggctgggcgcagtggctcacacctataatccccacactttgggaggctgagatgggaggattacttgagcctaggagtttaagaccagtctgggcaacatagggtgacccctgtctccacaaaaaattaaaaaaattagccaggcgtggtggcatgtgcctgtggtcccagctacgaggggctgaggtgggaggattgcttgagcctgggaggtcgaggctgcaatgagccataattgtgccactgcactccagcttgggtgacagagtgagaccctgtctcaaaaaaaaagaaaaaaaaaaagaaaagacgtgaatgtgtttttagacctgaaggaatggattccatgaagggagaaggatgaaagatgggaaaggataagtgatggacaagttcttgaggtaagataagaacacaggaagactagtcagtcttagaggaaagaatgaatgagcaaagaaattttaaggcctgtaatgacacaggatggaacactatagtcactgtggtgtaagtcatttgagatgagtaggacagaaggaggacggcctgaagtgaattcagatgcctggaggagttggctaggttctcaatattccttctgtagaatgggataaaaggtcagtttgagaagtgttggggaaggggacttttaaagcactatttagaatgcttctgaggctttaaaatactcatttttaaaatggtccaaaaaattcataaattagaagcagcagtggtgaacatttttaggaaagtgacccttgagaagtttaytttttggttagtgacctattgagcttatttattaggtaagtagaacatgctcatttaaaaagtttaaattgtgcaaaagacatatgtcagatttttttttctgtcttccataacrctatttcctaccccgccgcgctctgtcttccgtaacactctcccctaccccgtcgccactctgtcttccataacactgtcccctactccaccacactgtctcctaccccgccgagctgtcttccataacactctcccctaccccgccacgctgtcttcattaacactatctcctgccctgccacacaactctgttttcctagaagtcaccagtgtgaatttttccctttgtatccatatgtacattttttgtttctgtgtgtctgtgtatatacatatgcataaaagtgcatagataaaatacatatccttttcaaaaaatcttaagtggggctcttgctatgcatactgttctgtaacttgttacttggattaacactgtatcttasacatctttctatgtagagcgtatagatcttccctgttcttttaaatggctgtataattgtctrtggaaggacttaatttatttaacccataccttgttgatgrcttatttgtgttttgcttttattttttcctctttgtttttgctgctacaagcaatgcttccttccatcttagcggatctgtctttgtacccttgaatgagaaagttgctggatcaaaggatgtattcattttgaattaggtgttgctaatttttcctccaatgatacactgatgtatcccccctgcycacagtgtgtggtcatgcctgttytctcaccctcttaccagtactggacattaataagcttttaaagatttgctactcaggctaaaagtgtctctttgttttagggtgcatttcctcatttaatgaagtgaagattcttccttgtttagtgaccatttgcctttatttttctgtgaactgcttstgaatggcatttgtcgttcttctgttgtctttttagtcttttttctaaagcacactttgtagccctttgttgtaaaatgttggaaatatttttcccagttkgtcatttaatctttgactttgtctttctattccccagtaggaggtacttaatttttatatactcatatttggcaggctttttctttataggttcttttggctttaagtgatacttttaaacccagctattgctcatttaaattagaascttttccatgagaaccacactgacgatttctttaaatatagcttgaaaaaatttttcccctattgttcttttagctattgttcttgaaaataatgtgttttttaaaggaatatctacaaatagaaatggtgatgatatccagcaaatgttttaaaatggtgtaaaaccatttgtactcstttagtaattttttggtaaaaaatttatactcctttagtaattatcatttttaaaatgatcagaggatgcattttttaactgttttattttttgaaagctcattgtttaacttattatatatgtattcatttctacagaattataaggctgtctgcagagatttgaaaaatggcaacaaatgaaagtgtcagcatctttagttcagcatccttggctgtggaatatgtagattcacttttacctgagaatcctctgcaagaaccatttaaaaatgcttggaactatatgttgaataattatacaaagttccagattgcaacatggggatcccttatagttcatgaagccctttatttcttattctgtttacctggatttttatttcaatttataccttatatgaaaaaatacaaaattcaaaaggtgagtataagggactagaaatagaatattatcattaatgttgctgaatattttaaaagtacatagggctttgttttgtgaggctaaagcagtgatatccaatagaaatatgaagccacgtatgtaattttaaattttctagtagaatacatagaaaaggtaaaaagaaataaggmaattaatttcataatgtgtrtcatttagctcaataaatgtaaactatcgctgggtgcagggtccatgcctgtaattccagcactttgggaggccaaggcaggaggattgcttgaggccaggagttcaagaccatcctgggaaacatagcaagaccctgtctctacaaaaaagatacaaaaatacccaggcatggtgatgtaagtcctagctacttatgaggctgaagcagaaagattgcagcactatactstagcataggcgacagagtgagaccttgtctcaaaaaaaataagaaataaatgtaaattattatttcaatcagtaatcaaattctaaaaaatacttaatgagatatttaataagtctttgcaattccrtgtgyattttacattaattttagtctatctcaatttagactagccatgtttaaagtgtttggaagccacatgttactagttgctcctgaattgagcaacacagtcctaggtcattattgataacatttcaagaatactttgttaaattgggctttaagtagatgtgatggttatctaacttaagtttatgaattttaatgtttaagctagctggaaaggaaaggtrtggtgatttgcgcatattttgcagttcaccccaactctatgttccagtaaatctaagggactgttaatacactacgaccttgatcagggctattcaagttttttttccctaaatatatggtaggtagttctgcagcattcgtatcatcccaaataaggaggtgatgctcctcgtttctggatatttgcttcattgcactaaatgttgagaggtcgctatgtacatgacaaggtgaaatctcatatgtagcctgtgagcttgacgtgagaatttggagtagcttattagaaagatgaattatttgttagaatttgtaagctgatgatagtttctagtgtttgctgtttacttttcataaaaagtcattccaaactaaaactcaggggcacacagtcttggtagaaagtagaccattgagagtattcatctatggaaagtaatttacattcacttagtacaattggccctccatatccatgggttgttgtatccatggatccaaccaactgcagatcagaaatattcaggggaaaaaaattgtgtctacactgaacatgtacagtcttttttttccttgtcattattcaaaatgacaactatttatagagcatttgcattttattaagtattataagtgctgtagagatgatttaaagtatacgagaggattcgtgtaggttatgtcaaatactatgtcattttatatcaggcacttgagcatcttcagatcttggtatttgcagaaagtcccagaaccaatcctcaaaagataccaaaggacaactgtatatattttggatggcagtctgtacacattctctgttatcattctgttagtttcacagcctctcccagagtctcactttaagcaggtattaatattagtcctctctggggataatgcaggggtcagatgactgtggactccaggccaaaggagaaaagagcaaagggtaaaggcgaaggaaataaaaaataggagggccaaaggagagtactctgtgaccctcaattaaggtcacagaagctccaaagtgctttttaggaaagcagctgctttgaaaggcagaattaagtttggacgtctaagttctaatgcacctttagggtgattgtggctgccgtgtttcacccagtgatttatttatagggcttattcattgtaattcattgtatggctggccaggcaaaagcatcctttttctccttcactgcagtttgtaactgactcactggttagaagtagtaacctttscagagagacaaaggactttctcaggcaagggtatatgagcagctttaaaatataatgtggcaaaggaaagaataagctgtagtctagttggtcagagctagttgtttatgaacagattgtaaggctggataatttgacttcaagtctgtactcagcaagtctttatgtttcataaccattaaagtccatgctttgagcatttttgataaaaaatgtgattttaaaccaggactagttttcacaagttaaaggagttttaaaagaaaccaaaatattggtacaaattaattacaggtttatgcatttygaaggcagataccctgattaacattgagggtatcaattgtttragataaaatatttgagaattatatttaacatatgcaataaatgtttttattcttaaaattgtcgaaaagaatagaagaagttggtggtggtgatgaaatagtactaaagactttctgctttcaaacagaacagacaactggagagctaatgcacatccttgctagttaggcgaaaatttcacaggaatgaaaaagtaaagcagactttgcaggatctatttctttaaaaaaaaaaaaaacatacatcttagtaattctccaaaaattttcctcaaagataaatgtactaaaaatattatttctgaagtttgtggcccttgtaaaggtattcctttatattaagtacagttatgcataaagaaagtaaaatatggtaaactttcatattgcactaggtatgaatttgtattgctaactgtctttgtaactaatttatgtatactstaaatggtatagcatgtgattttattatagttgattaactttgtaatttctgtaactgcatcgatatcccagtctacctggaaaattaagtctattaaccatagttgctgtrggagacagtactattgccaactgaagcctgaatccttcatttattttgtccccaattacagagtggaggtttagaggagtggggttagataatgctcagattagaaatacaaaggcagctgtcagatcctcccattttattgttgaagaaactgagttgtaaacatcacaagagctagttaactggtgagtagcagccctggtattagagcacaagtctctggattgattcttagttcagtgcttttcctatttttgtcaggaagataacccttaaagaatttcaagaacagagctggatctggagacctagattttagttagtccaacttctgctaataactgcgtgtgtgaccctgcccaagctggttgacctctttgggcttctgctgatgcgcagtagttcccgtactttggatatcgtggttcaattaaaagagttttgttggcggatacctgaatttttcagcagtgacatttaaaacaaagcaataactgatayttattgtcaccatcgttttgtwaagcccaaagcacttttttaagtgcagtcctataaattgaatacatttagttagtgtttgttttgttttgctttgttttttataatgacttgctaagcaaatgggtatcctgatgaggtcttaacgaacatcccatgttgatctaacttttctcattttgacttgaatctgtgaactccataatcaggacayatctgtgtacttctcaactcagagagtttataattctgtcattggatttgaacaaaagtgcatttatttgttggaatgaataccactgagtgcctggaagcatcgacttactgtgtaaaaggcttccaatgcttcgtatacaacttcttcaattgtggacacccaacagtaatcttagcatattatatttcttcttctctgaaacttctggtaaaagaagtgaagtgaatgatctgtggcagcaaagactggagaattattcattccatagtgtttcttagtttgtttgagatcatcatggctaggcgcatctgttaacagtttcttcacctgaagtagtgatagtagttgtcaagaatttagaaggcaaagattcctgagtcttagttatataaagttaacataactgacgtagaattaaggtccaacataaacagagaacaaattaggtcaagttaaactctgatagcaragactaatattagatattgtgatttttcttcgtaggataagccagagacatgggaaaaccaatggaagtgtttcaaagttcttctctttaatcacttctgtatccagctgcctttgatttgtggaacctattattttacagagtatttcartattccttatgattgggaaagaatgccaagatggtacgtagataaaaatttggcttttacacccaattgtggcttattcagttaagttatacttaatgtttaccygttttcttaattttagttaatgtttgttctaaactttggaagtaaataaatagtagaaaagtaaaccacagtaaaatcttaaaatgtttccatttttacatcttttaaatattttattggaaggtgagcttctagtatcagaagtttccataacgtcttttgtatgtttatatacatgtataagtgcttatgttgacaaaaatatattacattttaattttaaaatgaatgaaatatatgagaatcatttatgaggtttatagaaattgtgtttacatgaacaaaaatatgtatgtatatatatatatatatayacacacatatatatatacacacacayatatatactcatgcgtcacttaacggatatctcttgagaaaagtgtcatgaggcaagttgtgtgaacattgtaatgaaatgaaattggtctaatgggcagtctctttaaccttatatcaagttatgtagctgtatctggtggttttgagaatttatttatgaatatatccaattaggtcaacctggtaagtgggtgggtggttttatgtaatgtctcaagcagtgatcccaactaaaagtctggatagtttaagtaaaaattatttcttacacattacaacatttttatcttaaaggtattttcttttggcaagatgctttggttgtgcagtcattgaagatacttggcactattttctgcatagactcttacaccacaaaagaatatacaagtatattcataaagttcatcatgagtttcaggtatgtgagagttatatttaattctttctgttagaggcaaaatgtctattttaattgcctgagcatttttctaaaattgttggtgacgtttttattttcttttcctttggcatgattattaagaacaatacacacacatacaaacaagccatttctacacattgttttcattatttaaatttcatggtaaattgagatctgaaagaaaaatattatatgaaagttcggacttccatccttgtggacagtgctacactggcacagctagatcctcacattgctaactcccacaaaaacagtaacttctatgagcactgctttttttttttttttttttttttttttttgagatagagttttgctcttgttgcccaggctggactgcaatggcatgatctcagctcactgcaaccttcacctcctgggttcaagcaattctcctgcctcagcctttcaggtagctgggattacaggcatgcgtcaccacgcgtggctaattttgtatttttagtagagacaggatttcactatgttggtcaggctggtctcgaactcctgacctcaggtgatccacccgccttggactcgcaaagtgctgggattacaggcgtgagccaccatgcccggccaattagaattgctttgatgtagctttgtcaactggttatgtgagtrtgttttgcattgaccgtgattacatggtgtgccaaatcaagcctctctttattagragaacaaatataaatacttaagtcaaaattagagttcaagtcaattatttaatgcctttatcttaaaccatyaaagacagcaagattttatatccctagacttttgatgtggagtaaggtatttttattgagaattgctagtattatttataagtgtatgactagataaatcatcactacatatagaatcaatataactttgtaaaactttatgcataaataggatatatatattagtgaagtctccagtgaagcagaatcattggggtatatatatgcagagagagatttattttaaggaatcagctcatgcaagtgtgcggctgtcaagtctgaaatctgtaaagcaggctacagactagaaatccaggtaagaattgttgcagccttgggtccaaattccatggagcagcaagttggaaactcaggcagggtttcagtgttgcagtctcgagaatccttcttcaggaaacctcagccttttatcctgaaggccttcaaatgattggatgaagcccaccctcattatgaagggtaatcacctttactcagtctactgatttaaatgttaacaacatctaaaaaataccttcacaacaacatctagactggtatttaatcaaacagttggatatcatagcctagccaagttgacacataaaattgaccatcacaatagctaagaaattaagaatttcttatctgtttgtcttaggctccatttggaatggaagctgaatatgcacatcctttggagactctaattcttggaactggatttttcattggaatcgtgcttttgtgtgatcatgtaattcttctttgggcatgggtgaccattcgtttattagaaactattgatgtccataggtgagtattaatttctgttcaggtataaagcataatgaaatatatttattttcatggccatragattatcatatttctaagkasactaataggagaagttaatcttcttaatgttatattaagaaaacataactgttggataaaagtttaaataatagatgtttttacattctagcctatgctgttataatttttatagtgataatgtgttattagggcaagtatatattcaggaccagcaatttccttatccttctgtaataaacctaaacytaactcatatttgaaaaaaatatcaaagcattcagccttccttgaataagactttctaatctctactgttcagcactgataaaggcacttgcaagatgaaactactacttgtaacacatacatatttcaaatgcatcctttctgttgattggaagacattttgtggtaaattatttatattgaatgccttcttaaatgcttatcctaattgttcattattttttaattatatgttcattgcattttgacttgggacatacttctgtactcatgaatgcagaatatcaaattctaagaattatttttaaagtgctaaagtagcaaaattaatgcttctagtcctaggcagagaatattcttctgtagaaaaattgtaattgacatttctttctyttttttttctatccattgtttctttctgccttccttcctctaagctcctcaaaggaagagagggttagagtgattcaaataagtataactggatgtctgattgtagatatgtagttggaaataaaggagcatactttaaatgggactcttttttgaagccatttgtcttctgccaactatagaaaagtacactggtattttgattaattgtggtacatttgattccaacttgtcattgcctaaaaaagtaaatgaagttgctatacagggattcatgggcctgccctttttaatacttgatactaattttatgtgacttttcctaaaaaacatatttagtattttgggctttatttacaactgttatacatgatggtgagaaagcttcctctaaaacataaaagaaaattaattcttaaaaatctgtgtctaaagattcattactataatccgtctcttccatcattcatatattttatcataaaataaatgattttcttagtttttttaaggattttttttcttagagtggtttctagaatatacaccattttctgtgtttgctgtttgtgaacacttagaaataaagtggtctaggcaaagtggcatgttatctaaattggttaatgtgaacacatgattattaataaaaacaacaatcatttgagatrtatttattccttaataatctttatcatttttgtttcagtggttatgatattcctctcaaccctttaaatctgatccctttctatgctggttctcggcatcatgatttccaccacatgaacttcattggaaactatgcttcaacatttacatggtgggatcgaatttttggaacagactctcartataatgcctataatgaaaagaggaagaagtttgagaaaaagactgaataaatatctcacgtaaaccttcctgaaagataaacgttttcctgaattcagaaactagtagctaacattgcttctggagagcagaaataagcatgtcttctggctactaagtgataaraagaacattaacaacctttaattaccttcctagtgggaactttttctactttacctacaagttctatatatgtagaaatgaataaatatatatttaagtacagttttcatgaggaagttttaaaagrccatgttcctaagcttccaagaaggttttggatactagaagtattaatctatggcttttctcccagtaaaaccataggcctgaagttsacattgggtctttaaatcttttagatatatastggtcatttcagaaaattcttcatagtggtattggccttatatttaactttttttttattttttttttgagacraagccacactctgtctccttgkctggagtgtggtggcacagtctcagctcactgcaacctctgcctcccagttcaagcaattcttctgcctcagcctcccaagtagctgggattacaggcacccgccaccacgcccagctaatttttgtatttttgtagagatggggtttcacgatgttggccaggctggtctcaaacttctgacctcaagtgatctgcccaccttggcctcccaaagtgctgggattacaggtgtaagccactgcgcccggcctttttaactttaaacatgttttagaattcacctaaagatcaaaatatcatggattgaacctcatcaattgatagcagtgagtgactgaagcttccaaatcaagaaaagccrgcaccaagaacttccattctaatctagagctgaccagtttgagctgattctctctttgaagagtccttcttgattgcagtgcagtactggcatttctgaatggatgtaagtggagtattttagtctaaaggcttttcaaattacttgaatttttttaaaaattgaggagctttatttctatttacccttccatttttgtrtatcaaatttccattgtcattaaaaactgtatcttgaaactttgtgaactgacttgctgtatttgcactttgagctcttgaaataaatgtgatttttgtgtgattatctggtttccagttttaaacattaactgtcaccttttattcttaaacttgaaagtacagaaatcattaaattattaagttgtacaataaaaggattggtttcttttttttttttttttttttaagtgcttcctttgccgaaatgtttcctggctgtttgaacatgaatttttcaggtttaagtattgtgggaaatcatcttgacctaataaagcaatacatactgaagcagttctttgccctgcttagataatgtatgttttctgtacagttgaagaatagagctaaacttttcagggctgataaaatctcaactatctagtttgtaactcatcaagggttgggaattcttagtatgtggtgttaattatttttatttttttaagctgcggagtcattatctggtaacttccttttttttctttttctttttttgaaaccttacacggtaaagatgtccaggtgtaagggattcagatacttaaaactgagaatgttttgtttgtaggtcatgctttataccttgtatgtggttcatatgcccacgtgtgtgtgtgtgtgtgtaaatttgttgtaatcctcaagcaacaaatttggggctggctgcaattaaaattgtgctatgtgctacaaatagagctaccataagatccagaaatcccactaccgggcatttatccaaaggagatgaaatcggtatatggacgagacatctgcaccctcaagtttattgtagcacttcacaatagccaagataccgaatcaacgtaccttttactccctaatcaaggaatgcccagcatctgaattagcaataaaaggtgactccctgtcagcacttagggagagagtgacacctgctgctggaagcgctgcgaaacgttttaaaacaacttggtaaattccaactcatgcttcatactacacatttattgagcactttgtgtcctgaattgtgctatgtttagtgtgctgtgattttaatgcacgttctcatttgatttctgagatagatgctattgtccctatttgatagatgagataattgagaggttcaggtcacaggcttggtctttttgactttcgaagctgtgcttgtggctactatgttcactatgctggagagttgcatcttctataaaactcgtagggaatacttttaaaagtgatatttgaagagaaataaggttctaaactagtagtcatccaggaagtggtaagacacatacaagtatgttggtatggagtagactttaagctaacttaccagccaaacctttctttttaaaattacttaaattaagcttttaactatactggcatttgataattagacaaaaataaatatgaagactagaatacaaaacggggtacataactgactctagcaaataattgacaagattattttttatttatttattttttaagacagagtcttgctctgtctcccactggagtgcaatggtgccatcttggctcactgcagcctccacctcctgggttcaagcaatcctcccatctcagtctcctgagtagctaggaccacaggcgtgtgcagctacatgcagctagtttattttttgtagagacagggccacactatgttgcctaggctgatcttgaactggctcaagcgatcctctcacttcagcctcccaatagtgctaggattataggcgtgagccaccgtgcccagctgacaagagataccctttgtttcttggattatctatttggatttttactaattgtttaaaagtttagttaatattataatttaaaaattagtagtagagtatgcttagaattataattaactagtattttactctttgctacatatttggctaacgacatgtaaacctttggacaagattggttctgtggagactcttaccccaacttctaattctcatgctcttacataaaacctagtaggtttttttgttttgttttgttttagatagagtcttgctctgtcgcccaggctggagtgcagtggcacaatctcggcttactgcaacctcgcaacctccacctcccgggttcaagcgattctcctgcctcagcctcctgagtacctgggattacaggtgcccgccaccacgcccagctaattttttgtattttttagtaaagacggggcttcaccatgttggccaggctggtcttgaactcctgacctcgtggtccgcccgcctcagcctcccaaagtgctgggattacaggcgtgagccaccgtgcttggcctagtagggctttttaattccacatttaagttctgtatttccatagagagagatagtatctaagctcttcctgaagagtgagcaccttgtttctgaaggtttagctcctaatccattcttgcaaaagaatagaatttttcagccaatgttagaaagagtagcatgctattagtctaatgaatgctgtctctgcaagtgactgccaaatgttgacattcttacatgaaatcatcagagggccatggtaaaatgtctttagtacatatgcttagaggtctgttgcattctaaaagtctaaagaaaaaggacatgaatggctagaatctaagataggaaatgttactttcaaactattaggaagataagtaattcaactcagggacacaggctgcttattgtgcactcacaaaaggaaagggaccatgacggaatgagaacatgggataactaacctgcaagctgcgtataggatgctgaaaccagcactgctgggatagtaacaggagagattgccatgtatgccctgccagccggtcttgctcccttgcattatgaagctccttggctcctggtgattggctcactccctggaaagcctttccccctcctctctctggagagctatttcctcatctatgaaatgaggataataatacttcatgggcggtttgtgaggattcagtaagatgcaccatgtgaagtatgcgatgcgtgtaatgaatgttagctattttttttaaattccctccctttatttaaagatccggttcaagactcaccgcaccactccatcagccccactcttctttctgaggtcttatttctgcttcagattagagaaatctctcccactctccctcactcagagttctgtaacactcatctctaccacctctcagcatacgccaccttgtgttttctgcttcagacagagattggaagatatttttgaagaaactgaacccaacccacagaaaaatacatccaaagtttgaaaagattgacttgctgcctgattatttaaaatggttttacaatcacatttgcaaattgtattgctacctcttttttagccaaagatctctcttttgcaccgtgtgctttcgttcttctgcacatttgctcatgcctaaccttcagccagtgaatgttattaacatggtcaaaggcacgcgggtagttcatggcaaagctgactgcagagctgagatcttcccactgtgtgtattttctcccttggtatgtatacctggcaccttgccttgaacatggtaggagttcaataaatatctgtcaattaaaacgaagagaggacattgtaataacatcataatataggagtgacaattaagctgccattttagtaatcagttcagaaggtttttagtaattaacagcaaatgatggggaaggagaagacaaggaaagaagagggttcttgaaatacaagccagagccagaaccaggtgcaggggctgccgggttcagttgaagtctggctacattctaatgctttggcatcttaaagtttgatttcactggtcatgttcttgtgggatatgcagcttgatatgctctttgaaggaacaaattatgtatcagagcacgttcatgtccgtttgagttcgtgtccagctaataaagaaaatttagaactatttagtctgttggcagatttcaatcagacctcttgtattccatgaaggttctctgagattttttttgctataaaataattcatctgataataataaaatatcatgatggtatagaggtagaagaataaggaattggtcactgcccaggagtaggtaatataccattaacatattagaatgggaggctgagctacctaatttttgcatttctatgtcacaggaaaatgatcttcaagttggaaaaggaaacaaactagccccgttcaaagggaagcaaatcccaaagaggaggaaatttttagcaaagtgtttcatacattttaataaacttttttttttttttcgagatggagtctcgctctgtcacccaggctggagtgcagtggcgctatctcggctcactgcaacctccgcctcctgggcttaagcaattcttctgcctcagcttcccgagtagctgggactacaggtgtgtgccaccatgcctggctaattttttgtatttttagtggagatagggtttcatcgtgttagctaggatggtcttgatctcctgacctcgtgatccacccacctcggcctcccaaagtcctgggattacaggtgtgagccaccgcgcctgtccttaaataaacttttaagtctccaaagtcagataacttgcattccaggtgacagaaagaatttgtaaatgtgattgtaaagccatagatgatcaggcagccagtcaatcttttccaactttgttaagtatttttctgtgggtttggttcagtttcttcaaaaaaatcttctaatcactgtctggggcagaaactgctcatatgtcttcatgctgggaatcacatatgtgggaggagacaggatctgacagttgagtgggttccctttcacagaatccctcttctgccacctgcctagctcacccaaggcctcctcagcatcaggagagtcttgagcctcttctgttccatttctccaaagaataaatctgccccttgggaagtgtggctctacagagttggaaaagggacctgtggcctaaaggctttgtaatagagttttgaagtgaaattgaaatgctggcttttagtattacacaataccagggtatttaatttttaatggaaccacaccatacaaacacaccagaaaagcacacagcttgatgaatggttacatccatttgatcactacacaatcaagagcgtgactacttcctttgtcaattgtccactttggaccagaaatgtagttagagtcttacctggttcagcaagtgaatccaaattctcttgaccaaggagagtttctagtgttgtgacttgaggctttgcctgtagccttgtcctgttaaacatgtttatcattgacctagataaggccactgctgccaagcttatcaaatttaatactgaggcagaagaaaaacagcaactgacactttgttctacaggacagaatcaagatcctgcaaaatgtttgccttgatttaaaagttcagctgcacaaatggaggagaggaaacataaccaggattaacagcgatacatacccaagagccgtaaggattttagtggactacaagtgctcacttccccacaacttaagacaaccgtacgctaaattattaaaggtaagcctaaattacagagaagacagtgatctccttttattctgctttggttggttacgggtggaaaagcatattatgcttagtgcatcatatatgactaacatccacaggagacaagagagtaatcaggatttttgttgttattttgtgtttgtttttgtttctgagacagagtctcactgtattgctcaggctggagtgcagcggtgttatctcagctcactgcaacctccacctcctgggttccagtgattttcatatctcagtcccccaagtagctgggactacaggcacacaccctcacactcagctaatttttgtatttttagtagagacagggttttgccatgttgtccagacaagtcttgaactcctggcctcaagtgatccacccactttagccttccaatgtgctgggattacagtcatgagccactgtgtccagcaaggaattgcttaaggtctagcagtaattacacaagataatttaaggaaacagagggatagtctagagcagctctgtccagtacagtagtcatgagctgatgtgg

SEQ ID NO: 93287 - DNA, 23208 bp, Homo sapiens
  misc_feature (1)...(23208): n = A,T,C or G
ccagctgatttttgtattttttagtagagaggggggtttcaccatgttggccaggctggtcttgaactcctgacctcaagtgatccgcccgcctcggcctcccaaagtgctgagattacaggcgtgagccaccgtgaccggcccctttgactttgaaggcagagtagggtatctgatcaggaccgcaaatatggtgctgctttttatagtggggccagtgtgtggggtgatatggtgggaggagctgcaggaagacagcggattgagatctggactcaagcagtcctgtggggaagccaggtttctctactgactcttgtgtagaggagaagactaggcgtggtggctcatgcctgtaatcccagcactttgggaggccgaggtgggaggatcacttgagcccaggagtttaagacaagcctgggcaacatagcaagaccctgtttctacaaaaaaacaaaaaaattaaaaaattggttgggtgtggtggctaagtctgtaatcgcagtacttcaggaggccaaggcaggaggagtgcttgagcataggaggccaagtctgcagtgagccgtgaccttgccagtgcattcagtctgggcaacagagtgagaccctgtctcaaaacaaacaaatgaaaaataaaaagtaagtatctaacgcaggaataggaaatcaaatactgcatcttctcacttataagtgggagctaaatgataagaatttatgaacacaaggaaataacagacacgggggtccacttgaggggggagggcaggaggagggagaggagcagaaaagatggggggagggcaggaggagggagaggagcagaaaagatggggggagggcaggaggagggagaggagcagaaaagatggggggagggcaggaggagggagaggagcagaaaagatggggggagggcaggaggagggagaggagcataaaagataactattgggtactgggcttagtacctgagtgatgaaataatctttacaacaaactcccgtgacatgtgtttatttatgtaacaaaccttcacatgtacccccaaacctaaaataaaagttaaaaaaaagtatcaaattgttaactcctctggaataaacatttccttgtctttttttaatttaaattattatttttaaaatgcccatattccctgagtcctcgcttctttttacctctccaatcgcctggcttcatggtgtttcacatttgctgactgcttccagaaaaacattcccactgaaggcctcccaacgcaaggcagatatagagcaagctagacacatgccttcctttccagttgctttctgactttttaaagtcccagatgcctgggcttggggaaaggacaggaagcgccaggacgcaggaagccccggggatcagcagtaggatgctgtgcaggctgtgctcggggcccctctgctggcctgtccaggccaaacccccagggctgcaggcctggaaccaggcaggacatgctcagccctggctgggcttcccctccttgccccaacaccagtcagggcccacccacgggctccagctgtctggcttcccattcatctcccagaccctctcccctcatgaatcagtgccacacacagcctacccataccatactcagcaaagcacccatgcctgtggctcaggtgcggtggtgtgatcagagctcactgaagctttgaactcctgggctcaagcgatcatcctgctttagcctctctagtagctgggagtacaggtgtgcaccactacggccagctaattttgaaaaaatttttttgtaggctggatgcggtggctcatgtctgtaatcccagcactttgggaggcctaggcgggtggatcacgaggtcaggagatcgagaccatgaccatcctggctaacatggtgaaaccccgtctctactaaaaatacaaaaaaattagctgggtgtggtggtacacacctggagtcccaactacttgggaggctgaggcaggagaatcacttgagcctgggaggcggaggttgcagtgagcctgggaggcggacgttgcagtgagcctgggaggcggaggttgcagtgagccgagattgcaccactgcactccagcctgggcaatggaacaagactgtgtcttaaaaaaaaaaaaaaaaaaattttttttttgtggatatggtggagtctcgctatgttgcccagactggtcttgaactccaggcctcaagcagtcctcccaaatcccaaagtgctgctgggcttacaggcatggaccaccatgcttggcctattttcgacacacatacaggctgaggttcaggagagctgggctacaggcgtcagggtggggatcgatgtgtgacatctttcagggaggtagtttatcctagttctccactcaataagggagtctgcccacaagcacactgtcggcacccattgctacatggctcaactgtgagtataacttagataattgtaataatgaaaataaggaatgctgatggagggataggataagaaggtatgtgactgggagatggaagagaattccttatttctattgagtcataatcaatagaggttatctaaaacttaaaaaaatagggccaggcacagtggctcacgcctgcaatcgcagcactttgggaggctgaggcgggcggatcacaaggtcaggagatcgagaccatcctggctaacacagtgaaaccccgtctctactaaaaataacaaaaaaaagtagccggtcgtggtggtgggcgcctgtagtcccagctacttgggaggctgaggcaggagaatggcgtgaacgtgggaggcggaggttgcagtgagccgagatcacgccactgcactccagcctgggtgacagaccgagactctgtctcaaaaaaaaaaaaataataataataataaaaacgccaggcatggtggctcacgcctgtaatcccagtgctttgggaggccgaggcaggcgtatcacttgaggcaaggagtctgagaccagcctggccaaacatggcgaaaccccgtctctactaaaaatacaaaaatttgccgggcctgctggtgcacgcttgtaatcccagctacttgggaggctgaggcatgagaatcacttgaaaccaggaggcagaagttgcagtgagctatgattgcccccctgcactccagcctgggtgacacagcgagactctgtctaaaaaaaaaaaaaagagcagcctgggcaacacagtaagacctccatctctacaaaataaaaaataaaaattagtcaggagtggtggcacttatcacagctacttgggaggctgaagtgggaggatcacctgagcccaggaggttgaggctgctgtgagctgatggtgccatcgcactccagcctggacaacagagtgagaccctgtctctaaacaaaaataaattgtttttttttctactggacttaaacaatctgccctccttggcctcccaaagcaccaagcctgtgtcttctttttcatcacagccgtggcagaaggaaggaggtgactggaagccccactctctctgagtagctgagggaatacaccctgactataggccgagacagtccacatcagctcttcaataggatttagtggctttgcataaaatggaaaagcagctgtgattgcaagagaaattaaaaataaccaccatctgaaatgcaaattgaaaacagtgagacaacacatgtcactctggcaggtgacccactgtgctggtgaaggcatgcaggcactctcagacttccgcagagagacctgagtaatcaattgacttccacaaagggcgacttgccaacagctatcaaaagtactcaggcacatcccacttggcccagcaattccacttccaggaatttctcctgcagaaatacatgtgcacaaacaacgtaggaaagcactgtttatagtaacaacccaactaggacagaccaggtatatttagacaacaaacaaggaagctttttactaaattgggatgatctctaagaagaaggtacgtagaaaaagcaaggtgggagaacacgctatgtgcttgtactatgcacgtcaatgaaaaaatacacaaagaattgacaggccaggtggagtggctcacacctaatcccagtactttggaagactgagatgggagggttccctgaggccaggacttcaaatcagcctgggcaacatagcaagacccccccacatctctacaaaaaaattaagaaaaaaattagccgggcatggtggtgtgtacctgtagtcccaactactgaggaaactgaggtgggaagatcccttgagccaggaggtcgaggctgcatggagctttgatcgtaccactgccctccagcctgagcaacagagtgagaaaaaaaacagactttttttctatttctggaaaaaaataaagaatttataagtatgatggttctggtaatagaagtaggtggctaggcagagtggacacttcacactgcatactcccatattttccgaaatctgagctttttttttttttttttttttttttttttttttgagatggagtcttgctctgtcaccctggctggagtacagcagcaccatctcggctcactgcaacttccgcctcctgagttcaagcaattgtcctgcctcagcctccccagtagctgggattacasgcgtgcaccacacgcccacctaattattgtatttttagtagagacagggtttcaccatgttggccaggctggtctcaaactcctgacctcgtgatccgcccacctcggcctcccaaagtgctgggattacaggtgtgagccaccatgcccagccaatctgagctatttaaaaactaaaggtaaaattttaaaaggggaaggggaaaatgggaagtcattgttttaaggggacagagtttctgtttggggtgagaaaactctagaaatagtgggggcgtggcacatgattggaatgaatggcagggaacggcacgcttaaatgttcctgtacgtttcacaggagaagtcaatgcacacacaagcgccgcaacccagtccaaggctttgctcctacagggccttacagggggtatttgagacgcccaccttaatgcaggttggacccagctccgggctgccgggcttccccgccccggggtctttcgtgtgagccccgtggcgggggaccctggcccaggacatggcgcggagaaggctgtgggcggcgggacagggtgccttcggctgccgggttaagagtggatcccgggatacatcctccagcgcctgccctcgggcctgtgtgcacccccatacccagcggggccgtccaagagcttcaaggagggcacagcgcgacccgccctcccctcagccccgcacaccgtcccacggccccgcacagcctccctcccacacagcgccccacggcacccgcacagcgccccacggcacccgcacagcgccccacggccccttcatggtccccgcacagcgcctcacaacccgcacacagcgcctcacggaccctttacggcccccgcagagtctcccacacggcgccccacacagagcctcacggaccccgcacagcgcctcaaggtctccgcacagcccccagcacagcgcctcacacagcccttcgcacagccccccgcacagctcctcacgggccccacacagctgycgcacagcsccgcacaagcccgcacagcaccagcagacaggtagcccccacaggcaacagcgcccacctcgccgcgcccagaccccggatcgccgacgcggacgccaggcgcctgggcacacggcgcctgcgcagacaacaccacgccccaggcctggcgagcgcaycctgcgggtggggcggacctacgtcagcaacccatcgtccgatcccgtccattggctgrgaggtaatgcgtgcgcccgactcgccgctgattggtcggcgcgcgagcagccgggctcgcacgggccaatcctgtgrtagcgcgtgaggaggcagaggcctctggggtgggatcgcgggccgtaagtggctgtggagctggggtcactgcgcggtgggaccatggcctcggagaagccgctggcggcagtcacttgtacagcgccggtcaacatcgcggtcatcaagtactgtgagtgccgcgggccggcctgggacggggatggccgggagcgaggccgggtacgcgggggtcgcgcgctgattcggcggcgcgctccgtcctgccctcccagggcctcgacagacggggaaactgaggctcagggaggggcgcggcggtggtcgggcggggccgcgcgctccttcgcgtgacaagctcggcgccacccgttcccccgcgacggctgccgcccctgcagggtcgcccggcgcctgcccattagcgattaccgaactatcgaaatcatcaatcatcgattcccatgaatcgtaagaatccgccgtggtggtgcgcgtttgtggctccagctactcgggaggctgaggcgggaggatggccagagcccgggaggtcgaggctgcagtgagcggaaatcgcgccactgctcccccagcccgagaccctgtgtccctccctcgccccgtttctcccagcggtaacctccaaggagcggtaatggggggcccgcaggcccacatccgtgcsggggaggccggtccgcacctgtgcgttcacagccccgcccctcccctcgcgccggggttacctggccgccactgaccactcatttctgtaacgtcatttcaaaatgttctgaaactggaatcgcagttatgtggcccacccagtatcttttgagtttggcttatttcattcagcatagaatgtggacgtgccccgggattgtatcagtgctttgcccctctgttgctgagccagtccgtggaatccatggaccaccctctctctagccaaggcctcaccccgcaaagagcatctaacgttttctttctttctttcttttctttccagaagccgccaccacgactggctaatttttttgtgtttcccttaccaataaagctgccataaaaygttgtatacaggtttttgtgtgaacatacatttccattcttctgggataaatgcccaggagtgcggttgctgggtcagatggtagatatatatatatgcctctctgtctctctctctctttctatgtatatatgtatgtttgtgtgtgtgtatatatatatatacacctatatagatatatgtgtgtgtatatgtatacacctatatagatgtatgtgtgtgtatatatacatatatatattatatatatactttttttttttttaaagaaactgtctaattgtttttcagagtggctgggccattttgcatccctacggtgatgcagattttccgcatcctcaccagcatttggtggagttgctgtttttcattttagccgcgtcctggtagggatgtgctggcagggtgctgtggtcctcattcgcgtttccctgttggccagtgacgtggagcatctttctttgtgcttatttgccatctgtgggttttcttggtgaaatctctcttcatattctgtgtccacgctcgaactggatggtttgcttttttactataagtttggagagttcattacacattctaggctgggcacgctggctcaagcctgtaatcccagcacttggggaggctgaggtgggcggatcacctgaggtcaggagtttgagaccagcttggccaacatggtgaaacccccgtctctactgaaaaaaaataaaatatgtattctagatattagtctcctgttggacatgtggtttgcaggtattgtctcccaaactarctaatctttttgtcctcttaacaaagagccagtttttcattttaaagaagttcagtgtatcaatgttgatgtcaagtctaagacctctttgcttagccctatgtcctgaagattgtctgctttcctccaagttgtacaggattgccttttatatttaagtctgtgatccaaggttgtccagttagcccagaaaggctatccttcctctattgarttgcttttgcacttttgtaaaaaaaaaaatcagctgggcatgtttgtgtgggtctatttctggattttctcttctgctatttttttttttttttttttttttttttgagacagagtcttgctctgtcacccaggctggagtgcagtggcacaatcttggctcactgtaacctccgcctcctgggttcaagcaattctcctgccttagtcttccgagtatttgggactacatgcacgtgccaccacacttggctaatttttgtatttttagtagagatggggtttcaccgtgttagccaggctggtctgaagctcctgacctcgtgatctgcccacctcagcctcccaaagtgctgggattacaggtgtgagccaccgcgtctggccttttatttttattttttatatttatttattttatatttatatttttatatttatttgtattacttttatatttatttttttgagacagactgtcactgcgacacccaggctggagtgcaatggcgtgatctcggctcactgcaacctccgcttcccgggttcaaccgattctcctgcctcagcctctcgagtagctgggactacaggtgtgcgccaccacacctggctaatttttgtacttttagtggagacggggttttgccatattggccaggctggtcttaaactcctgacctcaagtgatctgcctgcttcggcctcccaaagtgctgggatcgtaggtgtgagccactgaggctcaccaacagtgatatttatggaaacgtgtccattttcttgtaacgttcmaagactctggtcttctttaaaccttacgtttgagctggtttttgatagcgcgctggtggaggagggggtgctggctcaagataaggaggcagaagtccaggttcccctccccaccaacgctgtcccatccccaccaggccctcaggaattcctgagtgtctgcttggcctctgacaagagccggcaggtcaggggagtccagtctcccgtgtgctctccaatgactcctggggaggtgaaagtccccactccttcagggagggaaagggggcggggcactgttccagcctggagtgtgggagggatctgtttctttttttcttttctttttttttttttttgagaaagggtctccctctgttgccaggctggagtaaggctggagtgcagtggtgccatctcggctcagtgcaacctccgcctcccaggttcaagcgattttcccgcctcagcctcctgagtagctgggataacaggcgtgcgtcactacagcctggctaatttttgtatttttagtagagatggggtttcaccatattggtcaggttggtctcaaactcccgacctcaggtgatctgcccacctcgacctcccaaagtgctgggattacaggcgtgagccaccgcgcccggccaggagtctgtttctgtgttgctaggctgcccttcctggtcctgctagggagggctggctttggttggcagttccagcttctgcagggctaggtctagggcaagcagaaaagaaagccccgggctccccctgcactgtcccacagccgccctctgtcacccgtgagagtctcacctgtgatgtccagggtctcagttgtccccagtgggaggaagcgggagaagtcccctggcccaccttcctgaaagcagaggttcgcccggcctgtcagggcagcggcgtccgcctgcaaggagggccgctcagtgctgtgcgtgaaagagcctcgcgagctgcagggcgtggttctctgccaggtgtccgcgtttatcacccctggaactgtccgccatcctcagagacctcccctcgcacaaaaccgagcagatggtgtgcttagcgaagccgccgtggaataagacttcagctgaagcaccacgcagcgctcccagggcaaacgtttcctttcgggctttctggaagtttgatttcacgtgctgtcccatggccgtgctgggcagaaaggggtttatcctggatgttcctggggcatatgagcagtgagatgtgaggagttctcagagctgggctccttttgtttgggaaggtggaggggaggcaggccgcggtgggagcgatscgcacctgggcactcacggatgctggagtagaagcgatgaaggaatggggagcggggacggaggttggctggcctccagctctgctctgggagcctgagctcagtggggtgggagcagttcttgcaggcckgggtctggcaggaggaggggcacacaggttgtgcggtgagagacgggactgaggcggatgggggccgtgggtggggggtgggggcacctgtggggaacactgggggagggtgggccgggaagcccaccggcctggccctggctgttcattacagggggcaagcgcgatgaagagctggttctgcccatcaactcctccctgagcgtcactctgcaccaggaccaggtatgtgtggactgacgactaaacaccacagtgccatttccagaacatttgtagaacagttggtacccgttgggtatggtggctcacatctgcaatcccagcacttggggagagtctcttgagcccaggcattggagaccacagtgaaccatgatcgcaccactgcactccagcctgggtgacagagtgagaccctgtctctgaaacaaaaaaaaaattggtacttttttacctaaaggctaggatgagatggcctagcgacgactcccagccagcacgcagtgtctgttccatctcccagtattaggagagctgagcacagcacacaygtgcccccaggtctcgtcacacatgcgcacaccgtgccccagggsctcccctgggagtccccgtctctttattcaggataaggcctggttgctccacaaggtgtggcccacgctttcatcccccacgggcttccccactgcccagctgagactggcctttccccccctgccctcagcagggctgaccttgctcgagtgggcagccatgaggctctctcagtagaaaggggtacctggctggcatcggtcctcartgctggcctctgaggtggccctgggtttccttttcagttaaaaaccaccacaacagccgtcatcagcaaggacttcaccgaggaccggatttggctgaatggccgggaggaggatgtggggcagccgmggctgcaggcctgcctgcgggagagtgagctggggtccccataagcccatccctccctgttgtcagcagggwccgagcatccagaaagtgcttytgcctctgtgcccctcctgaggcagcaggcggggtggctgggaaccagacatgcccgctgggccgccagctccagggcagtggcccacctcaatgaccagctgggcttgggtcagtctggggttttcccgggtaagaaactctccacgaggagtctggcaggcagaggcctggtgttcagctgtgaccccgggcaggtgggcaggagcagggcgggcagggtgctgayrgctgggccacacgctgtctcattgtctctgcagtccgctgcctggcccggaagcggaggaactcacgggatggggacccgctgccctccagcctcagctgcaaggtgcacgtggcatcggtgaacaacttccccacggctgcgggcctggcctcctcagcggcgggctatgcctgcctaggtgggtgcccacagagacccgcaggggttctgggctgtgggcgcaggagccacttcatgctcttcccgggtcagggagcccactgctgggcgtggctaaaagagcatcccctcaccccaggcctccctggcctctctggagttgttcagtctcttcccagagcacatctgaacattttcatcttccagttgcagctggcgtggggctctcgcctgtaatcccagtacttaagaggctgatgggggagaagcactgtaggccaggagttcaagaccagcctgggcaacatagtgagacccccccccatctctacaaaaaataaaaaaatcttcccgttgctgtatgtggagcccctctagattgtcagtgatagaaaccacttcaaactggctcagccctaaaatagcgatgattttgtggctcacgtaactgaggattccaatgggcacagctggttgcaggccccgctggacccagctctctgctggccccaggccacttgctggcagcttcccacccactgtcagagcctgtccccccggtggtggtctcacaccatcttcacccctcaactccaggggtgacgcttcctggcccacctgggctcctgygccttccctgaaccaccctcggtgaccagggtgggtgaccagacctggaggtggggttgccctgctggagccctgtgggaggaggggagaaggtggctcccgtgctgggtgggcagggggcgcgtcttgtggagtccagctctgtcctggcatcggtccctgccccacacagccttaaaattccttcccaccctcaaagcccagcttgggtgtcctcgggggcctttctcccgccttccatggggcttcctgctctgccgcaggtaccttttgttgcccttgtcgcaggccgcaagctctgcaggccgtgaacagagagtgtccgagagtggaastagcggaggtgggrgacagacggctgggccggtgaatgctggcctcaaaggctgatggcccagaagccctgtcatctggaaatccccatttgccgtggggtgtgggacgttcctggggcggtgagctgtcagggagcacagcgcaggcagctctgaggaccctccctgaatccgcatgcctgcagcctacaccctggcccgtgtctacggcgtggagagtgacctctcagaagtggctcgccggggctcaggcagcgcctgccggagcctgtatgggggctttgtggagtggcagatgggagagcaggccgacgggaaggacagcatcgctcggcaagtggcccccgagtcacactggcctgaactccgcgtgctcatccttgtggtgagtggggtggggcgggtggagcagcagcccggtggcctctgtccctagtcagggctgctgccgggagcaggagcgaaggcgtccatccaggctttgcttggctcctggggtcagcrggggctgaaggaacagaagcgtggttgagtgctcaggaaccgctcccatgcggcgggygccaccacccgctgggatctggaagttgcccctgcgtcacccctgctgtggccgggaggcctctgtggtcaggcaggtggcactgactcccacccccgctgcctgcattggctgagggagggccgagtgtttgaggctgaggtccttggggctggccccctgcagggtgtggcccaggctgtctctccctcgtgcaggtgagcgctgagaagaagctgacaggcagtaccgtgggcatgcgggccagtgtggagaccagccccctgcttcgggtaaggccaggagcgggtggtcccggggccctgggagtcacgcttgtgcccrgctctgccctcagcctctgtctgggcccgagtgttctcacacctgcggcagccccgccaagaccacgtgcaggagccaaatgcagagatggggctcgagccgggcctccaaccccggagtctctcctcgaaccctctgctgtcgagacccccagcggctccatgggaaacaccctgtgccttgcagttccgggccgagtccgtggtgcccgcgcgcatggcggagatggcccgctgcatccgggagcgagacttccccagcttcgcccagctgaccatgaaggacagcaaccagttccacgccacctgcctcgacaccttcccgcccatctcttacctcmatgccatctcctggcgcatcatccacctggtgcaccgcttcaacgcccaccacggggacaccaaggtgacgcgggccgggagggcagaggctgcgctcgcgctgtagcgcgtgtctaggcttgtgctgccgtgragacggccccggggctcgcgtgcagggcaatctgtgtctgaaagctccaccctgctgtgtgcgaagctcactgaccatctgggttcttctgtttcattttgtttcttgacttgcccgggtcacggccccaccaccttcttcctgggttcacaggcagacgtgtcaagtaccaggcacttggggtcacagctccactccagtgtggccctgagggcctagactgagctcttggagagcccaaggccgcctggcagaccagagggttggggagacaagggtcaggcaccacgtgaatagccagggtgactgctgtgggttccaggtggcgtacacctttgacgcgggccccaatgccgtgatcttcaccctggacgacactgtggctgagtttgtggctgctgtgtkgcacggctttcccccaggctcraatggagacacgtgagtgtggaccccgcccctcctcctttttgggagatggtgccaggaactctggtcggaagagacggaggcacctgaaggctgtggygctgagacagggagtcccagggcaggcagcagtcccccgagtgtgggagccacgggcagggtgtccccatagagccatcccacagcccacgtccacagggaagaaagagaggccgctcacgcgtgtgtgagcaacgcccagggtctcccacctcctgagtgacagcgtcccctgcagctcgggaccccgcaggctcttattctatagaacagtggcttaggaaacacgcctgcactcccagatgtgtgcgtaagtgtccgacattttgaaggaaaggagtcaaagcccctgatttccttcttactgaagcgagttagagccagtcaaggcggcygggtgttgaccccgccccggcagttgggtgtcttttcttgggtggggtccggcagctgcatcttggygccacagagcccccatgtacgccctcctcggtgcacagcttggccctgaaccgcctcttcccctgcgctgctctgtgggggtgccacagagcccccatgtacgccctcctcggtgcacagcttggcccagcctccttacgccccggggctgttgatttcttccctcccgtgttttcatggtgtcttattctcaatgtgagaggcgcctcccatttaagggtgtctggaagcgtgtggggatgtgcgtctgtcccgggtgggagcaataacaccttctaatggtcaggggcctgccctgtggggtggactcagacccacaccccaggactgcccgcctgggaagcaccaggctcgtggctgctgctccgggtggggcttgcaggcttccgctgttytgcagaacacggtgacgaacgcaccagcttgaattgggcgcttccctgagctgttaccccatggggcttggcagcacccttggccagatgtgggtccagcctgggcatagctgtttaccacataacctaaaatttcctgtcycagccattcgagagcatataatcctgcggtgttgaggacattcacagggtcatgtgagcaccacctcaagccacctccttaactttttcatcamccctaaaagaaacctgtccccacagcagccacctgcygtctccccctccctgagccctgacggccaggaatgcacttcccatctctggacttgcctgttgtasactgttgtagacgcttagagaaacggatgcattcaccgtgcccctgccctgcktttccaggtttctgaaggggctgcaggtgaggccggcccctctctcagctgagcttcaggctgcgctggccatggagccgacccccggtggggtcaaatacatcattgtcactcaggtgaggcctggggctcacccagtaccccggggtttcctttcctgccaggggggcccgcccagcccccagggcccttaaaggcwaagcgcggctccctgtccctaccgtgtctcaggcaggaagccagaacgcctttgtccattcatttgctctcaaagtggacattacaggccactggtgatgctcagagcagcagggctgcgctgagggtgggagggtgagtctgacacaggctcccagggagacaggtggggagtatcagacccttgaatagggagcgcctgggtnnnnnnnnnnnnnnnnnnnnccccaaccaccccagcagaccggggttcctgccctctgacctgctccgagggccaagcttgcatccagtgatcacggccgcccaagccattgccgccaccttcctctcaggggctgcctgttcccaggctctgtggttctctgtcccccctgtgacagaagcagtgcccagggcagggggctcgcagctggcaggggcggctgtgcctgcaggagctgcgtgtgggtgtcaccactcaggcgctttaccttctgaccaggacccacaggaagggcgggggcacaccgctaccctcctgtgtccggccctacagatgctgggcacaggatgaggcgctgccattcctggtgacctgacatggatttctatccccaggtggggccrgggcctcaaatcctggatgacccctgcgcccacctcctgggtcctgacggcctgccgaagccagctgcctgactgcctcagcagggascgcatgcygcttggagaaggggtggcctcgccggagctagggagcggatgtrgtgggctggccggactcctgggacatgtgggtggtggcttgaccccgggcccatgggcagcttgctgtggggcagtgcagggagtcctgcggccgcccaggtgtcaggagaggtccccgccgagtgcttcagctgccctaagctgcaccagcgctttgccaagatgggatggggagggggtatgagaactggcagagcctcggtgcagcagggctgaagggctttctcaccccagctctggctatgcccagttctctgagaaaggagctcagtggggaggtggtccctccagcggaccagggaaggggtcacygtgctgggagcagcctccttgggcctcaggaaaccaccaagtgcctcggatggtggctgcccacggcgcttytgctgagaccctgcccccggcccaggtgtctcggagggtggctgcccacggcctgggtgtggctggaatggtggcaggagtgggcaccagtgcggccccggtggccatggggaataaaccagcattrctgcctccggcctccgccgtttttctgtttcgtaaaccagcatcccggggttcctgctctgagtgaccctggcacctgtcagggagtccaggtgtgccccatgagggcctgggggaggggcaggctgggcagagccacagaggggctcccctcaaaccccacattggctcaggtgggaccctcaggagcaaccccaggtctaaagtcttcccatgggcgctgggctcaccacccccacgccagcccctgcctcccgtacccaggccggacgtgacggggccgtccctgcattctgtgctttcccagttgtacacatcctgtcccctccctcgagtctcagtcacagttcagtgacctggtgacgggaggccccctgcagtgtctgacccaggccacgcctgtgccagcccagagccagggggaggaaatgggggctgggcctctggtccccatggggaggccacccttgtccttggtagcatcagggtgcagaggtgttcccgggctgtaggggtgactcccccaccccccaaggctctggagaggccgatttgctcaggaagccgaccttcacaccttgtcctgctattaatagacgcctggttgacacgggaccctcggttgggtccggagcattgggcaggggcacttgtcagtgtttgagagctgaagtttgggaagccctggggaagcgcaggaactccccgcctgggctggggctgccgggcagggcccctcctatgcctcggcgtggctagagagggcgggggcagaaggctccgggacagccctgcaccctacagatgcgggtctccgcccagccgcggtcacctggggggctgggggcggggcctgggcggggcggggttcggccgggagcgcaggggcggcagtgcgcgcctagcagtgtcccagccgggttcgtgtcgccatggggcagatcgagtgggccatgtgggccaacgaacaggcgctggcgtccggcctgagtgagtgcacgtcagggacggtggaggctgcagcctggaggggtgtcccaagaccccagccgggacctcgggctacttacagggtggggaagtggggcgccaggcgggccaggccgggccggggtcaggccaggagggtgcggggaacgggggcgggaccctcaggccgcgggctggaaggaggagttctgagacccccagtaattcccttgcagaccctgcggagcgcggcgcccctcccccattcccttctctcggtcccccgactccgcgaaggaggaagttgcagcgcaggggaagaggcggttcagccccggtggtttccggggtcaccgccccgaagcccccgagtgggggctccggcctgggcatcgggagaagctcccctgcccctcggtagccagctggcctggaggtcgctctccctgggcttggggtggggaatgggctcatgccctggggctcagcccttctcatctggagtctgcgctggaggcggtctgagatttcacaaggcgccgaaaccacccagtgacggccctgcccagcccagctgcacaggcactttgctcttggggtgggatggcacagcccccagtcaccctcctgtgcatttgctcagaggttctggtgagggcagcggactccatttggaaatggaccctctcgggaccagggccagggagtgtctggcccagcacgggtgaggctgggctcaggcgaggtctgagggcagaggcaccactgcagcagctccaggaaggacctgcaccgggggaggagtgcctgggaagggcctgggggctgagggtgaggaggaggggcccgccgccaccactcccctggggctctgagcgccctccctgttgtctggagggtgcgtggcagctggagtgggagcagagacctcagggtgggagggctggaggacggggccctgcagcctgtcctgtgcccaggaaagtgaccgcctgcttcgagtcagcggccaagaagtcggtgggtcagttcagacagctctccccagagctgccccgtgagactcaccctgcctgccccgcactccctacaggaagtagacggactgagggcacccagctgggagccaggagacctgggctctagtctggcctcctgctgaaaccctccaggggctcctggcccgaagagttagagccagactggacgccctgcactgcccgccctggcctcccggctctccggccccctcctccagctgccgtgcttcctttctgttcctagatctcctgagcgtgccccagggcctcggcacaagctgctgcttctgcagagcctcatggctgtctcatttatttctcaattcaaatgccacctgcctggggaggtccttccagaccgtgcagccccaggaggcagctggcccggagacagcagggccttgacaaagagtcccccctgtacacagcaggtgctctgtaaatgtggctgggtgccagaatacgtcctcagacctccctggtggcaccagcggcagctttgcaccctctttcggatggcaggctcgggaccaggacggtccccaaagatgcatggacaattggctgagtagactcaaggacactgccctcccctcctccgacgcagacagacaaacccagagagttaatgtgtagctgggctcaaaccaaggataggaaatcttccaacaagaccatgtggagacaaaaacagaatggctggcagggcaaggtggctacacctgtaatcctagcactttgggaggccaaggcgggcggatcacgaggtcaggagatcgagaccatcctggctaacacagtgaaaccccgtctctactaaaaatacaaaaaattagccgggtatggtggcaggcgcgcatagtcccagctactcgggaggctgaggcaggagaatcgcttcaacctgggaggtggaggttgtagtgagctgagatcacgccacggaactccagcctgggtgacagggcaagactctgtctccaaaaaaaaaaaaaaaaagaaataaaatagtaggaaggaccaggcgccgtggctcatgcctgtaatcccaacactctgggaggccaaggcgggcggattccctgaggtcaggagttcgagaccagcctggccaatgtggtgaaaaccctgtctctaataaaaatgtaaaaattagctgggcatggtggcgggcgcctgtagtcccagctactcaggaggctgaggcaggagaattgcttgaaccctggaggcggaggtagcagtgagtcgagatcgcgccactgcactccagcctgggtgacagagcaagactccgtctcgaaaaaaaaaaaaaacagtaagggggaatattggacaatacccccccaaaaatgtgcagaaatagccatatcagacgaaaccgaaattaaggcaaaaccgctgacgggttaagaggaactccgtatcggggggaaaaagacactcccccaagaagatgcagaaaccacactcggcctgttagctttcagtgcatcaaacaaagactcatggtgacaagggggtccatttgggggtcccagagcccactggggcctgcaggtcgggctgtccttggccactcctgggacccagagcccgggcatgtccagcaccccctccgccagcccgtgcgccacaggctctgctcttcaccagtgcagaggggtgcctcctgggggtgtccccgaccctgtcactgtgctgtggggatgggtagggggcagctctgggtggcctggtggcccacagtaggtagagaaggggggtggcccaggcccccgggacaggagccccacagtgcctgacccacttctccccgcagtcctcatcaccgggggcatcgtggccacagctgggcgcttcacccagtggtactttggtgcctactccatgtatccttccacctgaggctggggtgggcggggaacgcccagggcagagctggggagccacttcacagtgagctgtttgcctccgctccccaccaccgcagccaggctgggacacagggtgggctgtgcacgggttgggcagcccaggccccagcagccaggcccctcgccaggaccatgtggcgatcagcggcagacccgccagtctaagtcctggtgagtggtgggcagggggtgtcaccagagggccagggccagcactgaggcctccctgttggactgctgggatcccctctgcccgctcctgtcagtcatcccccttgaccggcccctctacctcctctgccccatctcagccctgccgcccagccggaccttgcgacaaggagcactgggcagggtggtgggagggagggcgtgggcagccccgagtgccagacctgttggaacctcccgtggctgcctcctggctctgtgacctcaggcagtggctgcccccgaccttttttgagacagggtctcgctctgtcccccaggctgcagtgcagtggtgcagctgtgactcatggcagcctccacctgggctcaggccaccctcttacctcagcctctggagtagctgggaccacaggcacacaccactgcacctggcttttaaattttttgtagagatgagggtctcactatgttgcccaggctggtctcaaactcctgggctccagtgatcctcccgcctcagcctcccaaaatgctgggattccaggcatgagccaccgtgctcgggcccctctctgtgttgtcttcagtaaagggagttccctgtggcccctcaggctgagctgggctgttccttaaccacatggcttcagtgtggcgggcgtgtttgtgtgcctgctggagtacccccgggggaagaggaagaagggctccaccatggagcgctggtgagtctcctcctgctctggggtctctccgggggttgcggggcccaggcagggctcacagggttgggtggagcttggtttctcacttggaggctccggaaccaaccctttggtgcttgtgggtaaaccaaggccggtgcctgcccggtgtgttttgtgggaggaaagaggcctgggtgccctggggtggtcagcagggcagcaaaggagtcccgagtgggagaggcccagccgcgccgtctcgccttcctccctcccccaggggacagaagtacatgaccgccgtggtgaagctgttcgggccctttaccaggaattactatgttcgggccgtcctgcatctcctgtgagtccccgtcccgcaccccctctagggctcaggagggcttggagccgaccctccccactgtcccaccggccgggctgcctggacaggagccacccccacttacctcagtgtttttccaaacaaaaattcgggtccctggctctggcagggcctgtgtctgctgtctagtgtgcaggatttgtaaggatccactccaaatccgaggagctccgatccgtcgccagggtctggggtcagcatgcactgctggggggtcttgcctgggcttcctggtagggtggagggttccgtgctgtgtgtctgctggttactgccggctgaggccaggacacccacacgtggctgcttcctccgagcaagtgcaccagagccgctagtgtccacatcaaggctgagaacacccaggaccgaaacaagccccggtccgcgcacgtcccctgggtctgcagtctgccttgtcctgagactttgtggccttggcccccagacctggggctccgttcccctttctgagtgcccttctgtgtccctgcctctcacccgctgtcccccaggctctcggtgcccgccggcttcctgctggccaccatccttgggaccgcctgcctggccattgcgagcggcatctacctactggtgagtggcgccctctgaggtcggccccggccacccccatccccagcccctgccctgacaccctcggacacgcatggcccttgaagccggctctgtaggctgagccaaggctgggagcaagtgtgagcctgggcgtgtgctcacagcacggcggggacgcagcggttgctgctgcca

SEQ ID NO: 93288 - DNA, 53443 bp, Homo sapiens
gtggaataagggagaattcactgtctgcctgctgtcttctagctgagacgctggtcatctcctgccttttggcttgggctaagactgaaacttacgccatcagctctcctggttttcagggcttcaacctcaaattacaactatatcctgggctctcctgggtttccagtttgcttactgcagatccttgggcttttcggtctctgtaaccacacaagccaatttgttataataaatctatttacatatatacagatatacgattcactttctctggagaactcagacttatacaatttttttggaaattttagttggacacaatcttctttgtctacaactctccatccacaaaaacattacaagaccataaatttagagcaaaatcatttgttccttgtgcttgttaaatttgctgagccaacaaggtgcatcaagaaaaatgaagaataaatttcagaagaacttaagtttggctaaaatggggagggtgaggtctgctttgaagggggcagaaaagagggttctgtgggacacatgcacacatgggcacacaaacaggcacacacacacacacacctgctccatttcctcctcatctgctcttcatgacttctggcagtctaacttccatcccaaggctccactcttagccctttactcctgttcatctctactttctccccaaactccaactattccctttgtgttaatgatatatatacctctagccttgtgctttcaaaaataatggaatcacagcctgtctgattcatctaatgccttcatttcacagatgaaaaaattgaggatcctagaggtctacagatatgcctaagatcgcacatctgctggtaattagaagagttgagactcaagccaggtttcctaactaccagtataacattctctgataacgtggttgtccctctagtctatagttagctatgaattatctccaatactacaagcctcaacatacaatcagagagatagcagtcacttgtaaaatgttgagtcttaaatagataactggagaaaagtatttatcatataaggtagtaaaatggttaatattcttaatctataaaagagcatcctattcactcaacacatatttactgagtgctcactagacagttaacagtgctaagcactgagaatgcaaaaagtgatgtaagaaaagcatgatttctgcttgcacgtggtttactgtctagtggacagagaaagactaacgagagaattcctgttatgaaaggcagttgtgcacagcttctcaccccctgcatcgttacataagagcagccttgggcctggaacattttcttgcacagagataaagagtcatcatagcctgtgctaggcacatctctgctttgtaataactttccccgttccgggtttcacgtgtacttctttgttcttaagcgcatgggtcaatggccatcaagtgcacctccagctttctatagttctggccccagggggatgggttgaggatcttcacctgcagcaacagagcagtgtatgcattccatctccctgcatcagctagaggtcaagacccactgccatgggggcacacagtcatcactgaagctaatcctgttccatctcttctctatatgagtaaagtgttttccatccagtgcctgtgtgaatcatctttcttggtgacatggacatctccaaaccatacagtaagttaacatcctgggactgctgctttggtgataagcaacaggggtcatttgctcaacaacgactgtaatgaaactctagctgaaagaaaggaatgcctgctttaaaagcacataatttagggacttgacccagtttggatgtatgatccagattaggggatgccggggaagtatcagtgaaatgactgaagtgagaaaaaaagtataaacaagtgctaattagtaaaataatgtacaaaggtcctatggcaggagtaaacatgatatatttgaaaaactgaaagaaggctggtttgtcttcagagcatgaagtaagaagtagtatgggttaatagagactggaaagagagatagagaatataccttgcagggccttccaggtcacattgagaatctgattgtgaatccactaagaaatggacagcatagaagagtgttttacagagagttttgacacagagagatctgggttttgaagagatggggcctgttggcttgggaaaatggatcagagaggaagaaaatggacacagagagatgtgtgagaccgttgccaagatccagaaaagtgtgcatggtagcttagaccagtggttctcaccagggaaattttactcctctgaggacacttggcaatgtcttgagacattcttggttgtcacaccatgtgtgggaggatgttactggcaactagtagggaaaggtcaaggatgctactaaacatcctacaatatacagggcagttccctcaacaatcatctgacctgaaatatcaatagtgctccaactgagaaatcctggctcagaccaagatggtggctgagagagaaggaagtacatattgcagagacgattaagaggctaaaatcagcagtaattagtgactgattgatcgtgtataatgggggaaagactatcaaaggcaaccctcaggtttctggcttgctcacctggatgagtggggagtgccgagatgagaaatgcttgaggagttgatggtttggtaggggaagataaggagctctgcttgaaaccctgtaaatgtgaggtgcctatatgacacttgaaagatgaaaaacacaattctctaggtctacagatcaagaggggaagcctgaaccctgtatttgagagcttctgtgaataaaacagaagacgtaggcatggatgagattacctaggaaaagaatacagaatgagaagaaaataatcctggagactgagtcttgagaaactcccaggaaaggagcaggaaccagcaaaattgtctagagaagtgggaggacatggcacgcatcagatgcttcaagagggcctgtttcctggcaccttctccaacacaagcaccactgattattattgctatttttttttgagacagggtcttgctctatagtccaggctagagtgcagtggcatgatctcagcatctcagctcactgcagcctccacctcccagattcaagtaattctcgtgcctcagcctcctgagtagctgggacaggcatgcaccaccacacctggctaatttttgtattttttggtagagacggggtttcaccattttggccaggctggccttgaactcatgacctcaggtgatcagctgacctcggcctcccagagtgctaggattacatgcgtgagcccctgtgcctggcctagatctttttaaactttgctaagctaatcaagtctaatcagtttttttttaatcttgtttaaatataccaaagttttagttgacaatttttggtaaataatgagattaagcatctctgccatgttagtcagccattcatatttcttttgtaaattggccaatgcatgtgacttgcccattttctatttcagatattcatatttttctatagactttagtatatcttacggttttaaactctttactgtcacattcttaggtatttcctgagaatttatcttttttttggtgggggggggttgcagtgggtggtgtctttctattcagtcatttttcattttcatggattcaaatttgttgactttatttctcttcctgctttgactgcatagtagaagagactgttctttcccaaggatgataaaaatgttcttctacattttttaggatgtcaaattattttatacatttaaatttttaaaccacctaaaatctatttttgtgggtgatgagtaattagaatccttttccaaatgagccagttgtttcaataccagttattgaataatatgttatttcaacctgttctttatcttataatcctatatccaatagtctgttgtggcctatcttttttgttctttagatctctcagtatattcctgtgcccaagccaggctgtttttattactgtggctttacaatatgttttgatagctggtgggcaaatctgtattattttataatcaggaaaactcacaaaggagtgtgtgtgtgtgtctgtgtgtgtgtgtgttcttgcatgtggaaggtggatgaggaaatgcctttgaatgactaggtctactttggaagctgcaaaggagtttgacacagtgcctggagcagagtttccagaaaagcttggaaaaataaaaggagaattggagactacagggctctcaaaggaggctgatgctcacacttacaaggtctgtaggttgatgcaagcagagaggaaagctggcatggactgatctctgttatttttatacactagcactaactgcctttcaaggcccattaggcctggaaaccttttcccagcccctgggaagtcactggggatgctaaggttagtcattcacccactggggctatctaactgagctcaggtccgggtgcactgccagcagctgtttgtgtacttacagccccctgggtgcagacggacccccagctgccagccatatgccttatgtttcattgtcccacagctttcaaagaaaacaagtcttttaattcagcaagtattcactgaatgtctgacacccccagtgcagaccctgtcccaatcccccaatggggtccacctctatccaactctgggtgaatgaccatggtgctcttgcgcgcgggcacacacacacacacacacacacacacacacacacacacacaggcacacacacataactcaggcttggggcccacctctctgggctcagaggtatcaaagcaggggcattcctatcttaaggacttcttgtcttaggggctttggccccacctgcacaggacagaaaattagtggatttctaggagaaagcaggctatggcagggtatagccagggactcagctcttccttccagacatgcaggaaccataaggagggatggtcaaacagggcctgcttaggcctcttgctgggatcactccaagggtctctggggtcactcagaggagccgggaggctgcctgctgctgtacactgagacagactcctggggtgtttggatcacggcagcccacatgctgcctttttgttatcttttctgttttgcctcttccgggctgtacttgtcttgagtttttggccttatgacatccatattaaatggggtagggcagagcattgctcagtaaacagcaagaatggccctgggcatggccaaggcagttctgctaagtgtgaaagggaatgtgcctgccatactttgtgctttaggcccaagtgacctaggggccagcctgcctactggcctcactcccaacattacaggtgtttgactctactccaccccgtggagagacggagcacaggagccacccaccggggaccacataaggtcatgcacacccacagagtgcccagtccctgcctggccttgtccccattttccctccacctagggttggggtgacaatggaggtaactagaagacagatcaaaaggttcttggtcttgacacagatgcaagaaggaggcagataatagacacctcccttccccctcgcccacataggctccggtgggttctcagggcaaggcctggctccctcctctccgacttcaggtacaggtgagtgtggagggaactgaaagaggaaaggtgaagtgctgtttggcttcgacctggagggggacagaaggctctctgggcaggcagggccggtcttttggcaagaggcgcgctctctctcccttccccttccatcgagggctgggtgtgaaggtgagagcaatcagaaaagaaggtgaagaggtacttggccttgacacggacggggggggcggtcccaggccgaggccgccccgcccccgccccgctatacccggcgccgcctcccggcgtctgagctgacacctccttagcgctggccgcgggccgcctctgcggcagcgctagtcgccttctccgaatcggctccgcacaggtaagatcaggggacccggcgcctgagctgccgaggaaggagtcgggggtgctgcgtgagactgagagttgggaggcaaagaaacaaaatcggatttcctcagagggccagaggaagagactgaaacacggtagccccaaatccttgggcggctgggaggtggtccctgtcatgcccacgacgggkgggcgcgtctttaccgacagcctgcatggatccgcagatgtgctgggcgcttagatgcctgcggctatgcagagacgcagtccagagaggtgaccccagatcctggtgggggctggatcccagggccccgacatccctttgcaatttccagccagcagctaaagactcccttcccggggctttagagaggctccaggctcgcgatccatgaacacacaaaaaccttccttgctcatgttctgaaraaaagccccgcctcagctttgtgaatgttaataatagggggaagatttgttctctcttgggtgtgtgtacaggtggaacaatctgcagaaaaagaccttttttcggaaaaccttttcagtttgaagtttcagcaaatccatttttcatttccttkcatttggggagatgacatgraatttaagctccagctttggggctgtctctgaagttctggggttcggcttacctttcccgggatgaggttttgatytggaggaagtaaaatgggttttgtcttaacctgggctcgttctttaaacttgtgaggccggggcggtggacttactgacatcctgtattctctcacctgcagctaggagaaaagatgttcactgtgctgacccgccaaccatgtgagcaagcaggttagtatctctcagcaggtagcaagcgtggttttgccaaatcgcaagagaaccccagcttcggcctacagtttttcatccatatcccctgcaaatgattgtttaactttattggtttgagactcagtactcagctgggtttcaacaccggcattcctcaaataaaagtaatgcttttcatcaaagccacacaaaacaaggactaacatgcatgtttcacttaaatggtttttccggtttgtataatccattaatttggcccttgtggtttcccttagctagctgtgtgtaacgtttgctttagaatactgtattgttgattttgtgatcaattgtacagtacttggatctttcctgtattcccatccaaatgttgctggcacagtgcctacaacacccccacccctcactgtgagtcagtgttgttatggttgatactgcaggcacaagtgcaggattttctcacactggaaggcacacacacacasacacacacacacacacacacacacacacacacacacacacttctaagcttgccccgcctgcctctagagcactttttggagttgctcatgtggaagcccagaaggctctggcttctccaagctcaggtaggtaccttgcaattaccwtgtttgtccagccctaatgacagcacagctctaggctgcatttcctaaatgagtaagacctggtctcatccattttgctttgtaataagcttttctgcaaggacaagagtttgcttaaggtaatcatagctttttacttgaaaactgctgaaacacagaagacttaggaggccagccacgtagctgtggtcaggaaactgcatacatatcacacactcctcccccatggatagacattctttagtcatgcccctaaattgggtattcttgtcttccaaaaggatatgattttaggatagtaagggcaatctatatgaacttttatttttgtaaagggacattgcacttgaggagctgttttcctttgatctttaggttttcccccaaaacactttgaaatgttaacacagattgtaacgtcactcatacagactaacctgttacattccttccaaaggacaagtttaacttggcagattaaatttctaccccattttgttagagggaaaaaatcccttaaacttctataactaacactgacaaatgcattctttgaaagctaatgcaaaagtttgcctctgtggattaactggttcctgtacttttatttggaatcacagaaaagtgatacaggacctctttacatgctctgcaggtcaactccatggcagttggctctcctttccattgctattacccacaattctgtaatgagtaaccttgtgtctaagtcattttacacatgtggagctagttctgtgggataacttcccaaaagagtgattgtgagtcagatggcatgcttatttgcagttttcataaatattgacaagttgccctccattgatgctgtaccagtttacactttcaatgacaaggtaggaggattaaggtgttaagtgaccaactttgacaccaagaagtgtctgtgactgcagctacactgcaggggaatcagttgagatggaaagagttagctgttctgagccatgaagacctactgcgtgactgccctcctgtagcaaatgttgtgatgtgactgaatttgggggctgaatctaattatatcgtgggcgcatagacatgccctgttattcttctgggaaaatggcttacagaaataatggaggggtaaagcataggttataatgatctaggaataatgttctggaataagacaggatctatccaattgctgttcaattgatcttcctataatgatgaaaatgttatatggctgcactgtccaatatagtagccactagcccacatgtggttattgaacactggaaatgtggctagtaagattgagagactgcatttttttattttaattaatttacatttagatagccaattgattagatatatattggaattcratgaatctagtgatctttctattagtgttcatcatatttcaaccatttggttgtcatttatgttgatgtcccaatagttttaccaagactattattattatttttttagagacaaggtctcactctgtcaccaggctggagtatagcggcacagctcactgcagccttgagctcctgggatcaaaggatcctccaacttcaacctcctgagtagcttgggctacaggtgtgcaccacatgtacagttgatttttttcattttttgtagagacggggtctcactatgtggctcaggctggcatctaacgcctggcctcaagcatcttcccatctcagcctcycaaagctgggattacaggcataagccactatacccagcccaagattattatttagtcagtattttcattgaatgtctttttatctttttaaaaaattaggtataacttctattcagtgaaatggatagatcttaagtygtgcccctaagttgggtgttcttgccttctaaaagtatgtttttagaatagtaagggcaatttataagtttataatgtttttttaaaaggaaattatacctaagacactgatttgctttcattttcaagttttctccaaaggactttgaaaggtttgatgagttttgacaaatgcacacatccatatactccacactctgtatagcgcattgccattaccccaagaaagtgcccacatattccttctcagtgaatccctgccccaacttctgccccctggcaatcactattctgattcctgttaccttcctacttttgaacttcaaataaatgaaatcatttcagtatagtatagtactaatttttttatttttattttattttattgagacaaggtcttattctgtcacccaggctggtgtgtagtagtttgatctcaactcattgcaacctccacctcctggcttcaagcaattctcccacctcagtctcccgagtagctgggactacaggcgcatatgatcacacctggctaatttttgtatttcttggtagagacatggtttcaccatattggccaggctggtcttgaactcctgacctcaagtgatccacccacttcggcctcccaaagtgctgggattacaggggtcagccatctgcccagcctaatttctttttctttaactgagattatttttaaatgaaatattctatgagattatttttaagtgaaatattctatcacctggtttaattttttaaaaatagattttttgaatctccattaaaactaatgttagctgggcgtggtggctcacacctgtaatcccagcactttgggagaccgagacaggcagatcacttgagcccaggagttcgagaccagcctggccaacatggtgaaaccctgtctctattaaaaatacaaaaattggctgccgtggtagcaggcacctgtaatctcagctattcaggaggcagaggcagaagaatcgcttgaacctgggagttggaagctgcagtgagccaagatcacggcacagcactctaacctgggcgatagagtgagactccatctcaaaaaaaaaaaaaaagaaaagaaaaagaaaaaagtaaaacaaatgttattgtaattcatctcagggataaccaaaatatcagaaaactagaccatgcataccctccctgcaacactgttttagtacacaatttgtgaggaagggcaaataggtattgtttgtgcttccccaaaactggggagaaggggagcttatttgctactccatcttagaagtgtgggtctcgctaacaccagagaaggtggtttatgcacctgattatggggccagtccatcaattctacaaagaataccagtgcctggtttttacctccccctcaagtgtcttctgggtcttctcattttaggcctcaaggccctctaccgaactccaaccatcattgccttggtggtcttgcttgtgagtattgtggtacttgtgagtatcactgtcatccagatccacaagcaagaggtcctccctccaggactgaaggtaagtgtgaagggactggcaacaaagggaagaaatgakcataaaggggaagaaatcaattattccaaaaccatgagttagaagagcagaaaatcctttccccccatctctggctgaagccaggagaagttagtgtaagacgcaagggagaaggtctggacatgctgggtttgtgatatttgaggctacaaattgagggtagtgactgacaccttctccaaggactgtgtagtcttgctttgacttctgacttcaaagctaaaatttgtaaccaagagttgcagatagctatcaaagatttaccagttcagccaggtgcggtggctcacgcctgtaaggcactttgggaggctgaggcaggtggattgcttgagtccacgagttcgagactagcttgggcaacatggtgaaacccatctctatcaaaaaaaaaaaaaaaaaatttaccggttagtgcactttccattttgaccagtttatctgttctcccaaccacacaaccctgataatgagtaaagaccgaggctgagcacagtggctcatgtctgtaattccagcacttcgagaggccgaggaagaaggattgcttgagcccaggagttcaagaccaacctgggcaatatagagagactccatctctaccaaaaagaaatttttccaaaaaaaggaaaaaagaagtcaagaccaggagacccaggcacctcttctagcctaggctgagtgaacaaaaaatcaagaacttgagaaggtctccttgagctctatttgtgctgctactcttgagtctagaacatgtgctgtgttccttccaacacttccctcaacaacacccccccggcaaaaaaaaaaaaaaaattactcaggaccttgtgcttagtcccagaggcccctcttagttctcaacaagtccatccccaaatgatctttaggctcagaatcataatatatccccaggcttggctctgagggtgcccttggagacaggaggtgattccatgagaggctgacaagggaaagatgaagcaagttgatgagtccttcaatcattttgggtaggggtcagcaaacatttctcataaagggtcaaatagtatatattttaggctttgaggtccatttatagtctctgttttataactcttctttgttttttgactcattaagaatgtacaaacccttcttagctgtgccatagggaccaggtaattcagccatgttctttgaatctcatttaacatttacacttgacctcacaagtcttttccatatcttcctgctgttagtgactattcaaaggtaatatttgaaatacatagacatttttaaaagaaaagaaactaatattgttttggactctaaggatgggtttgagctaacattctaaggcagcttttctaaaagattagagtaaaatctccattagataatataatagcatttggttccttgataggatattttatttaagaatctcagccctcatgaataatgtgaattaaaaattaaaaaaaaaccttatgcaatcacccaataatgagaagaaagcaaattacccagttgtccaaagatattagctgaggcctaaaagaaggtgttttcccaagctccaggcactgccttctacaaactactgtatataaaattgggactttgggaggccgaggcrggcggatcacgaggtcaggagattgagaccgtcctggctaacgtggtgaaaccccatctctactaaaaatacaaaaaattagctgggcktggtggtgggcgcctgtagtcccagctagctactcaggaggctgaggcaggagaatggcgtgaacccgggaggtggaggttgcagtgagctgagatagtgccaactgcattccagcctgggcaacagagcgagactctgtctcaaaaaaaaaaaaaaaaaaaaaaaaaaggaactgcaactaagagtaatatattttttattttttattttattgttattattttgtgagacggagtcgtgctccgtcacctaggctggaatgcagtggcatgatcttggctcgccccaacctctgcctccacagttcaagtgattctactgcctcagcctcccaagtagctaggatcacaggtgcccaccaccatgcccagctaattttttcttgctgtatttttagtacagatagggtttcaccgtgttgaccaggctagtcttgaactcctgacctcaggtgatccacccacctcagcctcccagagtggtgggattataagcatgagccaccgtgcccagccgcaactaagagtaatatctctttacactttgtatagtgctattcagttaagtcagcgcttttccctcattacatcacttagttcttatgccaaccatagaaggtggacaaagcgagcaccatgactgccattttgaaagtgagaaaatacaggtttggtcagtgaatgacaggtccagaactgaaacctggtcccttctgttcccaaggccagggctctcttcactgcctcccacttctccctgaccctgagttctgaatggagatcccaaatggagggaagggattggcctcagataagagaacacttcctgctttgcacaggatggaaaggtagggaggatgcatgcagatgtgggaaggtttgttgaattgaaggagaggagttaagcctagtaccacccttagaccctgatagctgggctgcctgccctgggccccacatttcagaaggaccagctctagttgcacttcaggcttatctctctctatgacccaaacgaatgtgtttacccagagcccatgtttccccttctagaacacactgtggtgcccaagacttcagaatctagggtcttcgtggacctccagaaggtggacatcaccaatggtctgaggggtggccaagaggcagctgcttacagggagtgtaaacagagcatagctgtgtggtctgaactgtccacacacaggtgcatgggctctttattctgtgagaacaggtttgggaaagggacagggcagaagcctctattcataaaattttgtctctaatcctacaaatgttagaaatgggctggttaaggcagttgccagctgatggcttctacttgttctggacagtaacaggcaagtcctctgttcaaaatggagagacatggaggaatcagatggaagactagtaaaatgagtagataaaaatagatccctgggcagtctagagggcactgttgaaggagaaaaccacacatgttgaatgctactgtcttaggttgggctctccaagtcaaagacatacrtgcaagtagatcatctggggatgatcccaggaaacactggtgagggactagggaactgagatgggtsaggcagccaagagagggcctgctatgcagcaggtcggcactgtgggcaactgggactcagtcctgcttgagaccctgtgagctggtacagagaactcaaagttgtcccatatcaaggggcatacaggcatgtgcctcccagatatcccagtcaagggcatatttattcaccagcttccatcagtcattagctgagaggctgctccctggatgttaactctctagtccttctggcatattttgtgatcaggtagactcgggccactagttaagccttcaggcaggtggaagatggatrgttctacatcacagtagtaaggcctgaggggatgtgggcagagaattgtcagtgactactccatgtaaataatattgttattatccctgtattgcagatgagaaaacaggaaaagaaagggcaaatagcttcccatagttacacagattgaaaatagcagaactggtgtaaaggaaagaaaagagaacagacaacagtggccttaaacaagggtttggaggaaccaggagacacaccctccaccaatcagcaggcagttcaaagaggggattttaaatctcttctgaatcttggtaacagaccctagccaycattgcaagggacaggaaattgtaaaacacaggaagatgagctcggaaggtccattctgcttaattgggtggattaaatgtgagaaaagacagatgttctgggccagttgaaccagaaacggaatgacagctttggaagagagtgttccacatgcagtttttctcaggatatggagagatctctctttttttgttttgaagaggattgcaggtgatgaagttgagcaaatatgagggattttaaattatttgttatgtttatttttttataccatgagccctgttttgctttcgtgtgcagctgacagttggttctaaagggccagctctacaacagcctgtctggagggctctgaaatgttacagaggactctcatgcaaggtcgtatctggctattaaatctaaccttggcttgcctaaccctggtttatgtgaggttatggtcagaactattaaaatgcagtcaaggggcgaaaatgtctgagtctcttgtgttactggtctgacttgctccacaagcttgaagagtaaacatgatgccatcacttgtaattttcactcggcccccagtcccccgctttatcatcatgaagtccaataccttcctcttgaggcttcaccctccctacccctaatcataaccatccaagaactttagagcttctcagtccaatgatcaatactattgtactgcctcttgcagccatgtgatgtcactgttgaagatgggttctgcacagtctaaaggttttaaggatgggcttttccactgtgacctgctcagcccacattagttccccatactgggtccaagatcataagccattttagtctacactcccatgctcagccattactctccaaagcaaaaccactggcccagtctgtgttgaaatcattcccttttaaccctcattgagccttgctcatcagcctggatttctggtgccttgtagcccaccctggtctacttcttggagagtaagagttggataattagtttctttttttttttttttttttttttcagaaagcctcggtctccttatgcaaatgggtcctctcctccagccagatctgcacaccccttaactaagactttactttcaagggactttttgtttaaataagaaagtctgcaatgcacctgattactgaacagtcatgccattacacttggtttccttggagctcagtgaaaacatcatggctatgattactgaacagtcatgccattacacttggtttccttggagctcagtgaaaacatcatggctatgagtacaggttttagagtccgttagactcaggcttgatcccaggtctgtgatcttgggcatttacttactactgtaagcctcggtttgcccatgtgtcgaatggtatgatatgatatgatatgatatgataacatatgtcttatacaggcaataacacaaagcactttctgcagtgcctagaataagtgcaggacaaggcttattactactactatttattatcatagtaataatgataataataataaacaaatctaagaaagttgaccttatgcttctgctttcgctattgctttagacagatcacacaatccttaagtgttggaccaaggagactggccctttcagttaacattaattgcattcactgttagatacagagtaatttaaccagtttccttattctatacatttctaaactgaaagactgcttcctttcagttaatccactgtgtcttcagatccacatttgagccatggttttttctgacactgcattagacagaggattacttactactttttatccgaacatcaccttgccagctgaactgaaattcattcccatcccctctcccccaaaagaatcacactgagtttcactgtttaggcaaaagagctctgaaaactggttaaagaccatttttcccacttttgaaaatgtcagtgaatgatggtagggctagatccgtgtgagtcggtagaggtgggcctatatcagcaggtgccggagggacagccatttctccagtctcacagagcaaagtctggctgctgcagaccctggtgaaagctggatcccagttggagttacaaatgagaatggatactcttctctctgatcttggcccagcagccctgagcttcagaaacacaggaaaaacatgcaccctttttgaagggttggaataaagatttgaggaaaggaaggtgacagtttttctcctattctctctctcctcttgttttatggttcagcaccaggcgtggcagggcgggctggagtggtggtgatcaggtcaggagcaggggggaggaaagaaagcagaccaagaatatagaggcctggacctctttagtttagtgcctggtttccttcttgccttcagtttcaacctgtactttaatctccctgtgagtcgctgcctgtgacagattatgaacaatgccacccttgttccccatgagggatgtcaggtcaggatcctgatcaacattcatcatactgaagggctgagattaagaggctgtccaagttcacataccagtgaacacagatgttctatttcaaaataatggagaggctatgattcaggagctggagcaactttttaaaaatatggtcccatttcaaacaaaacaagcatttgtaatatagataataaaaagttggaaacctcctaaatgtataggatcaggaaattggttaaattactctgtacctaaaagtgaatacaatgaatgtatgaaaatggtgatatcaatctgtttctactgtcaggaagacatgttcatgatatacttttaagaaaagagcattgcatggccagatgcggtagctcatccctgtaataccagcagcattttgggaggcggaggtgggtgaatcacttgagcccaggagttcgagaccaggctgggaaacatggcgaaaccctgtctttacaaaaaatataaaaattagccaggtgtgatggtgcacacctgtaatcccagctactcgaaaagctggggctgagaatcgattgagcctgagaagttgaggctgcagtgagtcgttggtggcaccactgcatatatacaatgatatatgtatatatccagatacatatatacatatattgttagaaaagatacaacaagggctaacgcaatagttggatttgagggatgctttgttttcttttctgtttttcttgttttgtgattttatttgtttcttttgcttgactggcttttctatatatgctaatagcctgtatttacgagtagccattaagcattaggcatatagccttctatttacttctgcaagtaagtcctctaaagatgagggaacccagaaaggttaggcaacttacccagtccagcatcataaaatcgagaatccatctgagtcagcttgcctccagacccaacttcatcatcttctgtgggacaggctaggttaacccaaaggtggtgcggtgggagacttcaggccaccctgaaggcctctggatgccctaggatgactctgagcacaaacagatacggggcttaggtatgcattgctaattccaaattctataggctactaatacatgctctttcctggtcaggtttggtccagagcctgggctgggccaaacctgcaggtgaaactttctagtgcctgctcaagttggacaaattggkccaggactctcagcctactctcctgcacacagccagccccagcactgcccagcaacacctgcctsttcatttgttgacatacacattgccaaagtgtgatcaatatgtcaatattatttttttattttgctttttttctccttaattatgaatactttaattctgagcactgatacaggtattaacatgcctcagccgggcacggtggctcacgcctgtaatcccagcactttgggaggccgaggcgggtggatcacttgaggtcgggagtttgagaccagcctgcccaacatggtgaaaccttatctctactaaaaacacaaaaattagccagggatggtggtgggcacctgtaatcccagctacttgggaggctgaggcaggagaatcacttgaacccgggaggcagagtttgcagtgagctgagatcgtgccactgcaatccagcctgggtgataagagtgaactgcatctcaaaaaaaaaaaaaaaaagaaaaaaggaaatgcctctaccctgtgaaaaacttcttataacttcttcctatgcttttattttggttgtttatttttagactgataagcctagaagtttggaaatagagggcatccaggtgactattcattttccgtctgagacgaagatggcttttgtacctctccccagaggtctgaatgaggaagaatcaggcaactcaattgtatgcaagatccatcatgaagtacaattctcaaccttggctgagtgttggactcacctgggacttttaaaacctgttgatgcctgagtccactctcagagattctgatttaattggtatggggtgtagacttggcattgggggattttttaagctctccaggtgattctaatgcattgcaaagtgataattatttcctagaacctgccctacctttcctcattcccttccctcacaatccaaggagacaaaattggtttggagaaaataatttttcttattgattagcccttccctaagckaagcagtgtggattaaggtactcagggttctcagtggcccactgagaaagcagtcctcagaggagtcccgcccattctgactctscctttccctttttattcagtatggtattgtgctggatgccgggtcttcaagaaccacagtctacgtgtatcaatggccagcagaaaaagagaataataccggagtggtcagtcaaaccttcaaatgtagtgtgaaaggtaaggactgaagtgtgtctgggagtcacaatgggcagcaaggtagagttctaagtgttttggaggcctggagaggtcctgagatgttgcttggaggcagggaatgagcattggactgggagtcaggaaataggagatcgtgtgctagtgctgctactcatcagtggaataaacttgctctagtcacttcccttctctgggcctcagtgttttatctgtatacatggaaaggggtggcgtcaagaactgtgaatggtctgagattttaccctgccatattttcatgggtgctggaagacacaagactcctgggtcagaaataaaggacaatttgttactcacaggagtagcccagagtatcagcattttcttatactggttctgattcccaatttgcccaggatgatggaaagacggacagatagtatgcactcatgcaataggttctgtcataggaaaggaaatctgggattttagggaagcatttataatgggcagtgagcatgcctgccttttgctgtggagggaaacacaagggacacatggatagctgtcttccagcagtgataaggagtagtcctgtgtattgatggcgaggcagacagagaatgacaatatgtaaacaaatggacatggctctgttccagtaaagctttatttatggacactgaaattttgaatttcatataattctcatatcatgaaatgtaattcttcctgtaaattttttcccaccattaaaaaatgtaaaaactctcttagctcacaggctgtacaaaaaaaaggtggtatactggatttggcccatggggtgccaacccctgaaatggagtattatcagcaatgataattaatgatccgccatgcagctccctgtcttttccacaacatattctgagttttatattaactgtttccttgttctttatagttttgtcttatgtatgtagtgtttctgttttttaaaacaaaattaaacatgtatttatataaatggaatcaacatattttatgccgtatttgctttgttcactaacaacattgggtttttaagattcatctgcactgatatgagtaactatcttgttcatttcctttcctttttttttttcttttttttttttttttttttgagacagagtctcactctgttgcccaggctggagtgcagtggcataatcttggctcactgcaatctctgcctcctgggttcaagcgattctcctgcctccacctcccaagtagccgggattacaggtgcctgccaccacgcctggctaatttttgtatttttagtatagatggggtttcaccatgttggccaggctggcttcgaactcctgacctcaagtgatccacctgcctcggcctcccaaagtgctgggattacaggtgtgagccaccgtgctcggcctcatttttccttgttgaygggcatttgtattttcttggttattaataaaacttaatatctttccatatatttataggcatttctgttttctgtgaaatgcatgttcatgtcttttgttcatttttctattgaattgttgaatttttcttactaattcattgaaattctttataaatattctaaatatgaattctttgccattattattatcatattattgctaataccgtctcacagtttgtagtttgtctttttagtttctttgcgatgtgtcttgatgaaaagaagttcttgattcttatgtaaatacaaccatcaatattcctttttgtggcttgctcttttgtatgttttatttaagaaatccttttctatcttgaggtcatacagacctttttctatgaaaagtgttataattttgccttttacaattaagtaattagtccaagtaattgagcctagttagggagtgtgtatatgtgtaagcctttttcaaagccacttatcttcctcgttcgagcattaggatcttcagttggcctgtagcctcccaaccagggtgttctgaatgtgcccagtgtatccttgagcccacaggacaacaggttagagactccagacctgtcctcccagccygagcagcctcctttgtttccctccgtgagctgccaaaacattgtaagttcatggggatcatggcattgaaaaacttggaaagcagagttagtctttctcaccgggagaccaagagtcttctttggctaatcagagtgaattctgatcatctgccctccgaggagggcagccaggagcttgcctaccctgatgcacaggtgttccaggttaggctctccagaagcagatgtagagacagattatggagtgcaaggtggttattagagatgcactattatagcagaaagtgggcagagagaagtactggacaaaaaaagagaagtcaaacttcaactcaggcctgatgaagcttcagctgatccgttatgctgcactgggttgaaatggtgtaaagtggcttggctgtaataccccctgttgctgccactctkggatgtttgccaccctggaaagagcaagatcttgagcaaggcagctctctgcagctcaggcagaccctgaagaagctgacagctgggacaataagtctatttgaaggggtatattgcacggcacggttttggattcaccacataagggacttggatattttcctttaatttttttttttttttttgagatagggtctcattctgtctcccaggctggagtgcagtggcacaatcatggctcgctgcagcctaracttcctgggttcaagcagtcttcctatctcagcctcctgagtagctgggactacagacattgccaccacatctggctaattttattttttgtagagatggggtctcactatgttgcccaggctggtcttgaacttctgggctcaagccatcctcctgcctcagcctcccaaagtgctgagattacaggtgtgagccactgcacccagcggatattttctgagtattgcttgcttgttatccacaagatgcaggcagctgtagccttgctctgacctcaaccagcgatcctctatctgctcaggtaatgcctgagccatttcctcaccttcaaccatgaaatagggcagcaggctgctcctttcaaagacagagactatgtgctccaaggaaagagaagatagtgtaggatcgagattgagacttcacctcatccctactgtgtgaaccctggaaagttatctaacctgagtcttgacttcctcatctctaaagtaaaaaacataataatagttatacctaccctacaggagtgatttgaagactaaatgacataatgttgtaaaagaaatgcctggcatacagtaagtgctcaataagcattaactgttattcatggggcaccacaatcagagctcctggtggatcctcttgccacttgttactctgtcccacagttacaagatctctgtctttagacccaggagggcaattcaaccaagttagtcctgatggccttacaactgtggggaaaaataagacttacatggggaggtgttatggcagtccctcaggggaagggttccttggcccaccctggatggcatatgtgatttgaggaggcacagagtcatggaggccacagcatatccataaatggatcttcccttctttgatcacagtagcctcagggatctatatatactctgaatgaacagaagaccacaaactaaagctcaaattacagagttgaaggtcagcaagtgtcatcccctcaaaggcttgtggcttctccaaggataatttgggtttctgcttcctccattgcaaacttcccaggactcccctgtcttggccaaacagaagggggtgatgaatgcttgctcacccagcagggattcccagatgcctaggccctcagaaatttctttctggttggtatcaacccccagttgctactgttttccatgagttcattgcctttgctggcggtttctgtgctggtgtctgtacctctggctgcttgtggtgaagccacctcctggaggtgctgggttctctgcatgcgtctcatctcatctgcagtactcatgcctgctgctgcctttccccacaagggacattcataatgtctttcctttaaaccagtgactaaaaattacttaagctccactagagcctaaacttaactatctcctccattaaaatccctcaaagagttgcatcagaaaccaggccaccatagtattaaaaaaacatcctttgcctctgggtgcagtggctcatgcctgtaatcccagcactttgggaggtgaggcgggtggatcacctgaggcaaagagtttgagaccagcctggccaacatgatgaaactccatctctactaagaatacaaaaattagccgggcttggtggtgggcgcctataatcccagcttctcgggaggctgaggcaggagaattgcttgaacccagaaggcagaagttgcagtgagtggaaatcatgccactgcactccagcctgggtgacagagcgagacttcatttcaaaaaaaaaaaatcatttgccaatagttggccggagctcaagctgaggtgcgtgtctttggcttctgtttcccctcaagtaagttttgtgccgtctgtttaaccctctctccccatattgaaatagcaatttcagtgctcctctcatgggaccaagtatccaagtccaagcagcttagaagcctgtgaatcctatctccttttccctctagaaggcttaatggaccttatgcaaacaggctgtctggtgacatactcccaaggtttcaccattctatctcgcctctcaccagccgctaaccagagaccagctccttgcagattatattttgtttatcccagattggactagccaatctccttactacagagatgtatagtggtttgaaagtctcattgattgattgatttaataaatatgtattaggtgcctgctgtttgatacgaactgttcttggcaccaggaattcagaaataaacaatatatacaaaatctgtggttatgtgttatgagacttgcattccaatgaggaagatagacaaaaaaataaacgggcatataacgagtgtcaggcagacatgatgtgaagagaaatcaggcagggcaggaaaaagagagtgatcatgctgttttgaacaggattgtcagggaagtatgaagaatatgacagctaggcagagacaaaagtgatatgagacaatgggccatgtaaatgtgtgggggaagaacatgctgagcagaggcatggcaagggaaaaggccaagcatggaagctgctcagcattttccaggaaaagccaaggggccagtgtggctggaagaaagatgagaaatgagactgaagctagagccaaggcctgctccttggagggacttgaggtgtcctaagggtttgactgtgacacaaatgaagtttcttcaaagtatattgggaagccattagaagattctaactagggaactaatacgatatgacttctgtttttaacggatcactcagttgatatagaacacgtagtcaggggctaagattggaagcaaggacaccagttaagtgctgttaaatcagtacgggtgagagattaggtgatggtcaatttgcccttgactagtgcttctcaacacaaggtgaatttgtctcccgggaaacattttgcaatgtctggagatcttttcgattgtcatgactgggtccgtggtgctactagcatctagtgtatagaagacatttctcatctttcttccagccacactggccccttggcttttcctagaaaatgctgagcagcttccacacttggccttttcccttgccattctacaatgttctaagcattgtacaatgcacagaacagcctccacaacaaagaattatctaccccaaaatgtcagtagcaccaargttaagaaaccttggtttacgatggttctggggaagggggtgagaagtgcttagatttgcgaggtattttgaaggtaggaccaacatgattttatgatggacttgatgtgaggcatctgagttcataatgcatgagcaagagtttggatatgagcaactgtgtgcatcacaacaccatttactgagattggggaacactgggagtggagcatattgggggcagggcaaagcttaaagagtttggttttgggcatattaagttggagatggctataaatcatctgagtcaggggaggcaaactttttctgtaaagagctacacgataaatattttagacttgtgggtcatatggtctctgtcgtaactgctcaactctgcccctttagcatgaaaacagccatagacaacaggtagatgaattagcatgtttgcatttcaaaaaaaaaaaactttacttgtggacactgacattttaatttcttataattttcatatgtcatgaaatgctgttcttcattttatttttttccaactacttgaaaatataaaaattattcttcacttgcaatccatacaaaaacaggtatggggtcaaatagcttgctcattcctgatctatacagtgatgtggagttgtcagataggcaagtcgggagttcgggggagggggaggatgaagaaataaagctgagtgtcatcagaatacagacgatatccagccccagctcatctaaggagtgaatagatactgaagaaaagagatctgaggacttagccttacacactccagtactgagaggttggggagaggaagaggatccagcaaaagaacttaggaggaatgacagccagtgaggggagaagaaggtcagaacccaaatccaaggtagttgaagaaagaggaagtgcgcaattaggtgaaaagtgatggggagcttataatctaagaagtcagacagacatgatatgcccccagtgcggtgatgtacactaggaaaaacctagcacacctaggaagtgctcttgccaaaaaatcaaatctgaatctgatcacatttctagaaattaactcccagtttataaaaaacacagaagacaaaggaacatgttcaaggacacctcacggatccaatcagcgaaatccaaaataagagacctactccattaaaatgatttctttaataaataaatggcaagataaaaggggggcaggaaaactgttacagaatgagaatcttaaaaaacatccaaatgcacatacaaggtatggactttggtttctgcatcacactataaagaaaaagttattctgggaaatttgaacactgacaggtctttaataatattaagaacttttttaggagtgatttttttcttaggtatcatggttatatttttcagagttcttccctcttaaaaacatatactaaagtgtttgtagatgaattaacataatgcctgggattttctttacaataattcctagagatggaaaaaagaaagcatataaatgaaaataagatgggctgtgtattgattaactgttgaagctgaatgatcagtatatggggattcatttcactagtttcacagtaaagaattaagactaatgtgagcactgacctgtgatgttcagcatagttttgttgtttttgttggctttattggcattttggagagaaaaacctgttaactaacctatctcataggaatatgcctgagagcttaatctcacattttatttactgagagaattgtgtgtctttttaaaaataactttctaattacaaaataatatattttcattgtgtgaaaatcagaaaacacaggtaaataaaatggaaccaggcacaatggtgtgcacctatattcccagctactcaggaggctaaggcagaaggatcacttgagcctaggagtttgagaccagcctgggcaacatagcaagaccccatctttatttaaaagtagaaaaggaagtaagatcatccataatccttcccaccagaggggaacatttttctttttttaggattaatatatttttatattaaaaattattcatacaggctgggtgcagtggctcactcctgtaatcccagcactttgggaggccaagtggatcagctgaagtcaggagtttgagaccagcctggccaacatggtgaaaccccatctctactaaaaatacaaaattagccgggtmtgttggtgcatacctgtagtcccagctactcgggaggctgaggcaggagaatcacttgaacctgggaggcggaggctgtagtgagccgagatcatgccattgcactccagcctggacaacaagagcaaaaactccgtctaaaaaaaaaattatatatacatacgtatataaacatatatatttatttaattgttgttattgttattagtgtttcttacagctacttcagttctgaactcctgagatcaagccactgagttcatcaagcccacggcttatggtgctgtcatttgtctgttgtaggaggtcattgccccaggagggaaaattacattagaggctctgtccttggccaaggttgagaaagcctgtccttgcttctctagcactgtcgatgaaatccacgtctgtgcatcttaatggacacatccaagcaaaacttgtaattacaatgctcaggtttttttattggtttgtggtagttggaagatgggtgggaaaggttaagaaagggcagctgaaggaggcagtggctctatcaattccaaagaaggaagtttccagagggaccatattctctccatcttccttgtctgtcctatactttgtcttccttaaagtagacttatttaaactcagagcctggactgggagaacaaattaagttatgttcatgcaatggcatgcaatgcaactgtaaaaagaaatgaagaatatttatatactgctatggagtggccactaggaagtattgttgaatgcaaagaaaaaaaaagtggagaaaagtatatatagtaaattaccatttatctaaaagttggggtgattaaaaatatatatttgcttattttaaacaaacattggttaaactttttttaaaaaagaaactacttacaggaagaggagacaaggagagaatctagatgtctctgaatatacctagttttgtagatctaattttagaactacttaattattttagtaactataaaacaaaatcgttttttaaaaagtaattcctaaaactcaaaagtaaaatgcaacaggccagtcatggtgtctcacacctgtaatcccagcactttgggaggctgaagcgggtggatcacttgaggccaggagttcgagaccagcctggccaacatggcaaaactctgtctctacaaaaaatacaaaaattagccaggcacggtggcacgtgcctgtaatcccagctacttcggaggctgaggcacaagaatcgcttgaatctggcagacagaggttgtagtgagccgagatcacaccaactgcactgcagtctgggtgacacagtgagactccatctcagaaaaaaaaaaaaaaagagaaaaagatatcactatttgcaacccctaatgaaataatggagctaaaccattatcattgatgataacagcacaaaaagagaaacaaccagatactgtgcctcctattgtaagtccacactaatccctatatattttttttaaatttcaaacctgatctgatcaagcctctacattcagttaaccatttatagaaatacaagggaccaagtaagatgttaattgaactatgagggtacaatcgacaaactctagactgtggaaattcttcaggacgaagaaattgcaagtaaaatttttaataattaggagaaaaatagaaagggaaggcagaactaatagacagaaagagacttaagattgcactgtaccgaatttattgggatcctgactcatacaaatgagaagagggtgatggatgaaggaagaaggagggaygaagaggaggagtaggaagagaaagagacacagaggatgagaatgagaacgaatatggaggcaatgggaaccatgactggatagttaatgatattaagaaattatttttttggcaaggcatggtggctcatgcctgtaatcccagcactgtgggaggtcgaggcaggtggatcacctgaggtcaggagttcgagaccagcctggacaacatggtgaaaccgtgtctctataaaaaaaccaaaaattagccaggcgtggtggtgcacgcctgtaattccagctactcatgaaactgaggcaggagaatcacttgaacctgggaggtggaggttgtagtgagccgagatcgtgccactgtactccaggctgggcgacagaacaagactctgtctcagaaaaaaaaaaaaagaaaaaaagaaaagaaaaagaaattatttttaatttgtacaggtrtaataattcaactgtagttagggctttttcaaagaatgtttactttttgtgacacatactgaaatatgggaattaaatgacacatctgcattttgctttgtgggaagcaagtggaagattgtatggatgaaataagagtcgatcattgttgaagctgggagatagatgcatgagtttcaatatactattctctctacttttatttatatttgaaatttttataatgaaaacatttttttaaagtaggccctggcttactttttatacaattgtaattcattcttttagaggttgcaagtatactgatcagtgtgaccatacgggacttaccacatccagctgttttcgaccccctaccaaaccccaataattttcaaagccaatttgttttttatttaaaagttgtatcactgcgattggttcctggaaatgctgacagatgctgactgcttgcttttcaggctctggaatctccagctatggaaataacccccaagatgtccccagagcctttgaggagtgtatgcaaaaagtcaaggggcaggttccatcccacctccacggatccacccccattcacctgggagccacggctgggatgcgcttgctgaggtaaaggctaagtggcacaaaggagcccatttgaccaaaataaccaagaatatgttgaatcttgccaagaatgtaactctatttctgggaacaaccctcgccccccaaaaagaagcccacattctgccataaatttgggctttaaaggttgggaarcttttagtttttattttaatacccagaaagaaacagttctaaaattgtttccctctcccttggtgattttactgagaactttgaaaaagagagaggtcatatgaaatctgctcatgggatataactctagttctttgaaaagtagttgttttgacagttggcatttgacacctgtgaacaaccagctaagtttggtagtaagtacaacccatagctatgtagcttccgcttgtgtacaaaataccactgaaatctgctttaaaacaatggcatgtctgcacctcaaatcagtcaaagcttttggagttgttatgaaacaagcatctaatttcactcactcaaattagttccttctaaatttgtagtcatggcttttagcccagttgcattgtttttgaatgtcttttctcttttttctccattatagcatttccttgaccttgaaatttcaaaaaaaaattccaaaaagaaacaccaaacttaaatctactcagagtaaaggctactactccaagtgttggaataaggttttatcacaagaaaacaacactcattctgcttcagagccactttatctacgattccaagcacgcaaaattatctatgtctgagcattaataaaaaaagaacaaacagagctcctttaacatgataatgaaaagaaatcatgatgtgctctccattagactgggccttttccttatagtctcataattcttgtttctaatctgatttcctggttgaccacattgaatgtggaaggaagtcagatttctctgctcactcttggaatctgcagtgtatttccaaattatttcatttacgtgtaatagaaatgatctaaaaactccttccttttgctttttctttcttataaaaacagttcttccaaaaaggatggaactgaaaccatgtaatctcagagaacacagaaaggcagcccctttacaggctattaattccatggacctaaaatcctcatctgctatagtggatgcttccttaacacgacatgtgtggagctacttatagaaaagccagctgcaggatgtgctcatgaagttttcaatttggagactgaatgcttagagcttagtttgtgaaatccttctgctttcagtctattcaattcccattttcagactgaatttcctatttcagaatacattaggatgctgtttactctccctgggacttgacttcaggtaataagtttcagaacaggacctgagcaataccaacaatatgaatgtgataagtgactacaatcagggagaaatactggttcaattccattaaatgtctgtaaaagttactctaaaatatctttgctttaccagtagtgtttgtacatatgtaaacttcttggttgaactggctctgaacttatgacttaagtagacttctagtactctaaaaacaaaaacaaaacaaacaaacaaacaaaacagctcttaagaaactgactttttcttggttgcttcccctccctcccccagtctttcagtgagaaataattaaaaggctctgcaatttacagctcatgacaaaaaccatggaacagaaagctcacctcttaggaaaaaatgaatgtctcctttgaataaattaagtactaactctttcttgtaaaactgttttctaatgatgatctatttcttctgagaaactagctgatattttaattactagacaagtaaaatagaaaagaaaacaattaatgagaattagctgggatgagaattgatgaaactgggaaaactctgaattattttccaagmagtgataattggccacggaattggaatggatcctgcttatagccttgctctttcttcttcctgagccaagagtcagccagtgcccctggctttctacccatggatgaaagatgaaataatctcccaagtgagctttctttcatagggtaaaatggcagcagatggacgccataacattctgtcaccagggatagaatgctgtgttgccactcctctaagagtcagcacaccaatggtttttcaatccagtgacagccatgatgactgtcatatcccttcatgctgaagccctcccaaagagtgaagcaaaaacagctaaaaactcaatgttcttcctttcccccttcctactaagctccctttccgtctggtcagatgagggttccttcatatggtgcctccaagagattatttatgccactcttatgacttcatcaatcccctttcctctgctgatctaagacagagcaatggcagttaaataggaggctcttttgatacatgaacagatgagatgggtggggagaacaaattgtacttatgctgaaagcaattttcctgcttggcagtttgacaggtaacaagtgcatcctgccttcacagttgccccagaaggcttcaacttgcaaaagggattgtggtgtacagcacacatctggaaaatcattcatccccaccagcagggagacggtgaagtttgcattttcacctgagtgagactatgtatttwaagactgtattgtctgggcactcagacttgtttgttctgtgccttgtacaggttgcaaaatgaaacagcagctaatgaagtccttgaaagcatccaaagctacttcaagtcccagccctttgactttaggggtgctcaaatcatttctgggcaagaagaaggggtatatggatggattacagccaactatttaatgggaaatttcctggaggtgtgtgcaaacaaatgcatggtttttaatcttactgtttatcctatcccctgtgagtgatagcctaagtagaggtacatgccatcagggatatctgccctgtatcactcctaccatgtaacgcattagggaaatacctatgagacaatagctaagaaagacatatatagctggggagaaaacatggtcataaacaggactaaatgctagggagggagggaatcttgtcactttactagcttgtaagaaattgaagggggtgggatctaaatttaacactaggctatgggtctttgggagggcagttgaagaataacccttcagagaggctccatgaccatctgaaatgtacaaagccctcaggaagtctgtatccctaagtccccagagacaggaggaggtcttcactctgtgttcccaggtctcctcacagtccaatccctgcactccctgctcccttggtgcagaggaaagttgactccaagagacaactgccatgttacagggggcacaaaacaggagttactcagagcatatccagcccaagacctattttgttcaccttcaaatgtattttaaatttttaaataattaccaacaattaacatttgggaaatttcacataaaaatccatacttctagcttcttctgacctcctcactcctcccaaaaatcggaggaactggtcacagtagactcacattcctgcacggtaacaggaacagagtgtaaatcatggactctccagtttgccacagacccaccagtccctattatacacctaatctacttcactcatttattacttacctatgttacctgcccagttcctgtaagcattttaattcaccacctctaaaagaaaaggaaagaattggcctcacatgctccctctgtcctacttcttagtaataggagacgaggcttgggtggagaactctgggcaaasagagatggtgcctttggctttctttctcacttccttttcccactgtgcagaagaacctgtggcacatgtgggtgcacccgcatggagtggaaaccacgggtgccctggacttaggtggtgcctccacccaaatatccttcgtggcaggagagaagatggatctgaacaccagcgacatcatgcaggtgtccctgtatggctacgtatacacgctctacacacacagcttccagtgctatggccrgaatgaggctgagaagaagtttctggcaatgctcctgcaggtacttgagtcgggggtagggggtggcaggtgttctcttgagggtttgagctgaggggagaatgccctgccttctggggtctgtcctctccacttcaattgaaaggtagatggaaataacagcattttccaatttactcctgggggtccaagtccctttcctctctgtctctttcttcccctccgtctccctctcatgttgcccacttccagtaaatttgagtaagaagtctagggaagttccagagcttcagttgttttgtaaatgactcaagacctggaatccctttatggacacaaactgttttaaaccaggagctaaataagcctgagaattttgagactcccctgggtgtagacaaaataatattagtggtcacaagagaaatgtgtgctgaagggggagagggcagagcccttcccaggctcagcctccttttagatgggtctatattaggcagacttgatacccttatayggcagaactttagagcaaccacattccatcatgttgatcagtaattcatttgataagtgttccagggcccagaaggctaattcaggcatcagctagaaagctattgctaatattaaactcaacattatgcagtgtgtgttcatgagggcactaactccacaggtgagaccccagacccaaacaccagtgctcaggggacatcaatcttagccatggctgggtggctgagaggatgggccttgactgcctagaggggtatgaggaaatcagaagccacagatcctggcttcttatgggactcaaaggcaggggaatcagcctatgaacaaaatggacacaacttcagtaggttaacccacgttcgtccaacctactctgataactgaagacaggaacagactctatcctgcagaggagttgaagggatcacaaaagtgcatcttcagcaggactcacaacttcagacccctgcatttacccagtgttcatgcagggtaggttgtgggaactcagcttccagttctggcccctcccccaaacatctccccaatcctcccagaaatggctgaggccccaggacacatgcatgggacatttattgtcaggagagtctgagcactgcctggaaaggacagatgtgagaaccctgcagacagccctcaactacccttctgtagtaatccatgctcacactactataaagaaatacctgaaactgggtaatttataaagaaaagaggtttgtttaattggttcatggttctgtgagctgtacaggtttctgcttctagggaggcttcaggaaacttaaaatcatagtagaaggcgaagcggaagcaagcccttcttacatgggggaataggaggaagagagagagtgaagcggaaggtgccatacaattttaaacaaccagatctcctgacaactcactcactatcatgagaacagcaagggggaaatccacccccatgccccaatcacctcccaccaggcccctcctccaacactgggattacaattttacatgagacaaagccaaaccatgtcaccttccatggctcccatcccaacttccacctccctgcccagtcagccaaaccaaaccctacaggtaactcaatcaaccctccctatcaggggatctcaatactcaccactcatccccacttgctcatcaaagtagttcaaccaacatgcttctttctttctgggagagaagctctggaaaatcctcttttctccagctccttttacctctagcaatgcctaatgtcctttgctccagctctgaccctagcaggggtagaatgtggaggctcaggtgaaatcctcctttttccagggtgagtgaggatcagagaggctaatcttttaaatttggctggccctatggaatgtgtgtgtttctgtctgtctgcgtgcctctgtgtgtttttgtactcatacaatgtttactaaagaatgattatctatgtatccagcagtccacrgagaagaagtaaatacttcacctttctgaggtctgatttaggcttgagaatgccagtctccaaatgtgagcccagcactggccatggagaagtgagcacccagcctctcacagtcagctcacagggacagggacacatgtcttcaatttgcatggtaacctctagatgcctgatagggtggctctgccctcagaggcttctgactcatgcaagaggagagacccagatgagatgaggattactgacaaattcatgtcaagactcacctgaccaacagtttcataggtcaaatatgtattgccaagccctgacttggaaggttcacacaaattattgcattgtaaacactgactgagtaaattccatcagtctggatcttgtttcctcatctgtaatataaggaactacgtagtgtggtgagaatgatagctggatatgtactttgcaagttactttcttatcaataagtctccagtcaccttagagctgaagtctcactctgacaacatgttagatattaggaatgtgcattcactttctatctttccctttttaagtaagaaatttttcttctgtttttaatgtaatatatgttcagtgaaaaacatttaggagatgcacaccaaaaactataaaggatttatttaaaaacagaattaaccactattaacayactattgcattttcttccattttttaaatgtatgaatgtgtaaaaacttggcttcatatggtatatataattttatatttaccttttattttacctaaccatatattatgatcattttcctgtgttgttaatgtccttttaaaatacgattttttatgagagcataatattccaagtgccataacttaaaaagaaaaaaaattgaccattcgattatgaaagaaagtacattcttattgtaaaaatttaaaaccatagaaagagtgttaaagtcaaaatgaaagatcctccttccaatcccatttactgaatgccatcactggtcaaagcttaatatgttgttcttctacactttccaggtcagtatattaacttattttctttactatttactatcccataatttatcaatcataccctccctcatggacatcaggctatgtcctgttttgttgctacaacaataatataataagccttcttactcatataatcttagcgattttatttctgtaggacaggttcaaaggacaggtgtatttttttatttaaatgaacaaataggtaatcttccaacaaaattagaaccattcagattaccacccatgttgtgatgactttttgaaataagcttcaggaattccaaaacattctaataataagtacttagataatgaggatctgtttctggattttctgttctatacattcatttttctattttggggccaatatcatgttgttctacttgcaaaagtctatttttctactctcagaggtttattttgaacttcaaagtcatttgaagcagtaacaaaaaaggaagttttttgttgagattgtgattgcaatcacattgattcatatattaatttggttaaaatgtgcttattagtgacatcaacaatttctatccagaattatacaatgtatttccatttatttaattcttggcttgtatccttcaataaaatgtatagttttcatcattggttctgtacctctgttgttaaatgtattttctttgtgtatattttttaagctttctatcactatcaagaatagtttctatcattgttttttccagttttaaccagttttactctaagatcagattatgctgtagttttctagtggacttttctccctcgagcccattgactgactttttcatgacagtgccctgcaaacactaagctcggtgaagactgttgaatgttgaatgcctgaacttggcacattggcaaattatacttaaagaatgccataacaaaaattcaaacacacaaaaaaagaaaagaactaatacttactaagcttttcctatgtactaagtcagaaataatttatgttatcttgtttcttctctgggccaagccagaaataatttatagttttaatcattttaaaagtataaatctcccttcagactatactagaaaagaaaaaaagtacaaatcagatttggaagtagatactaaatagccaattgattagtttgatttttttttcttttttctttttttctttttttttttggagatggagtcttgctctgtcacccaggctggagtgcagtggtgtgatcttggctcactgcaagctctgcctctcgggttcacgccattctcctacctcagcctcccgagtagctgggactacaggtgcccgccaccatgcccagctaattttttctatttttttttagtagagatggggtttcactgtgttagccaggatggcctcgatctcctgacctcgtgatcygcccgccttggcctcccaaagtgctggaattacacgtgtgagccaccacgcccsgcatattttttctttcaaccaatatttcagccatagggtgacccaagtatgatatgctatagattatatgtaacaatttttgaaaatcatagatttttttcataccatagaggcagaaaggggcctgtttgcctcyttctcagtcatatgaagatttttctggaaaacactcatttgggttatatttgatgaatattaagcttttataggatttttgcagaatcttgtcactgacctttgttaaataattgcattacttgaatatgtacctcagtttcctcatcagtaaaatgaaagggttgggctaaatgtctgagtcaagattttactgtagggtggccaggtgcagtggctcacacctgtaatcctagcactttgggaggctaaggcaggagaatctcttgtgcccaggagtttgagaccaacctgggtaacacagggagaccccacctctacaaaacaaaaaataataataattaattattttaaattttttttttttttttgagacggagtcttgctttgtcacccaggctggagtgtaatggtgcaatctcggtttgctgcaacctccgcctcccgggttcaagtggttctcctgcctcagcctcctgagtagctgggactacaggtgcgtgccaccacgcctggctaatttttgtatttttaggaaagacggggtttcaccatgttgcccaggctggtctcaaactcctgacctcaaatgatctgcctgcctcagcctcctaaagtgctgggattacagatgtgagccatcacacccagccaaaagaaaagattttactgtaggggaagcagtatgccttagtggcttaagttgaacatagttcaaatccaattccttagaaaagagagttcataaattgaatcaacaacattcaggactttagcataaaatagagtattttgcaccagtagattaaagattgaatagtcatatggaaaaagtaaagccaagtctctgagtctttaaatcaaataaatttcaatggataaaagatttatatgtgacaagkatatttgtttgtaatggcaaaatgattgggaaccacctcaatgttcatctagatgatattccttaaataaagtatggtttatttgtacagtggaatactatgcagctactaaaaaaataggccactgtataagtacaatgaatggaaagatctcaaagatatataattttaagtgagaaaagcaacgggtagaatggggtatataaagtgctaccatttatggctttaaaaaaagaaaagcatgggasaaaatatatatatttgcatgtgcatgccagatctttggaaggatacacaaaaactggcaatagtgattgtttccagaaaaaggcctgatggctgcaagtggatgagaaggagacttcactttcatatgtttatttgtaccttttggattattttgctagrtggatgggtgatattctacttaaaatgatacattatatatatccattttctcaccaagtgaagttcataaaacctggttcatagggctatcataagagctggatcagataatgtgagagagagcctagcgctatgcctggtacgaggtaattgtcacacacacacacacacacacacacccttttcccacccctacttgaattatctagacaacctgtgatcaaagacatgctgacacagaatggtattttttgtttctctcttggcattggagggtagtgatagaatttgcaaaagggaaatacttggctctccacaaaaaaagtggtttctaataccttactctttttttttttttttacttagagattttattattattattattattatactttaagttttagggtacatgtgcacaatgtgcaggttagttacatatgtatacatgtaccatgctggtgtgctgcacccattaactcgtcatttagcattaggtatatctcctaatgctatccttcccccctcccccmaccccacaacagtccccagagtgtgatgttccccttcctgtgtccatgtgttctcattgttcaattcccatctatgagtgagaacatgtggtgtttggttttttgtccttgcgatagtttactgagaatgatgattttcaatttcatccatgtccctacaaaggacatgaactcatcatgttttatggcttcatagtattccatggtgtatatgtgccatattttcttaatccagtctatcactattggacatttgggttgattccaagtctttgctattgtgaatagtgccgcaataaacatacgtgtctaacaccttactcttatacctacagaattctcctaccaaaaaccatctcaccaatccctgttaccctcgggattatagcatcagcttcaccatgggccatgtatttgatagcctgtgcactgtggaccagaggccagaaagttataaccccaaygatgtcatcacttttgaaggaactggggacccatctctgtgtaaggagaaggtggcttccatatttgacttcaaagcttgccatgatcaagaaacctgttcttttgatggggtttatcagccaaagattaaagggccatttgtggtaagagcaaaaccttctgaaagattcctttccccattgaatattcatttctcacttttctgtttctcctctgctgacttgttagccaccttcttattcctcacccataaacctttctattataccccattctgagaactaattttcttctgtattacttatttccaggcttttgcaggattctactacacagccagtgctttaaatctttcaggtagcttttccctggacaccttcaactccagcacctggaatttctgctcacagaattggagtcaggtcagtatttaaagagaagsgatcaatgtcagtacaaaaaaatatggtagaatctattctatgtgtgtgtattctgaatttagcctttatgctcttctatttccatcacatctgtaaaataaaaggaataagggaatctactcccacacctgtggtgtgaattaatgttataactacatgcacaatggttagaacaatatttggcatataataagcactcaatgagtttaaagattagtatattgtgatattatatagggatattttcataattatattgtgtgattatatgattgtattataaagtattttctattatgaaattatgggtgataagattctttaaaacatgacttttaacccaaggtgttcattttaaaacatacctgcctgccctgcctctcagatgttttaaacctttcagctcccactgctgctccccaaatttgatgaggtatatgcccgctcttactgcttctcagccaactacatctaccacttgtttgtgaacggttacaaattcacagakgagacttggccccaaatacactttgaaaaagaagtaagttaagcacaaatcattttctcttcttcttcccaacagagaggtttgtatgtgtgtgtggaacaaatgtagaaggtaaaagggtattaatgagttaaactcactgggtggaagctgatcagactgatcccttgtgagtttcccagaagaggtcatggagaatttagaagagttgctcatgggtatacattctcctggaaaagactggaagccaagggccaatggactaggcggtcctggagggcagagacctgtcttggtatcttcatattcccagcactctgcacaaggaatagagcctagaaggtacttagtaaatgttggttgaattcataaataaatatgttaaggatatgagacttttcatcctgaaaagaagctttaaatgtaacagttttttaaagaggatagtaactaattcttctcyattttattcagatatcagagtaagatacaggccttagggcctgatggatttgcattagcattaaataaatattttctctttgaatgaacctgaagtcattatatttactgacaaagatttgggggatggggaagatattcttagctcagggtttaatatatttaaaaatatgtatatttatagatatctataaatacatacatatatatatatgatggtcaagtgaccagaatggtccaaagctggaatcacagctgtcacctggtgacaggtgaaaggacctccataccttgtttttaggcagggctaagccttgtgaatatgttcagccagcactatgttccccaggttccagagaattttctcatttcaggaatagctgatatgaagcctgaaggatgtctggagtcagcctgttcaataccagcttcagcaataattagattaaaccaatcaatatcctgcattaggcctctgactatctacttttacataaataaaattgagtcatctacaaaaaaataaggatgtctggagacataaggactgttggtagcatgtactctctaagctttgcttctaataaatctaattaccagtaaagtatattataagaatggagaatgactttccatttgaatgccagtttgagttgacataatattctaagttaaaagttccctttttttaattataaagaattttgtgtccagccaaattagtatttaaatgtgaagatgtaggctgggcacggtggctcacacctgtaatcccagcgctttgggaggccgaggcaggcggatcacctgaggtcaggagtttgagaccagcctgaccaacatggagaaaccctgtctctactaaaaatacgaaattagctgggcatgttggtgcatgcctgtaatcccagctactcagaggctgaggcaggagaatcacttgcacctgggaggtgaaggttgccrtgagccgagatcacgccattgcactccagcctgggcaacaacagcaaaactccatctcaaaaaataaaaataaaaataaataaataaaaatgtgaaggtgtaaaaagacttgagaagatttgctgcacaraagacttacaatgaaaatatttttggtggaagtaataaaataagaagagaaataaatccaggagatgttacaaaaacactggaagtaagaataaatgatgttgtggcttaaaatttacattaaaaaagccrggtgctgtggctcatgcctgtaattccagcactttgggaggccgaggcaggtgaatcatttgaggtcaggagttcgagaccagcctggccaacatggcaaaaccatgtctctactaaacatacaaaaaattagctgggtatggtggcatgtgcctgtactcccagccactcaggaggctgaggcaggagaattgcttgaaactgggaggtggaggttgcagtgagccgagatctcaccatttcactttagcctgggcgaaagagcaagactctgtctcaaaaaaaaaaaaaaaattatattaaaaaaaacagaaaacgaacactaaagaaaagtatttaaaaaaaactccattcatatgactcaagtatagaaaatatccacatgataagggtgtggtaaggagttataagatacagggacataagagtaacctaaaattctcttcttgtcaaaggaaacacagagatatctttttctttttcttttctttttttttttttttttttgagacggagtctcgctctgtcgcctaggctggagtgcaatggtgtgatcttggctcactgcagcctccgcctcctgggctcaaacaattctcctgcctcagcctcctgagtagctgggattacaggcacccaccatcatgcctggctaatttttgtatttttgtagagacagggtttcaccatgttggccaggctggtcttgaactcctgacctcaggtgatcccgcctcggcctcccaaagtgctgggattataggcgtgagccaccatgactggccacagatatcatttttaaggcaggaaagaagaaaaaatatatatagaaaaatagcactaattgaaaatttaaaagtaagatattagaaagaagtgtaaatatattaataatcacaataattataaatggactaaacctaccagttaaaagagagatgtcaaattgaatttttagaaatcaagcaggtgccatttataagagaaacatggttcaagcataaagacatggaaagatagaaagataattttgttaaattatcaaacactacccaaaagaaagctggtataactatttagtatctggcaaagcagtctttaagaccaagagcctcattctagacacagagggttacaacataatgataaaatgttcaattcactatgaagattgcaaaggtgaaacatttatacacctaataaaacaccctaaaaacatgtaaagcaaaaatagatagaactaccagaataaattgacagtcagcttcccatttgggctgattttctattcttaggaactggtcctgggatcagtaaaccactcattagcctctttctctagccacaaacactcctgtgctcctggacaacaggaacactttcactgttattaactgtgccgtcttcactcttggctgtgacaagattgtgagaatttgttcttttgactatttcttctgcagcgctggaggtgagatttccccaagcctttgtggctacagtgtggtgtcttaayttgggcaagtcctttgacctctttgggccacaatttcccatgggagctttgtgaggttgatagcagtatgactccggtatgtgattgcagccttgagccttgccctgagcgctgagccatctcctctactccacaggtggggaatagcagcatagcctggtctcttggctacatgctcagcctgaccaaccagatcccagctgaaagccctctgatccgtctgcccatagaaccacctgtctttgtgggcaccctcgctttcttcacagyggcagccttgctgtgtctggcatttyttgcatacctgtgttcagcaaccagaagaaagaggcactccgagcatgcctttgaccatgcagtggattctgactgagccttcaaagcagctcctggagtccaatggctgcttagagtcagcctgggtrgcaccaggcaatgcaggtgaagtggctgccttcaggaaatacaactaactaaaatcaaacacctaggtcacgtgcctctcaaatactgatttctgccacagcacctcttgaggcatcccttggctattctgtgcatattgttcttcagagacctcactacccacatgctgatctattggggaacagagaagagacaggccacgaaggtcaggctctttatattaagttccccagaggaagagtaagttgagaaggtatcagtttaatgttgaagaattgacctcagggctcagtttccatttccctccctcagtattcttcctggcaagatacccattaagcatttcgccaatcagaatctcattttatagtttttcccattggtctttaactaagactttcttgtagcaatctcgtaagcagtgaaccccctcagatcagtagaatatagtatctgggggagaagacttacttccttcagggcagcagccacagccaggcttctgtcatacaggtagatcccgaagcacagagacataaaaaaggtctcccagaaaactatagaccattctccaagtggaattcccacttagggctctggtcactagattgcaacctgtgtgtttgtcatcatcctcatctcaccattgtattgctatgccctcccataaaaacacattgatccctagcaagattattgcattccagattttactgcctttgctaggcttttgcttagcaaagggctgactttccattgttatcatggtgtatatatttttgtcaccattcccacaagtatacttgatgttgtcatagaacgaacatcctactctatgatttactaaccaattactttcccagatcatagacctctctgcatagtagtcataggtcttgactttggggaaagaaaaggaagctgcaggaatatttatctccaaagtcgaatgagaaagaactccagcaaatccaatggctacaaactaaaaatcagcattatttcatattgctgtttcttagctgaatatggaataaagaactattattttattttgacttgcaaggggtgtgtgtgtgttaacttccatatggtactctttctcctaaggaccctaggtgatatttatgagagaaatttttttccctagcaaattaagaaacccattcattaatatcacctttattccagagagttcaaagtgcttttactttgataaacctttgactgcttgagattattgagtcaagcatttctgtaccttatttgaaattctaagcctctgtgagtccacaacctgacactcaaatcttggttctcatccagaacggctactcctatcccaaactgtacctttgctcccgccatcctctctactatattatagatcctcctcccacccatccaaatcatgtatgtttctcaaggtccagttccttcatataagtcttccacaaagctttccttgcacacacatactatgctctatctcctggaccactttttcaaaaccagccacgtaagtcctcatattgttatttatcttggcatatgtgtacagcttatttctaaaagacagagtaggctacttaagggcaaagcctattgtacatcactcctcatttattcaacagacatctaaaaacacctattatggctgataccttttacgtgtgattttggatttggacatatgctatgaacatagtatttattcatatttgttgattgaggttgtttccatgagtgactaagaaatgggcaataaactatagagatagcagggaaaaaacagcatccaaatcaccaagagtttgcaagaaaaaaaatttgtatgtgcaagaaagagagccaaagctccatgaaggcaaatcctagtcaacatttctaactcatttgggaagttagaataaactgaggtacttcaggttttctgacacacaccgaagaatttttgactgggtgcagtagctcacacctgtaatctcagccttttgggagtagctgaggcaggagggattccttgagcccagaagttcgagagcagcctgggaaacgtggcaaaacctcttctctccaaaaaatacaaaaattagccagaagttgtgggcacacctggagtcccagctacttgggaggttgaggtaagaggattgcttgagcctgggaggtggaggttgcagtgagccgagatcatgccgctgcactccagcctgggtaacagagcaaaactatctctctctctctctctctctctctctctcacacacacacacacacacacacacacacaagaatttttatagatagaccattgtgaaatctgcagttcaagtggcatatctagcactgttactgtggtgaacagaatactccttccccctctggtgttactccaattatgtggttacattgtcacatggcaaaaggattttgcagatgtaattacaaatcagttgaccttaaaatggagagcttatccaggtaggtctaacctcaccacatgagctctttaaaggcagagcattttctccagaagacgaagtcagagattcaaagcatgagaagaattccacatgcagttgccggcttggggatggagggcgccgtgtgcaaaggccctaagtgcagcctctagaaactaacagcaatccctggctgcatcagcaaaaaaccaggaacctcagccctacagctgcaaggagctggattctgccaacaacctgaatgaacttggaagcatattttcccccagagctttcagataagagtccaggtcagatcatatcttgatttcagcctactgagaccctaagtggagaacccagttgagcccactctgacttctgacctacaaaactataaagtaacaaaaagatgacgtttaaagccactaaatttgtggcaatttgttacacagtcacagtaaactaatacaactatagaaccccaaaccccaaagctccaaccaaagcaagtcttttgatttgaaatatgtgaagataaaagtgatgagtagcacaaatagtgtctattcctaatcacagctatgtaaaaaaagcatgggttcagaggtaaaagtacctgacagcattactcagtcactgagtgatttggggaatagggatcggggcttgagctttgggcctggttgagtctaaaacccattgcataactttgcctttcacacagaaaggcagtatcatatagtagttaggaatttggctttatatttccgtagtctaacatacccattcacatacagacacctgatttataacagaggtgtcacatcagagcagtgggaaaatgcaggacaattggatatcttaatggagaaaaaatgaatttgaccctttcctcactccacttgcaagaaatgtttccaggtagcttaaagacctaagtgtgaaaaacctataaaggtttagaagaaaatgtaggagaatatttttaggatactgggtaagggaagggtttcttaaacactacacaaaaagcattaaccataagaaagtatttaatacattaaaatgtaaaacttctgttcctcaaaaaacatcattaaaagagtgaaaagacaagccacagagtggaagaaggtatttacaacatatataactgataaaggactactttccaaattatatgaacaacacttacaaatcagtaagaaaaaggaagatgattcaatttttctaaacaggcaatagtcttgagaagacacttttcaaaaggagacaactaagtgtctaataaacataggaaaagatgctcaatctcattattgggataatgcaaattaaaactacagagaaatagtacaatatgctcattcgtttggcaaaacttagaagtctgacaataccaaaattagtgaggatgtggaactggaactctcctatactgctgtaggaatgtaaattaatgcaaccactctggaaaatggaggtattgtctaataaagttgaagaaattccagtccaaagtatataccttagcgatatatagtcttagatataccaggatacatgcctaagaatgttttaagcagcaaccaagatgcctatcctacggaataaatgaataaataaatagcgatacagccatactagaaaatactgtacatcaatgaaaacaaaagaactacataatcaaaaggttttttgtttgtttttgttttgttttatttttgttttgagatggagtctcgctctgtcacccatgctggagtgcagtggctcaatcctggctcgctgcaacctccacgtcctgggttcaagcgattctcctgcctcagcctcctgggattacaggcatctgccaccacgcccagctaatttttgtatttttagtagagacagggtttcaccatgttggccaggctggtctcaaactcctgacctcgtgatccccctgcctcggcctcccaaagtgctgggattacaggcgtgagccattgcacctggcctaatacaaaatttaaaaacaggcaaaactaaacacagaaggttaaacgctaaagaaaagcaaggaaattattactttgaaatttgggaggagatggaggctgtatctggaaaaggataaatgggtgtcttaggctgcttgaactgccataataaaatactataaattgagtggcttaaacaacagaaattaatcttctcacagttttggagcctgggaattccaacatcaaggcatcagctgactaattcctggtgagggctcaattcctggcttgcagatggtggcctttatgctgtgtccacacggcctttcctctgagctctcagggagagagagtgagagagagagagagggcactctgggatctcttctgacaagggcattaatcccaccatgagggccactccttcataaccttgtctaaccctagttatctaccctcccaaaggctccatctccaaatcctacactgggggttagggcttcaacatataaatttgggggatcacaaatattcagttcataacaacagggcttctggggtgacagtgttattctacaactaggtagtggttacagatgttccctttttcaaccatttatacatcatctgtatgtcctatactacaatataaagtgacagatctgggttaactcaagaattttctccttattacctctatggttttcatcatatctttcagtctccttgagtcttgacttcctccatatataaaacaggcataatacctacctcatgggatagttaagagaaaatacagcacttagccagtgcctgacatggatgtagctaataaatacaagttttaaaacatatttatttcacccatttacttattcactcatgatactttcaccaaaagtctactgtgcgacaagccctgagctaaatgactaagggtgtaatagaaatgagacaactgtcttttctctcgaaacatgagacttgaatgccctctgttggagctatggaaaaaattcttcccagggtgagcctcccaccctttttttaaacctctctaaaggtattagaaaaaaaaatcattagttcaaaaatagttttaatagtataaaataaggagataattggaaatctgaacactgaacattatcaaggaattcctgttaatttttgtttaggtaaaataatggaaccggcctggcgccatgactcatgcctgtaatcccagtactttgaaaggctgaggcagatggattacttgaggtcaggagttcgagaccagcctggccaacttggtgaaaccccgtctctaccaaaaaatacaaaaattagccaggtgtggtggtgcacacctgtaatcccagcttctcgggaggctgagccaagacaatcacttgaacctaggtggtggaagttgtagtgagccgagatcacgccactgcactccagcctgagcagaagagcaagactctgtctcaaaataagtaaataactaaatgaaataatggtatcttggatttttttttcaagaacccttgctgtttagatcaatggtcctcaacctttttggcaccagaaaccggtttcaagggagacaatgtttccacggacagtgtggggctgggtggggatgcacagatggtttcaggatgaaactgttccacctcagatcatcaggcattagattctcataaggagcaaacctagatccctcacacacgcagttcacaatagggttcgcattgttgctgatctgacaggaggcggagctcagatggtaatgctggtttgcccgctgctcaacacctgctgcgcagcccggttcctaaacaggccacggaccagtactggtctactgcctggctgagggttggggacctctggtttagatacttgctgaactgtttccagatgaaatgatacgtctggcgtatcagtcaaagttcaaccagagaaatagagccagtattaagagatctattgcaaggaattggcttgtgagactatggggctagctaggcaagtcctaaatccacagggcaggccatcaggaagagcaggctggaaccctcaggcatgaactaaagctacagtccacagatagaatttcttccttctcagagaagtcccagttctgctcttatggattttcaactgatttaatcaggctcacccagattatctaggataagtccccttaaaaatctactaattatgggcagtaatcacacccacaaaatactttcacagctacacctagattaacaaataactgggtgctatagtctagccaagttgacacataaaattgaccaccacatctgtgaattgattcaaaattacaggggagggagaatgtaggggtagaactggcccatactttgatggtccttgaggttggggtgatgagacataggagtttattatagtattctatctgctttgtgtatgtttacaattttctaaataaaagttaaaatacatattttgaggccaggcatggaggctcacgcctataatcccagcactttgggaggctgaggcgggcagatcacctgaggtcaggagttcgagaccagcctgaccaacctggagaaaccctgtctctac

SEQ ID NO: 93289 - DNA, 86533 bp, Homo sapiens
caacatgtcaggcctctgttcctggagttccttgaaggaatgtcttacacattctaaatatccttgtagacagcctggcacaggggtagttgtcaagttgtagaattgaactagttgcttcactatgtcagtagccaccccttccagacttcctgcttttctcttttttttttgtttttttgagatgatgtctcactctgtcacccagtctggagtgcagtggccgatctcagctcaccgcaacctctgcctcccaggttcaagcaattctcctgcctcagcctcccaagtagttgggactacaggcacgcaccaccacgcccggctaatttttgtattttagtagagatggggtttcaccatgttagccagactggtctcaatctcctgacctcaggtgattcgcacactttggcctcccaaagggctgggattacaggcgtgagccacagcacccggcctgacttcctgctcttcaaggaaacgttgcacaggatttgttctgggtagggcaggtaattatctagtaccttacttccctcaaattcattcatctcacagatatttcctgagcacattccacatttgcctctcctgctttagcgagtttagaagttcaaccatctcctttctcttaccctctgtgtacagggagtgagctgcttcttttttggccaggtactgagcaaaatttttttttttttgagacggagtcttgctctgtctcccaggctggagtgcagtggcacgatctcggctcactgcaagctccgcctcccggattcacgccattctcctgcctcagcctcctgagtagctgggactacaggcgcctgccaccacacccggctaattttttgtatttttagtagagacagggtttcactatgttagccaggatggtctccatctcctgacctcgtgatctgctggcctcagcttcccaaagtgctgggattacaggcgtgagccaccacgcccagcctagtgtctgtattttttgtagaaatagggtcttgctatgttgtgcaggttggtctcaaactcctaaacccaaaggatctcctgcctcggctttgcagagttctaggattacacgcacaaggcaccatgcccgcccctcttttcttctttttatacttcattttgtaaaatttttccagggtggctgggcacggtagctcatgcctataatcccagcactttgggaggctgaggcagtggatagcttgaggacaggtgttcatggccaacatggcaaaatcccatctgaaatgaaaatacaaaaattagctgggtgtggtggtgcacgcctgtaatcccagctacttgggaagctgaggtacgagaatcacttgaacccaggagtcagaggttgcagagacccaagattgtgccactgcactccagcctgggagacagagtaacactctgtttcaaaaaaaaaaaatttccaaggtggatattatttcacatttcatatttcctgtacaatgtgatttgtccttgaggattttctattttattttctaagtaaagttagttttaataaggactaatgtttattgtgccaaagacaaaattacaacaaatttaacgatctcgactggattccttccttcctgccttccttccttcttttctcctcttccctcccctcccctctcttctcttttttctttctttccctccctccctccctccctcccttcctcccttcctcccttcctttctttctttcgacggagtcttgctctttcacccaggctggagcacagtggcttgatcttggctcactgcaaaccccgcctcctgggttcaagcgattctcctgcctcagcctcccgagtacctgggattacagacgcacaccaccatgcctggctgatttttgtatttttagtcaagacggggttttaccatgttggccaggcttgtcccaaactcctgacctcaggtgattcacccgcctcggcctcccaaagtcctgagattacaggcatgagccaccatgcccggccctgattgggctttttctacaaaaaattcttgtgaaacttttctgcaatattttataataaagtcctactgatttatatttgattttatatttgtaagtcaggtgaaatgagtgaattcttccttgtgtatgaatgtactacatgttgcagaatgtctacctttcctgggctccatccactaaattctcaaagtgcctcctaatcattgtctctattaaagatgccccacaaatttccaaaatgcccctagggtgtgcctgagagccactaccctaggtgcctctcttcaaacacctaggcctcactgcagtggccaataggggcatactaggtggccacaatcacgttcctctgtcccctttgtatagcacttgaaaaagagtttgctaaggcctggtacggtggctcatgcctgtaaccccatcattttaagaagctgagacaagaggatcccttgaggccaggagttcaagaccagcctgggcaacatagagagactccgtctttacaaatatatatatatatttatttatttatttttattttttttggtagaaaaggggtctccagtggccgggcgcagtggctcatgcctgtaatcccagcactttgggaagctgaggcgggcagatcacgaggtcaggagatggagaccatcctggataacacagtgaaaccctgtctctactaaaccccatctctattaaaaatacaaaaaattagccgggcatggtggtgggcacctgtaatcctagctactcgggaatctgaggcaggagaatcgtttgaacccgaggtggatgttgcagtgagccgagacgcgccactgcactccagcctgagtgacagagcaagactctgactcagaaaaacaagcaaacaaaaaaagacagctatatacctagggaagacataaatataagtgaaaagcagaagtacaaaaatagttcggctgacccagcagcaattttgatcccatcccagcaagacctgtcttggagtgtaggtctggctcagatagcaaactccagccctttcacactgacaggtatcatatcacaggctcctaggtctttaggtcccatggagagtgccactcccagttccactgttagttacttctatggtctgtgttcaagtcaaataaagacatttgttcattccatgcacagcacagagtaggtgctcaaaaaagtactttttatacagatgaatgaacaactactaccagttaacctagaacctgtcctttcagctctagtttttaattgtaattttattttattttagagacagggtcttggcacaatcacaattcactgcagctttgacctctcaggctcaattggatcctcccacctcagcctccatagtagctgggactacaggtacatgccaccatgcccaactaatttttgaaatttatttttagagatggggtcttgctatgttgcccaggctggtctcgaattcctgaggtcaagcaatccacctgcctcagcctcccaaggtgctgggattataggcgtgagccatcactcacctctagtttctggcctgagggtatattactctccctgattactgacaccaaaaatgatttcactcttgggtgggacctctgctgccccttacccactagggtgtgggtttttttggtttgtttttgtcttttttaagacagggcctcacactgtcatccaggctggaatgcaatggtgtgatcctggctcactgcagcctcgaccacctgggctcaagggatcctcccaccttagcctcctgagtagctgggaccagaagtgcacaccaccacaccaagctaattttttaactttttatagaaacaggttgcctagactggtatcgaactcctgagctcaagcaatcctcttgccttggtttcccaaagtgctggaattacaggcgtgagccactgagtctgaccttagggtgtggttttaccattggattcatgtgatttaccaatgcttcaacagtaaccacaacattcaatgtacagcccagtgcagatggaaggtccttgtacctcatgatctcttccaatttttcgcaagataatagtcagtctttcatgagtgcttattacatgcactagcctgacaactctacattacagataagaaaattaagacttagaggccagacgcgatggctcacacctgtaatcccaacactttgggaggccgaagcgggcggatcacaaggttaggagatcgagaccatcctggctaacacggtgaaaccccgtctctactaaaaatacaaaaatttagccaggcgtggcggtgtgcgactgtagtccccgctactcgggtggctgaggcaggaggatggcgtgaacccgggaggcggagcttgcagtgagccaagatcgtgccactgcactccagcctgggtgacagagcgagactccatctcaaaaaaaaaaaaaaagaaaagaaaactaagacttagagaagttaaatatgtggcagagtgaagcctaagctcatatctgtcctaatctaaattccaagcagttctgagtcatcaggtcacacagactgcttctcacatgcttcaggaatgccttttcagtcttccttaaaggttgcaaacagttgcaaagcaaatttcatggttcctgtttcttcaaaatctcaaagctcttcattcagccaggcatggtcgctggagcgtgtatattcaaccacttgagaagatgaggatcttttgagcccaggagtttgagacgaacctgggcaacatagggaaagccctgtcacctaaaaaaataaataatacaaccagctcttcatttagaggcaagcacaaaataggtgctcaatgtttgttgaatgagtgagttgttaccaaccataccccactattcaaggtcctgcttgtcagtgtttcaggaagtgttcttggcaaaggagtggtgaacttcaggaagaatgatgctgactccgaacacaattatttatttatttatttatttatttatttatttatttatttacttattgagacagagtctcgctctgtagcccaggctggagtgcaatgacgtgatctccgctcactgcaacctctgcctcccaggttcaagcaattctcctgcttcagcctcccaagtagctgggattacaggcgcccgccactacgatcggagaatgttttgtatttttagtagagacagggtttcgccatgttggacaggctggtctcaaacacctgacctcatgtgatccacccacctcggcctcccaaactgctgagattacaggcttgagccagtgtgcccagcctgaacacaattattaaagtcaaagtgagacctaacagtggaactttggttgcggctacaggaaatatggattcaaatactgaacaccagctgggcacagtggctcacgcctacaatcctagcactttgggaggctaaggtaggaggacagcagagcccaagagttcgagacaaacctggccaacatggtaaaacgaaaaaattaaccaggcatggtgatgcacacctgtagtctcagctgaggtgggaggatcgcctgaattgaggtagtggaggctgcagtgagctgtgttcctgccacagcactccagcctgagcaacagagcaagaccttgtctctaaataaataaacacaacaaaaataaaacaaatactgagccaggtgtggtggctcctgcctgtaatctcagcactttaggaggctgagatgggcagatcacttgaagtcaggagttcgagaccagcctggacaacatgatgaaatctctactaaaaatacaaaaattagctgggactgatggcgctaatccctgctactcaggaggctgaggcagaattgcttgaacctggaaggcggaggctgcagtgagccaagatcacccccactgctctgggttgcagtgagccaagatcacaccacctgggtgacagagcaagactgcatctcaaaaaaaaaaaaagaaagagaaaagaaaagaaagagagagagagagaaggaaggaaagaaagaaagaaaaagaaaaagaaagaaagaaagaaagaggaagaaagaaaaataaaagcatagagagtgctggagcagtgtgagtgagatggatagtggtaaaaggtgaccttggaaaaggaaattgggaggccagattgtgtagggtcttggtggccatggtaaggagtctgaattttgttctaagatggaaattcactgtagagtttggtgctgggaagtgacaagatcacatgtgtatttttaagagatcactttgggtgctgtgtagaaatcagactgtaggagtcaagtgtggagggagaccagcatccaattacagcctgccatgaacttgccaggttcctcttcccttccttcagcacacactactctttcccaccgcttagcctagttaacacttattctttcaaaattagcccggatgtcactttctctaagaacaaccgcgccccctgccgcctccccacctcacacacctcctctaacgcaaactcatagccctcacaacttctttgtcactttttctccccctttttttgagacaggatctcgctctattccccaggctggtctcgaactcctrggctcaaaagatcctcccgcctcagccacccgaatagctcctttgtcgctcttatcactgttgtgattaattgtacaaatggcttaatggcagttatagcgcccagctcatcaaaggcagtggcctgccaatcgtcagcgggcagggcagggaccagtccagtccatcctggctcccatgtgcagccccagtgcgcatcgcgacaccggcgctcgttgccgcgctccgtgaacgtttgtcacatgtccgaagaatgaatgaattatatacctttcttcccactccagccctcaaaaagcaagtggatacaaagacttgaagattttataatcgcttcattagtaaaatttgaccatccttaccattaaaaataatgataatgatgaaaaaggctaagtgcgaacgccgggaggggagagctaaaattcaaagggcgaaatatttataatgcctaccgtcggcgaagagaaacagcagccccaaccgaaggcaaaaggaaatcccaccgcagcctccaaaggcgcgtgggcgggactggagaatggggcccygcgcactaggcgcggaagtcaagaagcagccccaccacccgtgccgcgagaaaagcagccctggggaggcggggcggggcctcacttggaaaagagacggtcactcatccagaggcgggactcagagcccctccacaagtctcattggtccatttgaagacggacaactctccctgaccatccgtagcacagayggggcgcaagcgtattggaaagggagcgggtgccagacgcgagaactacgcatgcgtctcagcgctttcccgccagcacacccttagtgggtggggggggcgattgaattcccacagtgagtccagcccaccgaagctsagaggattcctaaccttcctcttcagagagcctcaggttagggaacgtccagtgcccaaaagctgccctgtgggaatcccattgtccaccgcctcttacctaatgtttcgttctggccttgccccatctcttcctgaggctgggttgttacgatggtgaattattcaagatgtcttgcagcctgacgccatctctgggcagtgctcctgcatcctccctgtcttycttgggagggcaccacgttgctcttacaagcacagggtcctgaaactgtttacaaggccccactctgccacgttagtatcttaacgagtgtttgttgaggaagcactgtgtgttagacccagtgcaatgagcaagtccctgatcttgtgaccttacattctacaggacgacacaaacgtataaacaaaaaataattttagatagtgatacatgcttaaaacatggctatgtggccgggagcagtggctcacgcctgtaaatccaacattgtgggaggctgaggcaggtggatcacttgaggtcaaggagttcgagaccagcctggctaacatggcaaaaccccgtctctactgaaaatacaaaacttagtcaggcgtgatggcagacacctgtaatcccagctactcgggaagctgaggcaggagaatcgcttgaacgcaggagatggaagtttgcagtgagcccagatcacaccactgcactccagcctgggtgagagagccagactgtatctcaaaaaaaaataaaataaaataaaataaagctatgtgatagaatgactgcgatggggattaggtcctcactgaaatggtgagagtggagttaaaacctgaaattaggtgacagcaccagatatatctgcccgagggtttcgtgcttggaaaatagcaggtgcaaacgtccttgtgctgtgaggaaatttggctggaacagaaggtgggccagattgtagctgaccatagtctctgagagcttggagatgattctaaatacaatgggaagccattaaattgaggcagagccttgatgtgacgtgctttatcatcattttgctgagtggagaatggattgctgggaaaagtgaaagattgattcagaggttgtggagagagggtggctggaactaggtagctggggaggtggtgggacgtggatgaattcaagataggattggttgtgttggatatgggaaaagaagtcaccatggttcctgggcttttggaatgtgcaaatgggtaatggaggtgccattgagatgggaacagtggaaaaataaccggtgctggggtgggaatgaagagctcagttgtgtggccgggcgcagtgactcacgcctgtaattccagcactttgggaggccgaggcagggggatcacctgaggtcaggatttgcagaccagcctggtcaatatggcaacaccctgtctctactaaaaatacaaaaacattagccgggtagcggggcctataatcccatctactcgggaggctgaggcaggagaatcgcttgaaccctggaggcagaggttgcagtgagccaagatctcgccattgcactccagcctgggcaacaagagcaaaactctgcctaaaaaaaaaaaagagttcagttagttcagttgtggccatgttgaatttgaaatactcattagacatccaaccagatatgctgagttggatggcgctcaagagaggtcaaggctggasttatgcattaacacatagaaagatggtacttaaagccatggacgttagtagtagggccacctacagaaagagtggaagtagaaaagagggcttacggtgggcaatgtggttcacgcctctaatcccagcactttggaaggtcaaggcaggcacatcatttgaggtcaggagtttgagaccatcctggacaacatggtgaaaccccgtctctactaaaaatacaaaaactagccgggtgtggtggcatgcacctgtagtcccagctactcaggaggctgaggcaggagaatcgcttgaacccaagaggcggaggttgcaatgagccaagattgcactgttacactccaaccygggtgacagagcaagactccatttaaaaaaaaaaaaaattgatggccgggtgcagtggctcatgcctgtaatcccagcactttgggaggccgacgcaggcagatcacgaggtcagcagatcgagaccatcctggctaacaaggtgaaaacctgtctcaactaaaaatacagaaaattagccaggcatggtgacaggcacctgtagtcccagccactcaggaggctgaggcaggagaatcgcttgaacctgggaggcgggggttgcaatgagccgagatcgcaccatgcactccagcctggcaaaagagcaagactccatctcaaaaaaataaataaaataaaataaaaatgacggctgggagcagtggctcacgcctgtaatcccagcattttgggaggctgaggtgggcagatcacgaggtcaggagatcgagaccatcctggctaacatggtgataccctgtctctgttaaaaatacagaaaattagccaggcatggtggcaggcacctgtagtcccagctactcgggaggctgaggcaggagaatagcatgaacctgggaggcagagcttgcagtgagccgagatcgtgcaactgcactccagcccgggcaacagagcaagactccgtctcaaaaaaatatataaaaaataaaakaaaagaaaaaaaacaaaaacaaagaaggcttacgtgagacccttggggccctctactgttaaccagttcaggagaggtgtaaaagtttgtaaaggataaccagagcacaaagtagaagagcaatgtcctcaaagggaaaaattcaagaagatgctgattatggagattaattgctgcttcaaggtcaagtgaaatgcaggcagagaaatggtcactgggtctgacaccacttttggtcactcaaattttggtcagagcagtggctgaagaaacacaggggaaggagtctgatgggggtgggtgataagagaatggatgtttaagtgtggagggaagaaaaagaaaacctattgctatgaaaaggagcagagatagaattcgtggttggaaagtgtgtcttgaaagtttcttttttcttaaaagtttcttgtgcaccatatagcacaagatcagcaacccctggcagagcccttcaggtacccagtatcccttgggggtgaggaagggtgtgtacaagaggagaagcaggagataggcaggaatgtgttgcaactacgtatggataggcagctaaggtcctggttggtatacttttctctcagtatcaggaaccctgcctgccctttggaccagtcatggagaggtcacctcagtaccacacaagatcatcacccaccttcaaaaagaggtgggtgatttggatagagggggctgccagtgagagaagttcagtcaattcygtacaatacacatttattgagcactagatatatgccatgctagatgcaggtgacccagagcatcaaggagcaatagtctggtggcagagacacacacaatgtcactgtgatgtattaaagcagtcrgcaagagatgcagctcagggcactgtggggatatccagaggcacrgtaccttctgcctgtcagtcagggagggagaggagcacaggctgaaggagactggaagacagcagttggcctctgatagtgggactggagagagatttctaagggccacttcttgttttcagggactaggttgggctagatatggggctcaggatggacaaggcttagagccaggttggagaagatgaaagagcattactagaggagtggggaggcctaggctatgctctttactctgccattgactgcgtgatcttgggcaggccatgtaacctctcagggctgtgcactcccttatttgtaaaactagagggctgggccagcatgttttccaagggttcttctagcattgacggtcaggttccaagagggaacacagtgtcagaagtgggacactcttcctaatttctaatttcccaaaggttaaggacctggggaattaattgagaggcctggaaagaggatccagataaaagcctaagttcctggcaaggccagggccactgccctgattgcttaggtgtgaacagagctttttgtttccraagtattctaaattatttcctaacacaggggcattcagagaaagagattcttacccccattccacaggggagaaactgaggcttagggagatttaaggatcatgctgaagaggttatctggggacaaagcttactcaggatgtggtgggggatgctgaggaacagggactggagcctgggaaggtagggcaggctgagacctgggggtatggrtggaatgtgtatgtggtaatggtgtctgrgcgatggaatgaagtgaaagaaatagccaagagctgggcactgagggaacaagctggggggccctgggcgtgggttccctggatccagggagtgtgaggatggctttcyctggttcctgaggcatggaccgagtcctagcctgcatctgagctccgttgtgctagctttgtggtgtctgggtcgggaaagttactgttagaaagttgctgtcagcaggcattgttccagctttccatggaaattctgggagctgctcctagtttgcggcccaacctttcttccttcttctcaatgggcccaggaccttgacggccagcgggctccaaggcccaggctttttgccaacagcaacaggctactggctgggcccaggcaagggggccttggcaggaaaagttccttgctgtacctccactgcactcagaggccagtgaggggggtaccagacaggactccttcctccctggtgaagtgcccttgcagctccccagcgtccacgccatggatatttcctccacagaagtacaatgctgattatgatctgtcagctcagcaaggggcagacaccctggccttcatgtctctcctggaggagaagttgatcccggtgctggtgagtgtgcccagacctcccagcatccatggccagccggggaggggacgggmacacacagacccacacasagrctcaggaragcatggrggtcagaagcccaccttgaatcagacaggtgcactggctcagacctgcctgtttcttcctgccyacccaatccaggkacatactttttggatagacaccaagaactacgtagaagtgacccggaagtggtatgcagaggctatgccctttcccctcaacttcttcctgcctggccgcatgcagcggcagtacatggaacggctacagctgctgactggggagcacaggcctgaggacgaggaagagctggagaaggaggtagctctgagaccgggggctattgtatgagatgagccccaaggatgctggccaggaatgggagtgcttaggtgcrgaggtggcactgttcccrcagctgcaagcctacctgtgtcgcccctacagctgtaccgagaggctcgggagtgtctgaccctgctctctcagcgcctgggctctcaaaagttcttctttggagatgcgtgagtctgactccaagagggtaatgggtggcttggaagaagatacaggttcagatggagcagctggagctggggctggggctggggctggctcaggctctggataggaggtccctgrgayagawactggccctrgtgacagtggggctgtgcgtggggccagagccttctcagaggtacaaaagggtagggtgggagggcagccaggcacaggaggggcctgaagagctgtggggcactgartgtgccctttatgcagccctgggatagagccctattcagggccaggctggcgccacctggggatctctccccataccaggtctagaactgtgtgtcctgtccttccctggtggccgcctgctgcccagagcccacctcccaaggctgactcttcctccagctccatctttaccccttctaccccagtggttctcctccatcccacccttctctctctgctccagccctgcctccttggacgccttcgtcttcagctacttggccctgctgctgcaggcaaagctgcccagtgggaagctgcaggtccacctgcgtgggctgcacaacctctgtgcctattgtacccacattctcagtctctacttcccctgggatggaggtaaggggcagatgggaggggcagccctggggagagtgggcagggatccaagaactagttctcctaacacaccttccttccttgaccctcagctgaggtaccaccgcaacgccagacaccagcaggcccagagactgaggaggagccataccggcgccggaaccagatcctatctgtgctggcaggactggcagccatggtgggctacgccttgctcagcggcattgtctccatccagcgggcaacgcctgctcgggccccaggcacccggaccctgggcatggctgaggaggatgaagaggaatgatttgtcctcacgctcccaagactggtttttctactctcatgcattccagaggcccccgtgcctcctcgttgttggtacagccggacacggggtgctgccacccagaataaagccactcacactgactgggctcaaacattttctcctttaagagctgccatttttcctggctggtgccataggaatcatctgggtgcctgggcacacccgctgctgctttaaggcttccgccctgatgctgacactgctgctccacgggcccagttctgcatctccaggaaagacaaacagtctccagttttgggcccagctttcctagtctcttcttttccttaccctcagccctgatcttgtgtttgtacggacagtgagctcaccctaggcctggacccaggcccagtttccaaagcaagcagcacacagcgcatgttcacataagcatgggggctggggggacactggggcttactgatctttttctaggggcctccagcccctggcaccrcctagaggggaaagtgagtcacccaaaccattgcccctgggcttacgtcgctgtaagctcacrctggccctgytgtgccctctttagtcacagacagcgtgtgagctgactctgtccctttaatgcccaggctgagcccagtgcctccttgagtatctgctccatcactggcracgccacaggtagrtgtgaatggagtagccaggtgagattgtctccaggaagcccacagcaggatccttgatggtaagaggcacatccttagaggagctagggagcagggaggagaagctgagagtgtgatcctgccaaggcccccaacgctgtcttcagcccacttcccagacctcaccattgccctcaccgstttagsaygaccacaacagsagagccatcgggatgcatcagtgccactgsgtccvggtcgttcttctgactggcaaccagccccactctctgggagccctcaggaatgaacttgctgaatgtgggaacagatggtcagagtccctcggggtacctcccatgaaaccctcatctaagaagtcrcccacccacggacccaccccataactcctgcagaggctctgccctggctctctaggcctggagccatgctgctgggcactgaccctgcttttctgcatcgcagtccagcctcaggcattggggttttctgttgctacctagtcacttcctgcctccatggtgcaaaaggggatgggtgtgcctcttccgaggttccaccctgaacaccttcctgctccctcgtggtgtagagtgatgtaagccatccgatgtaggagatgataggcctggtatggaatgggggtgcccgccctccactcacctgaagtggccaaggtggtagaacatgggctgtttgtaaaacgtgwscttggtgatgtctacaatgrwgrgactgthgavaaagktacgcamccwawtgrgtcctycttcgrggttcagggcaaggttccagtcggtccagccgaccamatggtacaggaggttctagggtaaggacaaaggcaaagagacaaaggckcaacactgggggtccccagagagtgtaggtaagggtcacatgtgggagaggcagctgtgggtaggtcagccctgtgaggggcacattccttagtagctaaggagttgggggtgtgaagatccaggcatctcaaggggagctgagaagtctgaggcagctgcaagtgcctcagtagttgcaaaaggggcaatgaggtgtgcagacctgtgaaggaaagggaagatagggaatcatggttccccagagttgctcaaaagggcaggctagctggggaaagctggacaggaagggcttctgtcagtctttggtgaaactagtaagaggtctgaggtctgctttgcaggaagggagactggggtggcttaccgtgatgatgctgtggctgtactgcatccctcgatcccagragyctagccscasactctgctcccagaacttggagcccacacmggyctctgaggcaaagagcatggtgttggggaacaggyggtgtgtctyccmtrggrtggctttggctggakccagaaagtscaggtrmcaaygtacarcaatgccatgaacatatttagctgcttctgggtctgtcagtacctgcaaaggaagagcaactgatcctggaccttgcacacaggcttctggaacttctagttcctgttgtaggaatcctggagttgggtgacgggaagaatgcaactagagaggtttggggagatttttttttgtttttgagacaggatgtcactctgtcactcgggctggagtacagtggcgcaatcacgactcactgcagccttgacttcctagggtcaactgatcctcccacattagcctcctgagtagctgggactacacgggtgccacacccagctaatttgtgtgtgtatgtgtgtgtatgtatgtgtgtgtgtgtatatatatatacatataaacacatatatatgtatatacacatacatacatgaaccaccacccccagcctagatagttttgttttgttttgtttcgagatggagtctcgctcagcctcccaggctggagtgcagtggcgcgatctcggctcaccgcaaccaccatctcccgggttcaactgattctcccttctcagcctcctgagtagctgggattacagacacccaccatcatgcccagataattttttttttttgtattttagtagacacagggtttcaacacgttggccagggtggtcttaaactcctgacctcaggtgatcacccgcctcggcttcccaaagtgctgggtttgcatgagtgagccacctcgcccagcccctagaaaggtttcaagcgacaactgtgggatccatggcaccctggaggtccaggggaatggtgctctaggaatccatagttgggtagagaaatcgctctaagtttgggagccagtcatttggatgctggatttgaaggtcactggagcaccatggaggtccaggccttaccacctttgcccagtggrgcagcagcaagcgttggtcatccagcatgagtaggcggacattgtggtgagtayygttggcragggtavgayctaggtcacgggcaatkaagtctyrctgmtgttcaggggtgaagcccaggcactggaaggggtatccactcaacagcccagcagaaggctcattttmagctstcactgcccagaactgtaacttgtgctcagcataggcatccaggaacctggcaagagaaaggtcatgaatgatccggccaagaaagtggaccagaccagctgggtgtggtggctcacacctgtaatcccagcactttgggaagccgaggcaggtggatcacttgagttcaggagttcgagaacagcctggcgaaaccccgtctctactaaaaatagaaaaatcagcygggcctggtggcaggcgcctataatcccagctacttggaaggctgaggcaggagaattgcttgaactcaggaggcagaggttacagtgagtgaagatggcgccacagcactccagcctgggtgacagagagagagactccttctcaaaaaaaaaaaaaagaagaaaaataaaaagaaagtgggycagaccgagagaacaggaagcctgatggagtgggcaagattgacaggcccaaggctgaaaggcccagaaggtagaaaggtgagctgaggacaggcagatctggaagtggaactaggttgagggttgggacacagatcagcatggctaaatgggaggccagtcctgatcccacatccttgctgatcccttacttcacaawgtrtctggcccaggtctggtggtagatgtctyygggctgtccctygagtgrcymcttcccattcmcckytmcmytggtcttgagccragtggktgatgtcyaggrgctgkcaaggagtsaaacgggacgctgggccaactgcagggctcggtgaatcaggggtatctagagacaaaggtagtgaagagagaagcacccagagttggaacacatactagcccaaccagtgcatccggttcagccattagcccccaccctcccacccccaggacaaaacagcaggggacaaaatgtctgtacaagcagacctaccctacagtttctcaacccccagacatcagggccctcagggcctgaaaaagctagaatgcctaccttgagcttggtatcttcctctgggaggctgaagttgtgcaactggaaatcatsaggggtgtctkcmtagrtgtaggtgmrgatggagaagtcacagctggccatgggtaccyrgrtgatgtyatatccgattyctacagaaaaggatgatcaagatatggtagtccgagtcaataggagagtatgggactctgcttatcacttgccagtcctaatagtgtctgagtcagggccaaagggaacttgggctcctgggttggaacctgtggaggctggcacctgggtgaagcgcaggcctttctgagcctgagtccgtagcagttagcagatgataggcggsgaaatcttatttcacagggcattaaracaggaaccaaatgtcagggatgggcagaagtcagggtccaaagaawkggcaaagaaaagtgtcagtggctcacgcatgtaatcccagcactttgggaggccgatgtgggcagatcacgaggtcaggagttcgcaatcatcctggccaacatagtgaaaccctgtctctactaaaaatacaaaaaattagccgggcgtggtggcaggcacctgtaatcccaggtactcgagaggctgagacaggagaatcacctgaacccgggaggtggaggttgcagtgagctgagattgtgccactgcactccagcctgggtgacagtgcgagactctgtctcaaaaaaaaaaaaagaaaaaagaaaagtgtctgctgggctcggtggctcacacttgtaattccagcacttcgggaggccaaggcaggtatatcatttgaggtcaggagtttaagactagcctggtcaacatgatgaaaccctgtctctactaaaaatacaaaaattagccaggtggtagtggcgcacgcctataattccagctactcaggaggctgaggcaggagaatcactatagcctgggaggcagaggttgctgtgaggggagatcacaccactgcactcctgtctcgccgacagaatgggcagagtgagattctgcctcaaaaaaattttaaaaaaagaaaagaaaaaygaaaagtttcaatggctctatgtcatcttgtccccttcctcctcaccttcttcagagaagtacratttaagtagcaaattttgggcagggggtgacagggcaaggatgttgagagyagcagcatctgtcatggcccctccaaatccsttcactttctggaacttctgttctggctgcagggtcagtagcaggcctgaggacatccacagggaataagggtatcagtacccagcgggaaactccatggtgatcactgacaccatttacctctaggaggacccagcctggcccagggggtgaggggtgtaatggttacctgtgcccgtgtgattagcctggatgggccccatactcagctccatccrtcgcycactgcktvtrctctyrtagcggctgamggtaccaagggcaggaaaggtcggggggtcaaaggagtcacagtatgtggcattgcagacasacascaccgagctgtagccgaagcttttagggatgcaggggcgggcacctgggagggagggagtacaagcagagtgaggtctgatgaagacatggagaatggacacatctgctaggagagactgaacacggtttcaaaattcctcaccccttggccgggcgcaggggctcacacctgtaatcctagcactttaggaggccgaggtgggcggatcacctgaggtgaggagtttgagacctgccttgccagcatggtgaaaccccgtctctactaaaaatacaaaaattagctgggcgtagtggtggccgcctgtaatcccagctacctgggaagctgaagcaagagaatcgcttgaatctgggaggcagaggttggaatgagccaaaattgcaccactgcactccagcccaggcaacagagtaagactctgtttcaaaagaaaaaaaacaaaatcctcaccccaaagttggtctcagtcactcaaaaggatttattgagcacctactaaaagtctaccaccagcttactggaaggctaccaaaggactatgaggcagaagggaggctctgtgctacctccccactgccttgactcactcacctgatgcycacgacactgcctgaagtagaagcaatcctgtgaggctgccagccatgatgcttaccctactcaaaggcttgggacattcctgaggacagaatgaggaatgactgaaaagcaagyccctctccacccctcaactactctccygggcagggcttagctgcctttgggtgcccatggccyggtctcccacattcattaggacaaggcccacagamacctgggtgcagctctccctgcaacccttctgatgacaactctctgcccaccccaaatcaggatgctccccaccactcttcccacccatttcaacttcgacccctccctccatctgtgccttgctcaaagagccatgatggccctggattcaaagagagtctgtcattcattaaattccagtgccaggattccagaagcactgtgacaatgctgattgggagctctctctcttacctctctggaaggacttgaaaactccatcmcctcagggtcaytagatgargagaagascacaggggttccagagtctctgaaggatagaggatccactaaacaaaaacaaggatgcaggtacctgccwtagctataggcactaggttagccctgcaagtaattccggcttcccratgtggatgggtcatgtgatgactaggagcgtcacatgacacaggaagtgaggcaatcacagccatatttctaaagggcaattggcttcctctcatctgttacagattatatgccctataaaactctggagggcatgtatgggtgacaactttaggaagagcctagaacacagatttgcatggagaatggggtagaggctcctaaatcccagaggatgggaaccacagcaggcacacttcttttttgatagaaatgtcaaaaaggtacaaataaagctgatataatttaaaaaaaaaaacttcactgtgcaaaatactgacactaccaagatgtttaagacagtctttgccctatagaggtgtgtgaggcatggaagtcagacacacagatatttacagataaagacagaaacggtaacaggtgtgcatggagagctctctgagatgaggagggaccattcgtgggtggggaattatccaggatggcttcacagaggaaaaagtgaggggggttattagccagtgaagtgcagggcacaagagggtgggacactggcagtgggatgacaggactggagggagggagtggtcagtgcggctcctctgcagcgtcccttgtttcatcatcagatgcagatggtaataactgttcttccttcctcacaagacagggaggtttgtaaagtcgttcaaaaaccaaagtgttgtacaaagccatatcctcagtggacacaaggaggaagctgtccatggtgtggcctcatgaaccacatcaaatgagatttagcgggagtggcacacacagtcatgacctgactaatcccagctctcagcccatttccttgcctggaaaatggaggcaatgccacaacctcaaagggtggttactgcagtcagtgaggtaagtgcagtgcctgaccacttggtaggcacctgggaactacttgtctcttgtttgtattttttgttgttgttgttttttgagacagagtctcactctgttgcccaggctggagtgcagtggcgtgatcttggctcactgcaacctccrcctcctgggttcgagtgattctcctgcctcagcctcccaagtagctgggattacaggtgccctccaacatgctcagctaatttttttatttttagtagagatggggtttcrctatgttggccaggctggtctgaaactctggacctcaggtgatctgctgccttggtatccgaaagtgctgggattayaggcatgagccactgcgctggaccccagccatcctttttgttctttaaatgatctcagtgaagtctttctagatacactccaagcaaaattgatcatttcttcttctaggttcctccagtaattttttttttttttggttttgagacagagtcttgccctgttgcccaggctggagtgcagtgtgatctcggctcaagcaattgccctgcctcagcctcctgagtagctgggattacaggagcccaccaccatgcccagctaatttttgtatttttagtagagatggggtttcaccatgttggccaggctggtctcgaacccctgacctcaggtgatccaccagcctcagcctcccaaggtgttgggattatagcaatgagccaccacacccggtccctccagtaattaagtacagtctcagtgagacagcaagtttggaatcctggctacaccatttactggctgtttgactttcaataaatcaatcactctaagcctctgtttcatctataaaaggggagtgataactcctacctcacagaattgttgtgaggtttgagtgtgataatgtgtctctagtacactgcttgacactaaacattgcaacatgtcaggcctctgttcctggagttccttgaaggaatgtcttatgcattctaagtatcctcgtagatagcctggcacaggggtagctgtcaagttgtagaattgaactagttgcttcactatgtcagtagccaccccttccagacttctcacttttcaaggaaacattgcacaggatttgttctgggtagggcaggtaatatctagtaccttacttccctcaagttcawtcatctcacagatatttcctgagcacattctacatttgcctctcctgctctattgagtttagaagtccaaacatctccttccacttcccctctgcatagtgagcctcttcttttttggccaggtactgagcaattttttgtttgtttgtttgagacagggtctccgtatgttgccctggatggagtgtagtagcttgatttcggctcagtgcaacctctgcctccagaataagcaatcctcccacctcagcctccagaatagctgggactataggcgcacaccaccacacctggctaatttctgtattttttgtagagacggggtcttactgtgttgcgcaggttggtctcaaactcctaaactcaaaggatcctcccgccttggctttgcaaagtgctgggattacagggtgaggcactgcgcccagtccgcttgttttttgttttgtttttttttttgagacggagtatctctgtcacccaggctggagtgcagtggcacgatctcggttcactgcaacctccgcctcctaggttcaagcggagggtagggaccagtccatcctggcacccatctgcagctccagtgcgaatcccaaccccgacgctcgtcgycsggctccgtgaatgtttgtcacatstctgaagaacgtatgaattacataaccttcttcccactccacccctcaaaaagcaagtggatataaagacttgaagattttataatctcttcttcattagtaaaatctgaccatccttaccgttaaaaataataatgatggttggccgggcgcggtggctcacgcctataatcacagctgtttggcaggccgaggcgggcggatcacgaggtcaggaattggagaccagcctgaccaacatggtgaaaccccgtctctactaaaagatacaaaaaattagccgtgcgtggtggcgggtgcttgtaatcccacgtacttgggaggctgaggtcggagaatcgcctgaacccgggaggcggaggttgcagtgagccaagaaggcgccattacactccagcctgggcgacagggcgagactccctcaaaaaataataataataacaataataataataatggtgaaaaaggttaagtgcgaacgcagggaggggacagctaagatccaaaggtcgaaatattcattacgcctaccgtcggcgaagagaaacagcagccccaaccggaggcaaaacgaaatcccaccgcagcctgcaaaggcgcctgggcgggactggagactggggccccgcgcagtaagactctgaaggcaggatgcagcccgaccacccgcagccgcgagaaaagcagccctggggagtcggggcgggrcctggattggaaaagagacggtcactcatgcagaggcgggactcagagcccttcctcaagtctcattggtcaagttgaacgaacaagtgtcgctggcgagccggagagagagagagagcgagagcgagagagcgagcgagagagagcgagagagcgagagagcgagcgagagagagagagagagagagaggagccggcgcgagaactacgcatgcgtgtcggcgttttcccgccagcacactgttggtggatgggggcgattgaattcccacagtgagtccagcccaccgaagctcagaggattcctaaccttcctctttagagagcctcaggttagggaacgtccagtgcgcagaagctgccccgtgggaatcccattgtccatcgcctcctaatgtttcgtcctggccgtgccctatcccttcctgaggctgggttgttatgatgctgaattattcaagaagtcttgcagcctgacgccatctctgggcagtgctcctcccacctccctgtcttccttggagggcaccacgttgcccctacaagcacagggtcctgaagctgtttacagggccccaccctgccactttagtatcttaacgaatgtttgttgaggacctactgagtgttagacccactgcaatgagcaagtttctgatcttgggaccttaacmttctatgggacgacacagatatataaacaaaaataataattttagatagtgatacatgctgaaaccatgggtatgtggccaggcgcggtgagtcacacctgtaatcccagcactttgggagaccgaggcaggcggattacttgaggtcaggagtttgagacccgcctggccaacatggtgaaaccctatctcttctaaaaatacaaaatttagctgggcgggcatggggacgggcgcctgtaatcccagctactygggaggctgaggcaggagaattgcttgaacccaggaggtggaaggttgcagtgagcccaaatcacaccactgcactccagcctgggtaacaaagcaagaccctgtctcaaaaaaagacaaaatgaaacaaacaaacaaaaaaaaacatggctatgtgatagaatgactgcgatggggattgggtgctcactgaaatggtgagaatggagctaaaacctgatattaggtgatagcaccagatataggggccaagggtttcatgcttggaaaacagcaggtgcaaacgtccttgtgctgtgaggaaatttggctggaacagaaggtgggccagattgtagctgaccatagtctctgggagtttggagatgattctaaatacaatgggaagccattaaattgaggcagagccttgatgtgacgtgctttatcatcattttgctgagtggagaatggattgctgggaaaagtgaaagactgattcagaggttgtggagagaggatggctggagctaggtagctggggaggtggtgggatgtggatgaattcaggataggattggttgtgttggatatgggaaaagaagtcaccatggttcctgagcttttggaatgtgcaaatgggtaatggaggtgccattgagatgggaacagtggaaaaataaccggtgctggggtgggaatcaagagttcagttgtggccatgttgaatctgaaatgcccattagacatccaagcagacatgctgagttggatggcgctcatgggaggtcaaggctggagtyatggattaacacatagaaagatggtatttaaagccatggactttagtagtagggccacctatagaaagagtggaggtaggaaagagggcttaggtgagggccctggggccctccaatgttaagcagttcagcaggacaaagtagaagagccaatatttcccttttcaaagggacaaattcaagaagatgctgattatgggtattaattgctgcctcgaggtcaagtgagatgcaggcagagaaatggtcactgggtctgacaccactgtggtcactggaaagtttggtcagagcagtggctgtggaaagataggggaaggagtctgatgggggtgggtgaggagagaatggatgtttaacagtggagggaagaaaaagaaaacctattgctgtgaaaaggaggagcagagttacaattagtggttggaaagagtgtcttgaaagtttcttttttcttttttttttttttttgagacatggtcttgctctgttgcccaggctgtagtgcagtggctcaatcacagcttactgcagcctggacttcccaagctcaagtgatcctctcaccttagccacctgagtagttgggactacaggcgtgtcccaccatgcctggctaattttttgttttttgtagagacagggtctcactatgttgcccaggctggtcttgaattcctaggctcaggcgatcctcttgcttcggcctcccaaagtgctaggattataggtgtgagccaccatacccagtcctgaaagagttttcttaaatatgagagacactagaacaaatttcactggtgacagagaatgatcaagaaaacaaggggaaaactgaaatttattgaaggcttacatactgttaagagctttacaaacattctaccttcacagtctttaatggagcaggcaattggggttacatagcttgcccaaggtcatgcagctagaggtggcagagctgagaggccacctagattttttggactcttcgtgcctgccttaccaccccattgcataggcacacgtcaccctgtacttaaacacctgggccatgcctttgccctgaccatagtgcccttgcaaatcagaaagagccactctcattctgagggggacaagaatttgttttcctcctccagtgctataagaaggggcatctcccccacagtctaaatacccatgcagcacaggacagaagctctcccagwccagagcagcagaggcaagcagcaagagaccccagaggtaggkgggaaagggacactttggggggtatacagcaggtttctttttgtgccagccagtgcaagaggatgctgggggctgctggtcccaaccagctggtgcctgtggctggatgtgttcagtgtgacaagaagcctaggtcagagcccagtctcccggctgcccccgttgaggctgaggctgtgggggcgggtaccacgctccagcctgyggccagacaggagacgccgcagggaagagctagagctcagatctccgcagctgcgaaggtggaggctctctcggccaggccggccccacaggctccggggcacctggacagggacacaagaaagggcatcatcaataaggctcaatctgaagctccacgctttcccaaacatctttcctggctccccgaattcctacctgcttatgtccatgagctccagtcccactggggtctggggctttcctggatatctggaggaaacgagtgaccaggccccgacctggccagctgccctttaggtcccccagggagtgggcaggtgcagggcccgagggcaggggaactttttggaaggtgggcacagggcgccgtttctcggctgaccgggcacgtagcaacttgggggaagggcagcgggctaggcggaagargcaggcttcagagcagagccctgcagagagacagagataagagaatggtattgtagggtggagagggggctgggcagccatgcccaatccccayccctggggcgcaaaccacatgcctgacctgtatctgcagaggaaacagaagcagcttcttcctcaagcactttggtataaaggtccctgaagtcagctggggagaagagagaaagggagacagggagtgagtggaagtgttctgtggacacgcccaccctcctgtgggaactcaagcccagaggagctttcacagcycccacgctccatccccaatcaaagggccagcatctctgtccatattagccagcaactagatggtacaatccaccacaacarggactgcagtggtgttgttcagcacctggcgcacagtgctgagcgttccccagtactatctcctttcttatttttttgagatggagtctcactgtgttgcccaggccggagtgcagtggtacgatctcagctcactgcaacctccgcctcccaggttcaagcgattctcctgcctcagcctccctagtagctgggattacaggcgtccaccaccaggcccagctaatttttsaatttttagtagagatgggggtttcaccatgttggctaggctggtcttgaactcctgacctcaggtgatccacctgccttggcctcccaaagtgctgggattataggtgtgaacagccttgcccggccactgtctcctttctcagcatcttcgagtacaatgcctatggctgaagtactgttattatacatgttttttgtttgtttgtttgtgtttttgagatggagtgtgtctctgtcacccaggctggagtgcagtggcatgatcttggctcacggcaacccctgctttccaggttcaagcgattctcctgccttagcctctctgttagtagctggaattacaggcgcgctccaccacacctggctaatttttgtatttttagtagagatagggtttcaccatgttagccaggctggtctcgaactcccgacctcaggtgatccacccacctcagcttcccacagtgctgggattacaggtgcaagccaccgtgcccggcctgaagtactattattatacatgtttwacaagtgacagctgaagcttggggaggacagataagtggaccaagctgagagctgtggaactggtttcaaaaaataaatccttttgggaggccgaggcgggtggatcacttgaggtcaggagttcaagaccagcctggccaaaagggtgaaaccctgtctctactaaaaaatacaaaaattgcccgggcacggtgactcatgcctgtaatcccagcactttgggaggccgaggcgggcagatcaygaggtcaggagattgagaccatcctggataacacggtgaaaccccatctctactaaaaatacaaaaaaatagccgggcgtggtggcaggcatctgtagtcccagctactcactactcgggaggctgaggaaggagaatggcgtgaacccgggaggcggagcttgcagtgagcmcagatcgcgcggctgcactccagcctgggtgacagagcgagacaccgtctcaaaaaaaaaaaaaaaaaaaaatattagccggtcatggtggcgcacacctgtagtcccagctactcggcaggctgaagcaggagagagtcacttgaacccgggaaacgggttgcagtgagccaagatcatgccactgcactccagcctgggcgacagagccagagactccgtctcaaaaaaaaaaaaaaattmtccttttttagctgctaagctatggatgttctgtccctaggaggtgagtacctgagaagtgtctaccagaggagtgaactcaccctttcttcctcctcagggacctcaactgtgccccaatcctggtgggcatcactggccacctaactcccagtgcctaccctctcctgagcctgggcagtcggggagggggctcaccagtgtcactggaggtcgtgatgcctgggtcgctgtgggaccgtggcagcagcagcggtggtggggatgccggatgaggaggccggtgccccggtggggtgagggaacctgagctatcgctgaagcgacgagtcggggctcgggtgggcggggctgcggctgggcggccccctccccgggggacccgccgcctcagctcggggaagcagggtcccacccagggcggccagccctccaaccggtggcagctgcgggcagctgtgggggcacccagtgggggtggagcttcaggggcagagcaggaataggagcgggcagcccgtggggggcgccgtggcagggggctttcctcgaaggggccccgcaggccacagtccaggctgaggcagtagccggcacggctgcgctggatggagcgaaagagaacgtagtccacggagcgcacggagccctgcagctccagcaggcacgagtcctccgacgggctagagcccccagggaggtcaccaatggctgacagcaccagagacccgctgtccatggacactgtgggcggcagggggcgctgtgtagcaccagcctggcctggcctagccctgcccaggcagttcctcttctcccaagcccagcctctaggggccactgtgcctccagctttatctcagaggagaaaaataagtccagggttccaagttgccrcagccctcctatgtccccaaaccaccaactccgccttgttttccccttctattgtctctacccaccccagctatccctggcagccccgcccttgtccacccctcattacgccctgctcaccgtctacaatggaggccactcgttcacagatgcacgagccatcgtgaagctgagggtcaaagagagtggcctgcagaagacacagggtcaagggttcagccctacacactgaacacccccatgtgctagacagagctctggagacttagattccagaccagccttgtccctttgtacaagtcacttaattgtgcagcctcagcttccacgtctgtatggcagaaatgatagcttccaacccactcacctcaccaggctctagggaagatcaaaggcaacagtgggcatgctggtgctgtaaagaccttgaccactgttactatctttatccagaggctacagcctgttcagctttccaggctacaacccggctccccagcccgccccaagccgtgctgtgctctcacctggctgtctcctcgtagtcccatgactgcctcataagaaggggggcaatcggtagggtacaagggcactgggctgtccatggagccattgtacgtgatgctggcagatgaggaagagggtcaatgtaggagaaataattccccctccacaaagatccctctctccagcaatccaggcccagccccagtccccttccttagctcccccagcaagaccccaccaggccttacctctgtgcatctgtttctgagctgcaggtatactctgggggatagtagggcggtgggggcacaggcgggacaaattcctccaggtccagcatggtgtgtaggagaggggctgggggcggggacgtgcagcccagaggtcccagtgggcctgagactgaccgctcaggggccagctgctggggaagcgagcaggtcagcaagtctggattctgggaatacagctcctcctgggcccccaaactcctctctcatctacattattttttctggccctatcccctgagagaagctcttrttctggcccctccctcacmcaaaatsagctctccttaaccccacsstcaccctgtacctctagctctggccctgcccacccacaaattcctctttatggccccacctccatccagaagctccacacattctgtgtcttcacaggaatgtccaccctttagcctcacctccatctaggaccttcttttttttttgagacagagtctgactctgttgctggagtgcagtggcgcgatctcagctcactgcaacccccacctcccaagatcaagcaattcccatgcctcatcctcctgagtagctggaattataagggtgtgcaaccatgcccagctaattattattattattattattttgagacgaagtttcactcttgtcgcccaggctggagtacaatggctacatctcagctcactgcaacctctgcctcccaggttcaagcgattctccagcctcagtcttccgagtagctgggattacaggcacccgccaccacacccggataatttttgtatttttagtagagatagggtttcgccatgttggccaggctggtgtcaaactcctgatatctggtgatcctcctgccttggcctcccaaagtgctgggattacaggcatgagccacggagcccagcctaatttttgtawttttgtgtgtrtatatatatatatatatatatatatatatatattttttttttttttttttttttttgagacggagtcttgctcttgtcgcccaggctggaatgcagtggcaccatctcagctcactgcagcctctgtctccccggttcaagcaattttcctgcctcaaactcccaagtagctgggattacaggcacccgccaccacacttggctaatttttgtatttcgtttgtttgttttttgagatggagtcttgctctgtcgcccaggctggagtgcagtggcactatctcagctcactgcaagctctgcctcccaggttcatgccattctcctgcctcagcctcccgagtagctgggaccacaggcgcccgccaccacgcctggctaattttttgtatgtttagtagagatggggtttcaccatgttagccaggatagtctcgatctcctgatctcaggtgatctgccctcctcagcctcccaaagtgctgggattataggcacgagccactgcgcccggcccgattttwgtatttttaatagagacagggtttcgccatgttggccaggtgggtcttgaactcctggcctcaggtgatccgcctgcctgggcctctcaaagtgctgggattacaggaatgagccaccgtgcccagcataggaccttcttgactctaccccaccatccagtcccattctctaaagcaccctctcctggtcccagaccagcatcacatacttaactcactccctgccatctccccttctcatcctccccactaaacatccattcctccaatagatgaggataatagataacccatagcccctggtgctcaaaagccagatctgtagccattgttccctcaggcaagtctcagcacacacacccctgcccccaccatacctgcgtgccctggcccctgctcccttctcaccgtatgcacgaggtccagggagaagatttggatgcagcagacaatagcagagagtgtacagattatagcggcacaaatggtgagcccacagacgctgaagagcaggttctggggaagggaaaggaggagaggagtcaggagacggctaagttccacacattatgggcctgtgagwwccccagcaggggaggcaagagtgagaaccaggaggatgtttgcagggtgcaagctcaccttgagggcccctcgggcttcatcacaggtggagttaggggcaactttcagttcctgccccgactctggacagggccggaggaggggaacagagggacagcacacacagacctttccttcctgagtggagcagggagggtgaggcagcctgagtcagsacaaactgaggtgtcctgcacacctcccccagccagttctttccagctctccctcctcaaatctcaccagagagcactgttggaagtctcgggccagttgagcattcttacaggagagaacagagccagccatgctaagcatgacacagagcaccgaaagcaaggagaagaaggagatctggggaaaacagggtgcagactcagggctgggaccctcatgagtactcctctgccacggacagagtccccctccttcacagacacttcgtgcccacccggctggmaccaactggggagccagttcccttcttgaggwcataaatgggcttccccttgcgtgctgggcacctgcctcccagtgggcactggaccctggcacctaccactagagtgaatggccgcttccaggacacaatgccaaccaccccggagaacgccagctggggacagagtgggcacaggctcagcctggcaggggaggctcctgagtgagmccctcaccacaggatgcacccagccctgtaaggaggcagaggaccaggagagggaggagaggcaagcatgtggacttgcagctggtgtggagggtggggcccgaggagcctcccccacccaacaactgtgcacccaactcaccgagaacccagcccaagacgggcaggacctcttgatgctctcggtggtggtgacggaagaggccaccatgctgaaggtgaccaccaggatgcccaggagcacttggaccagccccagcgtaagcagggcctgcagccagggtcggtggaggcggaggtgggtaaggcccctggtgctgggccggctggtcagcgagcggctggagtcactaggcgagggcatcatgcctgctgcccggttgcctgcgcctcgctcggccctccctggcacttgggagcatctcagaggcgcccaaggccccgtcctttctcctctccaccccactcgctctagagcccaccccctggctgggtcccctggggcatggccgagggacgccagctgtggggggggccaagcgaggggcgtcacggagggaccgcggagtgctccctccccaccacgggcactggacgggcaccgtgcccggggcgacgatgaggacgcgggggcaccggctcatcgcatctccctagggaagaggggcaccgagaagggccggyccaggagtgaggagggggcggcggcctggagcccagggasgggtggggagggtaaaagcgggaaggatggaaataagtctagagaagaggggaggggtcggcgtggggtgactctagaggcgcggtcggtgtgccctcagggcgtccagtaggatccggggccgcctggtggggagaggccgcggcgccgctgtctcctgtgtcgcctgtcccgctcccctccccaccacgctccgctccccgagctccggctgccgcaggtcggggactagagaagggggatgggaatggggatggtgcgggaaggaggggcatggcggcgagggccggcgcggtgcaccccgggagttgtagttcgggactgagaccctgtcggggttgggggatcccgcggcagggcgaggcagtcggataagcgctcctccagtccctgcctcgctctggaccctggctaggctgctagtgatcctttgggcctccacttgagccccatccagcttttcaggctccaggcccgcgtattccttggcgttcccggcagaggcggtggctcttccccgtcattaatggagaggggtggggagcagggctccctggcgtctccgggtttcgcgtttccgtggacttcccacctccttcctgcgccagccactcgggctccaccgccccgcccctcatmtctcccagtttacactaaagccgggtccgaccttcccacctcactccacactctcctttctctttcataaggcctaattcccaatgaagattcaggaaacggggatgtcagttccagttccwctttctttttatttaaataaccgaagcaacagccgkggcacagcagagggaagctgggttggggcgtgtgagaggtggcagcagtgtggcctgatggggggactaggtcacagtgaactccccacacgcctgtcaggttcagcagtcatggccataggattgggagcactackgaggagccatcagttagtgatgtctctccaagtcccagagaccttagggacgggagctaagtcagctccctcaagtagcagggccagggcatcccagtcaggggtcacggggcccggaaggcattttcagcagccccagcggctgcattggcagctssggttcgcaccgcagggttggagaagacaccagcagcaaattcttgctgggccttctgaaagctggcacctgtgcggcggtataaggagtggatctgcragtagaggacaaagacaytaccgcccattccagccactggttccccaccccagcctaacagcatcactaccactcagcagcctgctgcccagcacacacactcacacacagaaacacacaccccagaggtccattagctgagaacaacccagcagcctgacctgtgccagttgctcctgaatgttccacccaygcccctggggacccatgatctcaccatcccggccccaccttcgacacagccctcacccgtttcagcatgacaattcctagcacagcaatgccagtgaagagcagggcgaccagcagcatgagcacggatactgctgtgttgcccttcggcaccaccagagcagagatccagccactgtaaagggaaggatgtaccagtgaagaggggctcctcagcttctccactggttatgtcaccagcatcccctgttcctacccttcccatcagcagtggctccctgtcaatcgagcagcattccaagcaccacaatcccaaactgtatctaatctcttcatagtttaattccagtttctgaaccattagccctgagctctccaagctcttccaggcactcatctggggattcttcttcctcctttcaaccatggttctatgcctcctccaggaagccaccttagattggccaaatgcagcattcttcccttcaatctatatgtgtcaagagtgctgtctgcgctctatcctggaagtatgtcttgtatctcattaaactagtacctcccaaggattaaaaccacatttcctttttctgaacaactcctatcccagcacccagtgctggctggatctagagggaaaggtgagggtggataacagcctcacaaacctgaatccccaacctgggataccaatggcctggaggacaaagagcacatcctggwcgaagaaawtgaagaagaaarcgaagaaattgaatgaactgtcactcctacaaagaggaaaaaaatggggagggtgggagaagaattagagctgaaggatgggcagacgtggggcccatcccaggtctccatcactctcccaccactaacacacttaccggaaagccttatacatggggcggtaccagcagacaaaggagcagggagtgaaaaggaggacccagaggatagaaagcccaaagcctgcgccattgttggtttccacacagaagctggccaggcaggcgaggaagttcaggagaagagccagcgtgctgcctaaggggcagagggacaggatgaggagcccttctggactgcaatgaaggctccttcccatctatgctcatcctataatattcaccaaacatggcagagtaaggaaatgaaggcagctgctgccttcatggaatcctcaacaggggagatggagaaagcaaatgtcaataatgtgtgatccccttgcaaagacattttttttttgagacggagtctggctctgtcgcgcaggctggagtgcagtggcgcaatctcagcttactgcaagctccgcctccccggttcacgccattctcctgcctcagcctccagagtagctgggactacaggcgcccgccaccacgcccagctaatttttttttttctttttttttttttgagatggaatctcgctctgtcgcccaggctggagtgcagtggcaggatctcggctcactgcaagctctgcctcctgggttcacgcccattctcctacctcagcctcctaagtagctgggactacaggcacccgccaccacgcccggctaattttttgtatttgtagtagagacggggtttcaccgtgttagccaggatggtcttgatctcctaacctcgtgttctgcccacctgggcctcccaaagtgctgggattacaggtgtgagccaccgtgcccggccttttttttttttgagatggagttttgctcttgttgcccaggctggagtgcaatggcatgatcttggctcattgcaacctccacttcccgggttcaagtgattctcctgcttcagcctcctgagtagctaggattacaggcatgtgccaccacgcccaggtaattttgtatttttagtagagatggggtttctccatgttgatcaggctagtctcaaacttctgacctcaggttatccacccacctcagcttcccaaagtgctgggattacaggcgtataccactgcacccagcccaaagacatctaaagaattcaaaatatattcctgcatatggacaataaaaagtggggagagggcaagaacatttgctagcaggctggtgagttctaaatagaggtgaagtgtttggttcttggtgagcggaccccagggcagttaagagatctacctgtaacttcctccaaaaggcttctcactactcacacatccagaggtagtacatggtggatacagtcttctgaaattcttgggggatctccatggagatgtcctggaaaaagcagggctgaactggacaaaaagaaggtagagggggccaattgttctgtcgagctgtaaggcrcmaaaaaacaggtggaccccagaagtaaaacagagaccaacaaaggaatcactcccccttctctccatccctggatcctctcttttttttttttttttttttttgagatagggtctctgttgttcaggctggaaggtagtggtatgatcatggttcactgtagcctcaacctcctgggctcaagcaaccctcccacctcagcttttttttttttttttttttctcctgagatagagtttcgctcttgttgcccaggttggagtgcagtggtgtgatcttggctcagtgcaatctccgcctcccgggttcaagtaattctcctgcctcagtctcctgagtagctgggattatgggcacatgccaccacgcccagctaatttttgtatttttagtagagacagggtttcaccatgttggctggtcctgaactcctgacctcaggtgatccacccgccttggcctcccaragtgctgggattacaggcatgagccccggcgcctggccgtccacctcagcttcttgaggagctaggactacagacaggtaccatcatgccctgctaatttttttcattaatgttttggaggcaggatctcactatgttgtccaggttggtctctaactcctgarctcaagcaacctgcctgcctcggcctcccaaagtgttggaattacaggcgtgaggcaccatacccagccctggatcctctcttttatctccaatttggggtccaaggagacaagtgagagtggaaaaattaatactgtttattattatttaaaacatctaagcactgtaccaagtacttcacatatattttgtttaaccttcacaacaaccctgtcaaacggatgcaaacgtggttttcattttataaatagggaaactgaggcattcaagattaagtaacttccctaaaagctcatggttagtaagcagtatctctaaaattcaaactcagcagtctgactccagagcccaggtttgtgtttttttttttttttgagayggagtctcactctgtcaccaggctggagtgcagtggcgctatctcggctcactgcaacctccacctcccgggttcaagcgattctcctgcctcagcctcccgagtagctgggactacaggtgcgcgccaccatgcccagctaatttttktgtgtgtgtatttttagtagayacagggtttcaccatgttggctaggatggtctcgatctcttgacctcgtgatccgcccacctcagcctcccaaagtgctgggattataggtgtgagccaccgcacccagccgagcccaggcccttaagacctgtttttgctcctcccaaactctcagatgctcttccccactctattacttactagctgtgccycccagggcagcatgctgcagctctcgctcccttcggtccaactcctctgccttccggttgagctcctcctgtttcttcagcagctcagctgtggctgctgcagctgaggcctgcccagtgtgagcagacggagatgtgagccctgggccccaggactggcccttctccccagccctyacctgcacacctcctgtacctgagtgctgtatgagccatagttcttaggttctgtggggctgagctttctcgagggctgcaaggagggagctgagggtggaggcaatggggcaggggctggaggctcataggctggtggtggctgytgaggaaaagaccttagtgatcatctagtccctcataacacaggaatctakagtctgcttgaatacctttagacccagaactcatgatgtaaggaagcagcctttcccccatttgttaggaagctagttcttctgttgaatttctgtcagagaactctatgatgacctgtagcagccttatcatccctcatatccaattccttagtgaggactcaaatcactcatttaccatatctccccacttaactgtgttttttttttytcttttcttctggggatggagtgtggggttgtctctctgccacccaggctggagtgcagtggtgcaatcatcactcatcgaagcctcaaactcctgggcccaagcagtctttccatcccagcctcccaagtagcaaggactacaggcatgtgccactacacctagccaatttttaaaacgtytcaagagatgggggtctcgctgttgcccaggatggtctccatcaaattcctgggctcaagcaatcctcccacctcagcctcccaagtgggattacaggcatgcacaccatgcttggcttttttttttaagttttaagtaccatgaaaaccccttaaattcttacaactcaccatcttctaatccagtgggacaaacaggtgtagtcctcctcattccttgctttcaaactgcacacctaacctaaactccaaccagccccaacctttattttcttcaagaaagccttcccatacagaacattggttaaggccttgccagcctccagatcttcccaggactgacttttagagctcaaaccatttgggttggtggccctggtggccctagaaggatgaggcatcccatggctgactagcctctctcagggaactaagatcacagtgcctcttccttcctgtgcatgcagaaaagtcccctgtacccaagctaacttgtctcactggcaaacccttcccttccttgaactcctatgctctccagtagctcacctcccgggtctcaaaagggttgtagacgtcamgcgtggcatactgccggctgggtcggtgctggatcacagctgggtcctgagggcagagacccgggkctcagctggcacccagtgccacctaggggaattcccagggaccattcccaaactgcctgtggctccaagtactgcaccttcggggccacgccgttgtcccaggactgggacaacatttacctcaaatccatcatccaacactgccagcaccagcccattaaggggcagggcccgccccccagagtgctcactggtctggagtcactgtcaccccacgtggcggctcttcccaggatcaaatgtcacaaatggggatacaagttagcccgaccctacagaaccgggaagaatcaacctgaccgcccaaaagaggccgactggcgcaagtcacctgaaaggggttgtcaagctcgctgggctcggcgaacgggtttccgccgtctctgctctgagccatgtttgcaactgcggcctccgcggccctctgccctccacgcccctgccgcagcagtggcggtagcggtagccctcagagtccacttcactcgcctcagttcgccccgcttctctgtgcacggattggttccyycgaccggaagggccacaaggatccccgcagcagccgtgggttgcgcctgcgtcttgtccaaaagctaagacgaaagtgcccccacgtgatacctctaacccagtgcccacaaccaactaccgcccctcttccatgtgacttccttccactaacgaactacacttcccagcaggcctcgcgtaggaatccggccttcctagtctcccgagatggacgacgggagccttctgaccggtcstggcaatcccccctaggagccaggttgagcacgttttcaacctgagtttctggctctatactgggccgcggcctaatgactctaggagtcagatctttcccaactctcataattccacatccgagaagtgccacctcataacacttctctgttttaatctgaaagaaatgctgccccacccatcactaccctcccatatgataaggtggacaggggaaataaactggtagcctggctgtgcttcattttggagggtaaggaggactcccttcatacccaaactcagaaagtttgccaatagtttcatccctccaccccagcattcccaaacctccaactccagggatgggggtcaaatgaagcacgttattttatttcacaaagactgtacaaaattccttataaaacatggggtagatgccacctggttacctcactcggcccccatccaactcygtatgagggggcaggtgagggtggaaactgtgtggatggaatagtattatgtacaaggcaggggttgaagtgataggtacaagttctttcatatttacactatttcacatattcacaggtatatagagagccaggaggaaggagtgaactctggctcgttctcttgtataaaaaagcaccagtgtcctggactggacacccactgctataaaagatgcaggggggcccagggcctgatcgtcaccgactgatatcccgactggagtcccacaacttgttgggcggctcagcccgaaggcgggcgaagaaaggatgctgaagggcttcacccaaggtcagccgcttarctggttcatactctagcatgctttcaatcagatcgaagagctggtggtgttcctctgcctctgaggtcagataccgctggtggaggagggcaggaaaaaggtgaggcaggatgccttacaaaccctgccttcttcaagaccctacctttcattcttggagaaccaaggctctgcttgcaaccaatttgaaggctacctaaccacgaccacaccaggaccaacgtttctgatattatagctcaacctaccttcccwctagcacaattactccataatctttgaaagttctttctacttgtatatccttgtcaacttcatgaatcttctttagttcctcattaaaatgtaagctcttcaarggtagtttattcttttctgtctgacctaaagaatccaggacattgctttgatctctggttgtctcaaggttaggctgtctaacctccttccctccrcaaaaccactccctcttatgtttcctctgttgaccaaagatgtcttctttcagctttccwcccctcctttcctaaccctctgcttgtgaagagcattccagggggcaaaccaccctaagaaggaagtgacttctggacggtgggcactatttatcccgagcccagctcacccgcagcggtttgcagttctcacgaacatagcgcccagctgatgtgttctcatcccaatccaggcgaccccggtaaaaatatttctgctttctagaggggaaggggaggttgaggaatcagaaggtcacccttgttacaattcccttatttccccatctgaaagtaactggggggagaggaggtatcaaagaaaaaagaaaatgatgtgaaatagaccaattctgtggagagaaaaggaaaagagttaactagtgccccctcaaggttcaccttgtctttcggatcatccgggaagggataggacccaagatcctttccatcatggctagatgctctctgttgtcatgggtctgggaaacaaaaacagaactgagcatgggactgaaaagggcatgctaaggatcagctgccaggaaggcaggcaatgtggagaactgagtaggcaggtcctcagcagaaaacaaaggaaccaggtagaagaatgccaggcagtcaagtaagacatcccatcacttacctggaagagggtgaatcccacatagtattcaaagatgatgcagcctatactccacacatcacaaggctgtgaccagcccaactctgggtgagaatgggagggaaaaggtgttatgaggcttaggtggccccaccctcacatcatctcacacacttggacagccttgccctcccttaccaaggatgacttctggtgctcggtaatggcgagtggagacaatggtgctatggtgctcatggtcaaaggtggcactgccaaagtctaccacccgcacagctgtgctcttcacactgcgctcatctcgcttctaggagcagaggagaaagaggatgaacctctgcacccagactgagattccaccagtattctctacattgcttctgagccttaaaaaaggtactgtgatctcctgcctggccttacaagccctgggaaattcctgttttacagcttccaccacatccagcataatacttttagaagtaggggagcaaaaggattaagaaatgattatagaacagcgtgcacatctgtaagcatctgaagactacactcaagtgccrgatatatagttattctgaaaacatgtaacatgtagcaaatgggtttttctgaaaaaatgtaacatgtagcaaatgggtttttctgaaaaaatgtaacatgtagcaaaggagtttctctaaaaatatgtaacatgtagcaaaggggtcaaaggagggagagcttctttaggtctgagatctycattatctccagttagtcaaaggagccgagctttcctacctcacagaaatacacatctcaaaaaagaagtccgggccaggcactgtggctcacacccgtaatcccagcattctgggagcccgagacaggcagatcacctgaggttaggggttcgagaccagcctggccaacatggcaaaaccccatctctactaaaaacacaaaaactagccaggcgtggtggcgggtgcctgtaatcccagctactccagaggctgaggcaggagaatcacttaaacctgggaggtagaggttgcagtgagccgagattatgccactgcacatcagtctgggcaacagagtgagactctgtctcaaataaataaataaataaataaataaataaataaataaataaataaatatataaataaataaagtccaaaccaagaaccttaaaaactttcactctactggaaagttatctgaagtcccctgtacaagttatctcccaatttaagtcttcttaagagatctctccctttcaacctatttagttttacccagttggagccagwcagggagaaaatgtgggaggacgaaataaaagggagaaaacaaagggctcggcagaaggcaaagtggtgcagctgcctgcccccagtaaccaagggcagaccctatccatcttaccttctctaggttgtaggtgagctcatagtctgaattcacaaacagaatattttcaggcttgaggtctgtatgtgtcagcttgttatcatggaggactgtaggggagaaggccaggtcaggcttggtgcaggtggccagagctaactggtatcagctgaccccaggcctggttacctagggcaaagccagtgaggagacaggtccagaatcactagggctgctttcygctctacgtctaaatggaatgcctggtctaagaagctctgctctttctaatgtaagatacatatgtagctcaactgatgtaaaaaaaaaaaaagtttgctttgagttgtagtgtgtacacactttgacatgtgtctagctggcattatgttaactcaattctgtgaaactgtattattttgatgactccagaggaatgatatatttctttgaattccccaccttgccccttagctgaactacatactctgtgttcccatctcctttgctgtgaatgaacatctcatcccagacaaatgtaagcctttaccctaaggagtgtatttttgtctctttatgtttgctgtctgactgatgctttcccaagaaagggagaaaggaaaaggggagggtaattaagtgctttgattccaaaggctttctcttctagctgctgctaggctaggtgtagagtaagagcaatcagtgacgataaagacatcagtcaaggagttaagtcagaagacgtttcaagatgacagtaaatcaaagaactgcagataacagacagctgactgtttaggggcttcaccagtgcacaaccgacagagagatccaatgaagggagggactgccccagagtccacttcggcccaccccactcacacttgacagcctggcacagctggaaggccatgtggcgcacttggtggatggggtagggcaggtagttgttgtctttgaggaaatcgaaggtgctaaggcccagaagctcaaaggagatacacatgtggccatggtagtcaaaccagtcaaacatctggacacagaggctgagaagagagatgggggaagggggrttgtctgatgagctcccatctgcccatcagccatccaacaaggaggtacttcatagctgttgattccacatacttgtgtaaaaccatgccagctagtactaacaccaaaattcagttcagctaaggagtagcctctaccagacccaagaagaatggtactatctgccakgtttttttcttttttgtttttgagatggcgtctcactctgtcacccaggctggagtgcagtggcgcgatcttggctcactgcaacctctgcctcctgttcaagcgattctcctgcctcagccttccaagtagctgggactacagttgtccaccaccatgcccggctaatttttttatttttagtacagacggggtttcaccatattggccaggctggtctcgaactcctgacattgtgatccacccgcctcggcctccaaagtgctgggattacaggcgtgagccaccatgcccagcccaagtttcaaaatatcttcctgcgtcattttaaatagttcaaaaactatttgctgaagagctgtggagtgccaagctccaaacagtatagatcctgaatcatcaaactgtccatcctaaatcccaaccccagcccaactcctgatattcattcaccactagctaccactgggctcctatttatacctactggcctcatatcttggcttaaagtccttattctatttttggactgtgaatgtatgtgaacaaaatattactgcataaatgtctgtggccttatcagcatagttctacttataaaagcttaattcattgttcgatgaggttgatgctcagtcctagggctatgtccagggtatatctctacagaagccattctaggctggggtcaaacgacagagcaatctaacttccctgaaaacaaggggagtggattaaggaatgtcatgggcccccyccctttcctaccctgatgttctactactctaagatgatgaacaaaagatgaatggatgagaaggtctaggactcccctgtctgcctaaaccaggtctagrartctctcccgtgtaggggttggggctctcagcctccctacayacttccttgcttgcttacttcttgttgtcagggtctttctcattgattttctctagcacgttgatctcaagtcgagctgcttccttgtacttctccacattcttaatgatcttcagggcaactcgagccccacccctgtaagttggcaggagaggcttttgctgggttctcaagaatgtctcaaaatgaacagggctgtagggggactaagaaattctacctcaggttaattagcaaaaaagccccatataaccccaaccatctstttagccccacatagtagggagggactgacagttacctgcgatggtcaacacattgtacaactcggccgaaggtcccctctcctaaggtgctaacgatttcatctgaaatgaaagagagcagggtcggggagagggagggagagaaggtggggaatgagctgagttggaagaaaaaaggggacagcaacctggggtggagatgaaggaaggggaacagatacagatggtcacaggggaagaaaacccctgcgtgattcccaccacctttaacccaggggccgtgagagctgggagtggacaacagaggtcaattctcaacagcaactcaaaccacccagataaacaacaccactgagaaaaggcaagaggctgtgactcaggttggcttgggacgttaggatggctatgggaccattacaggctataggattgttacgatttggcttgtacatcgctcttgtagccagtccccgacgtggtagatgaggtggccctcagcgtcgtcctctacactcttggctctccggctgctgtgctgctgtcggggggcagggggggtygrascaagccmrgtgtcggagcgggggccggagggaggcggggtgggtggtagaggggtcaccggtcacaggcgcccagccaggggggacagacgatgatgggggacagtggaagggaacacgtcagatgcagtaaggtggatcggtgtgagaagagagagcggcgcataatcccaagtccccaaacccaaaacaggaacagggagaggcatgggcagagcagagaagtggtgttgttgccaatgtcacccacaaccccatgctctacacaatgcccttccgggcagacacagatctccccttgcccccacccaagcccgcctgccaagggggctacagagcccagggcttgggggaaaaaggcagttcacaagcaaggtccccattaaagagtggaggccgctggggcggagaagctgctcccaacacaataagcccaacatgccagggagagcactgggggtcacaaatgctccgtgcccatccatctccaaagcagatccagggcccttcaagagtcggagagcttccaagaaagtaggcaaactcagtgcccacctcagtgttcatgccccaatgttcagctgagaacaaggatactgctcacttaccagagtcctagagggcctgcagaagagtggggagaggaagggcctgggctggcactcaccgaagatgagcggctaaatgtccggctgcgcctcctccgccgtctgtgcttcctccggctgctgcgctggctgcggtaactgctgttctcccgctgatattcataggaatgccgatagtctgtgtcatagtaggcatctccccgatcccggctataatcgttgcgtctgtagctgccacagtatcgccggtcatacaccctccggtcggacgaacgatcatcataactgctgttggataacaaataccaatgaggtgtatctgttcagatcacattccctaccataccctgtgacaaggtcctgccttagtgaggacaaagagtaatgctagaaaactgttctcaracacttgttgagtcactgagaggaccaagggaccagagaagtgaggtaacaagcacatctgccatgtcaccaaaacctctgaaaaggcatctgcagaaccactccctattggggcctttttcccgctgcagtgatacaaagaaacaaagagccatttttttctcaagctttcctgaatgaaatccccccttgctctaaaccatccttaacccattctttccactgaacataccactaaaatattaaaactgggccgggcacagtggctcacgcctgtaatcccagcactttgggaggccaaggcaggtggagcacttgaggtcaggagtttgaggccaacatggtgaaatcctgtctctactaaaaatacaaaaaaaaaaaaaaaaaattagccaggcatgatggcgcatgcctgtagtcccaggtacttgggaggctgaggcacaagaatcacttgaacctggggccatagagtttgcagtgagctgagatcttgccactgcactccagcctgggcaacagagtgaaactctgtctcaaaaataaataaatgatattttaaaatttttaaaaaattaaaaacacaaagatctaactttgtcttatctgttagcttattagttacctgtagctcccagtcctttgcacatgctttccctctgcccaaagacacttcccccacctgactctacttgtcctccagacatatacagatgttgctttctctgcaatgttttatctgaattacacatcctgccccactccaaccaaacgcactgggtacgtcctcagttcctcattatgtattctaacacttaacactgcagcccaaatggcttctktggttatctatcccgacattaccttcagccagctacttaaggcaatggttttagcatataaccaataagtatttgttgaacaaaggaatgagcgagtgaccctgtgtttgagtatctcttcctgaggcctcaccttcgagaacgracatggtagctgtcctctcgccgacgccgtcgtgtccggtcactactacttgaccaggagcgacttcttcgtcgcttatgctttcggctccgatagtgttcackgtaactcccccggctgcctcgctctgaggagtggtaccttcgaggatgcggcatctggaaggcaagggaaagcggaaataggaaagtttcgagttttcagaaatctcctccaaggactggctgctccaaagatgctaagctgctttcccctcttatttctgcctctttttaccaggcacaacttcctcagtcttcctctgtacttacaattcctccttattggagtacagccacctactaactctggctgaaactctagaaagcccccaaacccatccctcattacccacccctcagttcaagtgttcttattttattcttgagacagagtctcgctgtgtggccaggctggagtgcagtggcacaatctcggctcactgcaacctccrcttcccaggttcaagcaactctcctgcctcagcctcctgtgtagctgggattacaggcacgcaccaccactcctggctaatttttatatttttagtagagacggggtttcaccatgttggccaggatggtctcaaactcctgacctcgtgatcctcctgcctcggcctcccaaagtgctgggattacaggcgtgagccaccgcacccagccagttcaagtgttctatccttattttcttcaaacacagctccatgaaraccttcaggtctaggacacagttcactacagagcaaagtgtatgacgaccgatggagactgccacagtgtatccccgttcaggatctaagatatagatctgtgtgatgctgagttcctcacaagtcaatagagtaaagctttggtttacagttatgataaatgttgtacactcattaagagtacatctcatctcctcaagtagactatcagtgtcctgagggtaggaatccagtctcccaggtttctacatataccaggtaaacgccaaatactatcagctccagggatctgggtcgggccccttgaattaacttaatcatctctcacatctttggccaactctcccttgagaggttttaatgtagtaggccacaaaatacagtcagcatcccatctggcccctccactcttgtgcttaagacgtagataacaactgtttcttgtgtttttttttttttttttgaaacggagttttgctcttgttgcccaggctggagtgcaatggcgcaatctcggctcaccataacctccgcctgcagggttcaagcgattctcctgcctcagcctcccgagtagctgggattacaggcatgcgccgccacgcccagctaattttgtatttttagtagagacagggtttctccatgttggtcaggctggtctcgaactcccaacctcaggtgatccgcccgccttggcctcccaaagtgctgggattacagatgtgagccaccgcgcctggccagtaagtggtttttaattaatatcagccctacttagctgacagctggccaccttccagttaatggaattggaatgggatggttcacaaatcctttttttccttcaaggaaaaaagagaaaaatcactgtcacaatccaggaagatgagaataggaaggcacaataaaatgaaacaggcccagggacataagtcttggtgggggtgtatgagaatcgcgtatgcaaaaggtttaatgattccgatgtctgaccaccattctgtatcacttcttcccaacctccccaaattgaggagggtggtatttgatgcattcttggtgtaactggggccggtagcataccaagctgcaagcacaagattttcccagcatagttatcctaatcagcatagccacataaatgccatctcaccacatactaccatcaaacggcctcacagcactgtcccctcaaaacatcactagcctacctttctcaagtttgaaatcttttgctttttcctttcttactcagaaaatccagaactcctacaggcaaattcttcctgcatgttccaagtgacacggtgatgtattcctcccctccagctttgattggacccgagtccaactttgatattccactccttcacatctctggaaccactcccatccttactctatcatcccttctagtctggttccgcccaagcttcctacaggtcttcttggtacatctaacgcaggccgacctccttccccctcatctccctactccgtcgcttcgtaggtctcaactctcctcctctccaaatctcgcccccgtcccttgcccccaacccaagcctaaccccgcccgccccgcggtcgccatcttttcgcgcggccagccaacccgcgcgctcaccgttctggcggcgaggcccgtgcgcttgtcccacaggaagtccgtgatggcggcgacactgcggccccggatccgtccccgcccctaagatctgcttggcgccgctcgcaccgcccccgcccggggcccgatcccagctcggtctccggctctggcctctccgctccgccgccgccgccgtgagcgagcacgtacgcacggaccgacgtcctgcgtcgcttcccagctaccccctgggctccgcccccaggaccgcgcgcgccaccacgtgctcacgtagttggcaggcatccgcctgtcagagcctcggaggtactgggggcggaagttcataggggcgaggagggtccacagggacaagctggaagccttccaggcccgctatgccccgcctcctgtcctttcccactccgtcttcaatcttttaccctttgcatggagacgtgtggcttagttaggtttggagtttaaaagaaaggattgtcattgtcaatacagtgtcgctgctctgcaagcctgactgtagtgaggcttgatggtgaagtctcattcttctgcatagcctgaaaataaccatttcttaaaacacttcacctacctatccccaggacaaaagtctgccaccttttgtcatcaacaaaagttatgcacgactcggggtggggacacagccatggaggaaaggtttgagcaatggagggttggagaatcgggtgccgaaaagggggacttacttgagaactgtatcctaaggtggcttacataatgtgtgagaaatacaagtttactagggccgggcgcggtggctctcgcctataatcccaacactttgggaagccgaggcgggcggatcacgaggtcaggagttcgagattagcctgatcaacatggtgaaatcccgtctctactaaaaatacaaaaattagccgggcatggtggcgggcgcctgtaatcccagctactcaggaggctgaggtaggagaatcgcttgaacccgggaggcggaggttgcagtgagccgagatcgggccattgcactgcagcctgggtgacagagcgagactctgtctcaaaaaaaaaaaaaaaaaaaaaaaaaagcgcgcatcaccacgcccagctatttttttttttcttgtagagatagtgcctcactttgttacccaggctagtcttgaacccctgagctcaagcaatcctcccccatcggcctcccaaagtgctgggattacaagcatcagccacggcgcttggccagtttactaaatcttaaaaaagaacaggaaggctgggcgaggtggctcacgcctgtaataccaacactttgggaggccaacgtgggtggatcacttaagcataggagtttgagacagcctgggcaacagggcaaaacccagactcttaaaaaaatacaaggccgggcgcggtggctcacgcctgtaatcccagcactttgggaggccaaggcgggcggatcacgaggtcaggagatcgagaccatcctggctaacacggtgaaaccccgtctctactaaaaatacaaaaaattagccgggcgaggtggcgggcgcctgtagtcccagctactcgggaggctgaggcaggagaatggcgtgaaccccagggggcggagcctgcagtgagccgagattgcgccactgcactccagcctgggcgacagcgagactccgtctcaaaaaaaaaaaaaaaaaaaaaaaaaaaaatccaaaaattaggccaagcgcggtggctcatgcctgtaatcccaacagttttggaggcccaggaaggtggatcacttgagcacaggagttcgagaccagcctggccaacctggtgaaaccctgtctctactaaaaatacaaaaattagccgggtgtgatggcaggtgcctgtaatcccagctatttggaaggctgaggcacgagaatcgcttgaatccagaaggtggaggttgcagtgagccgagatggtgccattgcactccagcctgggcgacagagtgagactgtgtctaaaataaaataaaataaaaaataaaaattagccattcatggtgtctcccacctgtagtcccagctactcgggaggctgaggtgggaggatcacctgagcctggggaggttgaggctgtagtgacccgtgatcgtgccactgcactccagcttgggcgacagagtgagactctatctcaaaaaaaaaaaaaaaaaaaaaagaaaagaaaagaaaaaaagaaaatgagaaagagaaagagttagagactttacagaaggaattgagaagtggtcagaaaggtcaattgaaagagaaataatataatctgagaataacgatattaaagtcagggagctgagcaaggtggctcacacctgtagtcccagctactcaggaaactgaggtgggaagattgctttgaggctgcagtgggtcatgatcacaccactgcactccagcttgagcaacagagcaagaccctgactctagaatgagtaaataaataaagtcaggaaatattagagaggagctggatgaaggatggtcagatggaggttagatcagataaccagacatagtttagagaagttccctggaatagaacatggagagcaatcaatgaaggagtcggggagagagaagtaaagatttcacttccacctcctggaacattttcctagattattaattcattcaacaagcatttactgaatgtccactatgtgtccagaattatgccaggtgcaaggttcctgtttctcagagtttcacaatctaacaggagagaaaatctgtaaataaataatgagaccatgctcatgcctgtaatcctagcactttgggaagccaaggcaggaagatcacttgagctctgagttcaaaaccagcctgggcaacatagtgtgacctcatctctaaaataataataataatggtagccctgtgacatgagttgctcaaaacagtggtgccctggctgctgtaaaaaagctctagaatagaccctacctgaggaaaggagagttggaaatgtgttcctaggtttcctagagaaagcaagatctgaaccaactgttcgaaagtgaattggaggagaataccaggcagagaaaatatttgcaaaagcatagagacaaggcagcacaaagtctttcagcatgattggggctgtggctttcaagagagggactgtcagaagagagactgttgaaactaggtccaaattttttgggcctggtacaccatgctaagcagcttaaatgtacccctgtagaagatgggaaagcttgatgggcttcaagcaagtgacacagccatagttggattttaggaaggtaactggcagggaatggaagaagaattggcctggaagaggttgaagactcttttagaggtttccgaagtaatttaagtgaaaaaatgctgagggcttgaaatgaggcagtggtaataagaattggagatgaaggggagaatttgagatatttaggaatttgtagcacttcgcatagcactgcaatttacctgtctgtcgttgggcacagatgagcagtggctttatggctaggcctttgtttttgttttgttttgtgttgttttccattactacatggagatgctaagactaggacttttgtattcatttttgtttcctcagcatccactcaatgacaggcagagttgcacttggtgaaggctgacagaatgaattaggaaattaaatactaggggaagcagttcggaggagaccaaaagacaagaatatgcctaggacagtgttgagagaagacgggagcaggacagaagtccctgggcgagagtggagaagaatcccaaaagccatttccacttcttccattggtccccaatccctctccctcccaagtccttcaagctacaaacccgcgtccgattttcccgccactgcagggggctcctcctccctggttctcagtggatgaaaggccaacgctaggccacgccctctccctggctcaggctgcgctccccgccttctttgctaagccacgcccctctcggagttcctccaggatcccggcgtcccagccccgcccggtcttggcgcggccctcgccagggggcgccgcgcagcccgcccgccgcccgccagtctagcacacaccccctccgccccgcgcgccggcgattccgagcctacgacgcctccgctagagcccgcggggctgcgccgactcctgctctggaggggttgcgggtacctgatggccacagagggctctaggaggccgagcgtgtaagcggggtgggcgccatggaggcagagcagcggccggcggcgggggccagcgaaggggcgacccctggactggaggcggtgcctcccgttgctcccccgcctgcgaccgcggcctcaggtccgatccccaaatctgggcctgagcctaagaggaggcaccttgggacgctgctccagcctacggtcaacaagttctcccttcgggtgttcggcagccacaaagcagtggaaatcgagcaggagcgggtgaagtcagcgggggcctggatcatccacccctacagcgacttccggtattgggggcttggcggggagggcagggtacatcaatcccaccctcgcgggcagcgacaccgggacccggcccgccccaccctccacggtcacttcatttccagcccggggtcccttggtggggcgggagagtcacttgcaccagtctagcctgggaattcctgggcgggtatcccctgccggaggtcctccgtgcctggacaggctgggggcaccagaaggggcaagcagacatcaggggatctccagagacctggatttcctctttcaggaacccgggaccccatccggaccaaaggaactaccagagtttgggacccctgcctcctccagtcctgcttgctggagatctaggaaattatattctaagtatcggggccagtctgagggagaagccgagctccgccatctcccatccccacacccgctccttagcacctgcctagttcagcttgacagactaccaggaaaaatagggacgctgaagggggcggggggtccagacctcagctctggtcgctgtccctagtgctgaaggcgggggcggcggggcggggccgagactcagagtgactgaggcggcaaagcaggggcaggaccaccacccaggtgactcccagagaaggaacagagggtgggggtggggccatttcacagtctccgtcagggtgtacctctacatcaaggtcgctaggggaagacagcagccctgtccttgggggaaatgaaggacagctcttggatgaggcagggatgtgtgcaaagcacctaacctggggaactaaagaagcagagaggaagaggtgtgaatctggagcctcgaaatacagttgtagacccagacattatcttgaatccacatatatacacactccctctatgtctctcttcctcccattgttcctttcactcctrtctttgctgcctcgttcccacccagccagtgcgccttttctagtctcctgtggatctcactctcttccctcagttcactcgcagacggatccccagaagcctggtatccctctgattgtgcttctccattctctatactacatcacccgccaggcttgtgacccacctgtgagtcaggctgtgaagatgctttcatggctaggcgaaccctctttccctcccctctcttagtgtctcacaatacaggattcctcctcagcagccgaggagagaaaagaagaatggccgagggtttttgtttattgaaaacatacagtctaaggggcttcccasaggcccggacttgaggaagtttctttcagggctgaaaattgattttgcagtccgagtcagaaggggctagctcctgagttgacactgggattaggtgtgtcctagaattaaaaccaccataggtaactgagtccctgagattttcctgtgccattctctgaatgagggcttcacacagttccctcttgacctcttctttccacggtgtctgccacagcaatgtcactcacccctgcccatgcctctgcctgtgctcagccagagtcccagtggacacagggaggccagaggaggaaaggtatgcagaactcaagccttgctgcttcatgatctcctgtggagcttctctgtgtgtgcagccctgtttgaggttctgtggagggggaagggcatccctggaaagctcaattcagaggaaggcaggatagaccaccccaccctgagacatggatgagcaaacctcagcagaggaacaggatccgtgggtccaactgtgttggagaagaggaatggggtggagaaggctggggagggcatgaggtcctagactagaatgggcagataactggagatgggggaagcagcagccttttcagaaatctggggataaagagtgagtgagtcataataccaactagtgcctgtaccacactgtcacatctattgtctccatgtaaatgttttcagcaatgctgtgagattagcacaggatactttagcttttttttttaaccttaaaaatatttagcaatggtgaggtaaatgatatatagtagggatatgtatgtatatggaagagtaattttatttatttatttatttatttttatatttgtttatttattttgagaaggagtctcactgtgtcgcccaggctggagtgcaatggcacaattttggctcactgcaacctccgcctcccgggttcaagcgattcttctgcatcagcctcctgagtagctgagattacaagcgcatgccaccacgcctggctaatttttgtatttttagtagacgtggggtttcaccattttgtccaggctggtctcgaacacttgacctcgtgatccacccacctcagcctcccaaagtgctgggattacaggtgtgagccaccacaccggcaaatttttatttatttatttattttatttatttatttatttattttgagacagagtctcactctcgcccaggctagagggcagtggagcggtttcagctcacggcaaccttcactcccaggttcaagcaattctcctgccttggcctcctgaatatctgggattgggattacaggtgcgcgccaccacacctggctaattttttttttttttttttgagacggagtctcgctctgtcgcccaggctggagtgcagtggcacaatctcggctcactgcaagctccgcctcccgggttcacgccattctccttcctcagcctcctgagtagctgggactacgggcgcccgccaccatgcccagctaattttttgtatttttttagtagagatggggtttcaccgtgttagccaggatggtctcaatctcctgaccttgtgatctgcccaccttggcctcccaaagtgctgggattacaggcgtgagccaccacgcccagctatttttttttttttttttttttttttttttttttgagacagagtttcactcttgttgcccaggctggagtgcaatggcgcaatctcggctcatggcaacctccacctcccaggttcaagcgattctcctgcctcagcctcctgagtagctgggatcacaggcttgtgccaccactcccagctaattttgtatttttagtagagatgaggtttctccatgttggtcaggctggtctcgaactcccagcctcaggcgatccgcccaccttggcctctcaaagtgctgggattacagatatgagccaccgcacccagcgcctggctaatttttaatttttttttttttttttttgagatggagtctcgctctgtcacccaggctggagtacagtggcgtgatctctgttcactgcagcctccgcctcccgggttcaagtgattctcctgcctcagcctcccgagtagctgggactacaggtgtgcaccaccatgcccagctaatttttatatttttcgtacagacggggtttcaccatgttggccaggatggtctcgagctcttgaccttgtgatctgcccatcttggcctcccaaagtgctgggattacaggcgtgagccaccacacctggccttcttctttttttctttgaggcagagtctcactgttgtcacccaggttggagagcagtggtgcgatctcggctcactgcaacctctgcctcccgggttcatgccattctcctgcctcagcctcctgagtagctggggttacaggctctcgccaccatgcccagctaatttttgtattttttgtagagacgaggttttgccatgttggccagattggtctcaaactcctgacctcaggtgatccgccagtctcagcctcccaaagtgctgggattacaggcatgagtcaccaggcctggcctaatttttaacttttgtagagataggatcttactatgttgcccaggctggtcttgaactcctggactcaagtgatcccactttggcctcccaaagcgctgggattacaggcgtgagccatagcttttcttttgagacagggtctcgctctgtcagtcaggctggagtacacctcagcctcctgagtagctgggactttaggtgtgcaccacctggcctggctaattttttttatttgttgttgagatgaggtctcactatgttgcccaggctgtttcttgcttcttttgctcagcattgcatttgtgaaattcatccatagggctgaatgtagctgtagttgggtaatttcacagctgtatggtatgccagcccataaatagtgtatttatctacttatctgtctacatttttctacacaaggacatgtgtgttgttctcaaatttaatgctgctataaacattcctatgtgtatctcctggagcgcatattttccttggatgtgtctatacgtaggaatgggattgctgagttgcagggaatgcaaatgtttaacttcactagataatgctgaactattttcccaaatggtggtcccaacttatactcccaacagctgtaaacagtcattctgttattgtgtatctttgcccattcttggccatgtcagcctatcttctgtcagtctagtggctggtgaaatatcctcatggtcttactcctcatctcactcccaccttaggttttactgggacctgatcatgctgctgctgatggtggggaacctcatcgtcctgcctgtgggcatcaccttcttcaaggaggagaactccccgccttggatcgtcttcaacgtattgtctgatactttcttcctactggatctggtgctcaacttccgaacgggcatcgtggtggaggagggtgctgagatcctgctggcaccgcgggccatccgcacgcgctacctgcgcacctggttcctggttgacctcatctcttctatccctgtggattacatcttcctagtggtggagctggagccacggttggacgctgaggtctacaaaacggcacgggccctacgcatcgttcgcttcaccaagatcctaagcctgctgaggctgctccgcctctcccgcctcatccgctacatacaccagtgggaggaggtggggtggggagatggcgggcggggcagtgggtgggggatgttgggggagaagggggcggggcggctggtggacttctctaggaagatgctatgggtggggctcctggtgaccttatagtgtggggaagatgggtggggcttccgtgcgtgagctctctccaaaactggtgggggagaagcaggaacagaatgagggttcrggggatggggcctggggtgaagatggtggcacaggagggtggagcacagctgccggacacactttagagttagctggatgctgggcggaggatgaggtgtggaagaagctggagcttcagcttcagagcagcagagtttagtggttcagactgtgggctctgcagtctcattgtctttggtcagatcccagttttattgtttactataggagacttggttttctgttctataaaatgagagtgttaaatacacttacctgtgataagactgttaggattaaaggaattaatacatgcaaatcacttagaaaggtgtctagcacatactaagttctcagtgaagccactattatatattattattattattatttttattatactttaagttttagggtacatgtgcacattgtgcaggttagttacatatgtatacatgtgctatgctggtgcgctgcacccactaactcgtcacctagcattaggtatatctcccaatgctatccctcccccctccccccacccattatatattattatgactggaaaggagagggctgctggattaattcttacacatatgccctggagacattacactgtgaaatgccctctctcttttctaggctacacctgggcagcttgtgcaatagatttgtttrattctctgctgtgacacttactatgtggttctgggcacatgactgacctcagctttcctatctataagatgagagaaataagaaactrctttgcattagctatacatgtgtgccacaaaactccacacaaatgaataatagttgtattttttaattcatgggggctggggctagggagtagttcagaagagaatttgccaggctgggaatggaggaggacaagcagggaggggttcctgtccacagcagctcctcctcggactcctcagatctttcacatgacctatgacctggccagtgctgtggttcgcatcttcaacctcattgggatgatgctgctgctatgtcactgggatggctgtctgcagttcctggtgcccatgctgcaggacttccctcccgactgctgggtctccatcaaccacatggtggtgagaagtccccacagctctgcctttcctgggccttcttagggctcttctgcctgagtagcagggatggccacagggagcaggaggtgggagatgatcacaacagaaaataggagcgaggaggtggggaggagggaggaaaggggaaggagacccagaagaagtgctcgtgtgttggagggagcaggcaaaggaagggtacctacccggaagctgaggcccccaagttgcaatagaggacccttttgcctcagggccccccagaaccaaacttaagtgcctgccaggaggaaggcctgcagtagaaggggcagacagaaagaccaaagaaggaaaaggggcaggcagagaatgaggctccgaggggcccatgcccagctctgcaatatactctgcccctcagaaccactcgtggggccgccagtattcccatgccctgttcaaggccatgagccacatgctgtgcattggctatgggcagcaggcacctgtaggcatgcccgacgtctggctcaccatgctcagcatgatcrtaggtgccacatgctacgccatgttcatcggccatgccacggcactcatccagtccctggactcttcccggcgtcagtaccaggagaaggtcagcagggacaggagagggaggtgtggcatggaggggtgttggagactgggtagcctgacttgaggcccattctgatgtgtgcccctgttgcgtctctgtttcctttcctgccctgtgtccatttgttccctgcccctgcatgtaccttttccttgtttgaacctatgcctgtgcttggcccctctgctgtccacgcctgggttttcctatgactgtgctctgtgtcttcccggtatccatcattatccgtattcctctgtggccctgtgtatccatgtctggttccacgtttcacccctttgagtttgacctgtgtctctgaccttccgcacacacaccccactgtgccggccccaaatctctccctctgtcctcttgcccctggcaatgggctggccctccagtacaagcaggtggagcagtacatgtccttccacaagctgccagcagacacgcggcagcgcatccacgagtactatgagcaccgctaccagggcaagatgttcgatgaggaaagcatcctgggcgagctgagcgagccgcttcgcgaggtggggctgggttgggcctggaaggggggctcttcagggacctggagtgctgtctggtggtaggggctattggtcagcaggtgctcctatagggaatgaggcctgcagagggccccgtgggaggccaggtatttgggctttcaggggctagggtctttcttgaaggccctttgagggtgaaggatacatgaggagggactatagggatctctgtttttgggggatggtcctgcaagggctcatgggaaagatctgaaggcaggagcttagggatggtcccaggcccactgatgcctccccatcctttggcagaacatgaccccaggggtggggtttctggaagcggatgagctcggtgggatcatctcaggtcaggggcacagcctgcctgacaggcccctcccctgtccaggagatcattaacttcacctgtcggggcctggtggcccacatgccgctgtttgcccatgccgaccccagcttcgtcactgcagttctcaccaagctkcgctttgaggtcttccagccgggggatctcgtggtgcgtgagggctccgtggggaggaagatgtacttcatccagcatgggctgctcagtgtgctggcccgcggcgcccgggacacacgcctcaccgatggatcctactttgggggtcagcaggcctcagggagggtggcagggtcacgagcagacagtggagagggcaactgctcccaggctctgggtccctgccccagtacgctgcagaatcacagagctccagcccctccccaggcctactcagtgagaatctctgggctggggtctggagctctatagtttttgtttgtttgtttgtttgtttgttttttgaggtggagtctcgctctgttgcccaggctggagtgcagtggcgcaatctcggctcactgaaagctctgcctcctgggttcacgccattctcctgcctcacactcccgagtagctgggaccacaggcgcccgccaccacgcctggctaattttttgtatttttagtagagacggggtttcactgtgttagccaggatggtctcgatctcctgacctcgtgatccgcccgcctcagcctcccaaagtgctgggattacaggcgtgaatcaccgtgccaggcctgagctctgtagtttttaaagcttctcaggagattctaatgcacagccaggttgcaaactactgggccagagggccttttagaacccttagacagtgaaatccaaggatcctatgagatgagggaaaggcaggagtgaagcagagctgtcctggagcataagctttttggagctgcctggtggcgtgtttcagggacccagcctgtggcagtaggggcagttcagccttccactgcccaaagtgacctgaggcttatataatctctcagtccccaaaccacccactactcccatcatgttgcactttgctctttgatactgcttttctccttcagggctgccctcagtgtttattcaagggggtgggaggggtgggtacactgagttgcccaggtctacctcttgggattgagcagtcggggaggggtgggagttaaagtggagtggaatcactgggaatttagggccagcaagacctgcctggtcatcagccttcatatggagagagtaggaaggacagggagcagtaacccagtaattgtgggggtctggagaaagacaatgcttggggtgtttagggttcctggggcacggaggtaataggtaatcaatggtttctcccaagtctagggaggagccttagaaagttgggtccactgctgcaggctcagcaagaggagttctggggacaaggacggggttctgaagcttcctcccaatttctgcagagatctgcctgctaactaggggccggcgcacagccagtgttcgggctgacacctactgccgcctttactcactcagcgtggaccatttcaatgctgtgcttgaggagttccccatgatgcgccgggccttygagactgtggccatggatcggctgctccgcatcggtgagacctgtccaccccatctgctctgggtccagactgtgctctcaccccacctccaaagcaaggagcccaggctttagggctccagggtcatatcccaatccattcagtcccaacaaatgctccctaacaggactttcaacactgtggcccactgtccctatccctcagcatgtccttcccaggagagatagcatcccaagcccccatgtcctgagtcctccttcccctgagtaccagtcccctgaccctcgctgtctctgatacataccctcttcctccaacccccatctcaacccccatagccccattgccatactactgactcccatcccctaccctcaaccccaccccatcctgatagtctcatactctttgatatccaacatccatcttggattccttccctatccttaacttctccctcccggtacaacttctaggcaagaagaattccatactgcagcggaagcgctccgagccaagtccaggcagcagtggtggcatcatggagcagcacttggtgcaacatgacagagacatggctcggggtgttcggggtcgggccccgagcacaggagctcagcttagtggaaagccagtactgtgggagccactggtacatgcgccccttcaggcagctgctgtgacctccaatgtggccattgccctgactcatcagcggggccytctgcccctctcccctgactctccagccaccctccttgctcgctctgcttggcgctcagcaggctctccagcttccccgctggtgcccgtccgagctggcccatgggcatccacctcccgcctgcccgccccacctgcccgaaccctgcacgccagcctatcccgggcagggcgctcccaggtctccctgctgggtccccctccaggaggaggtggacggcggctaggacctcggggccgcccactctcagcctcccaaccctctctgcctcagcgggcaacaggcgatggctctcctgggcgtaagggatcaggaagtgagcggctgcctccctcagggctcctggccaaacctccaaggacagcccagccccccaggccaccagtgcctgagccagccacaccccggggtctccagctttctgccaacatgtaaaacctttgagtacatccagccttagttcttggggtgcagtagtatgtacccaagggcagatgcctcttggggaaggccatggggacctgaaacattgccccatggaaatgtcgaccctgtgcggacattccgcatactgccatgaagacggtctctgtgtcctcagctcaagaatcctgtagcttgtcccatcataatccattcacccgttcatcatgtgtactgagcagctaccatgttcaaggtaatatgccaggcgctgtatgtctccactgccaagtagaagtgactcaaaaccctctgacaaggatattcccttggctatggtcctgccaggtgcaggcccaggcccatgaccccacctttactaagcacaagtacttgccactgccatcactgccaagtaactagatgtctctgtttccctgccaatgatcctgcaggttctgcccggtctggttatcttcctgttcctgtagcatagccaggcactgccartcayctgtgcccccattgctgtcagcagatgtcttgggtcctgagtgtgggtatccacttttacccgctcactgccacctgtggacactctgtgtctaccctctgagtgggaacatacttctaagttccctgcagtctctgtcctgtggtagaccatctttttgtaaactgcgagcttcctcttccctgtaccctctgccccagtcgtgaccccctaaaagttaaggggtagttggcacctccttattaatatgccagcctagatcccccccggtggaggggcaaatggctgaatccttgtgtgatatttttttcttcgcttgtttatttattcatttatttaattgtatttattcatttactaactttatgtgttaccaattaattttgtttacccattcctttatccatccctcccctccttttcaggtaaggagacaggaggagtaggaggaggcagggcctctccatgccagcctctgtggtccttgcccaaacccatcagcgcaatacttgaaccttctcccaggtaggggcaggaggagccacatgagagagggagaaggaccgygtttacctttagagttttgttttgttttttccttctgagtttgctgttggtgcaggaataagggaaaggcccaaggtatccaagcctggggaagggcaggccagccagcacctctgccttctcagggacaagagtagtcctttaccaccctcactctgcctgtcccctctcctactctacagcattaaagactgtgggaccaggaccctaagtctcctttccttctgggtggggagttctggggttcttggtgtgtgggagaagttttataattgcttccaaacagctgggtttaaatataaaatagacacactcatttttggctcttggtttgtgtgtgggaacaacatgagtgggaaggaatttctgggtgcagaaggaagcagccggggatttgaccaagcagggtatcaggcaggcatgagagcagccaggacagtggtctacaagcccagcacggaggttgtgaagacagtgacaaaatcagctgcccagccctcacttctccccagcatccatcccacccagttttcccaaaagcgtggactttcatgtaactgttagtcaccatgaaggggtagcctgccctggcacgagatgcccagattatcatgagggctacatatgagaatgggagactgtggacaagattgccctgtctcccctctcccccaccccaagggatgggatgcctggggttatggaattaaccagccaaactgggattaaagactcaaggcatcttagggcctgctgagcagattggatgcagrgaatgtacaattggtgctgttgggtggccagtgcataattggacacagactttcaggacctgtgtgaaatggagatggggaaggggcaacctcgaaggggctagatgacagttatagtctcagataggcctcaggtagggagggtcaggaatagagaagagaggacttaaaggtggggctttggaggggtgtgggctggagaacgtagactggggaggaagggatggggtacaagggtaggctgggccagaggrgggaggggcgtctcaggatatgcttagcaccckcatgatkttggtgtagccggagccaggtcvccagsctgtcaccacaatcaccaggtctccaacacggaggaagccacggagctttcctgggggagggaaagaaaacaaatcattggacaggtgtggtggctcacacctgtaatcccatcactttgggaagccaaggcaggaggatcacctgaggtcaggagtttgagaccagcctggccaacatggtgaaaccttgtctctactgaaaatacaaaaattagctgggtgtggtggcgcatgcctgtaatcccagctactagggaggctgaggcaggagaatcgcttgaactcaggaggtagaggttgcagtgagccgagatcacaccactgcactccagcctggggacagagcaagactccatctcaaaataataataataataataataataataataataataataaaagaagaaaagaaagaaaattagtcattgagggaccaggccagccctgtaacgagaaccagccaccacctttcaccacatcaaggccatcctgtagggaatgaggcagtgaagtatgtcccacgggtggcatgcagggaatgtgaccactgcagtatattaaaggtgtaagagatgccagcacggtggctgacgcctgtaatcccagcactctgggagtccgaggcgggcggatcacgtggtcaagacattgagaccatcctggccaacatggtgaaaccctgtctctactaaaaatacaaaaattatccaggcgtggtggcrcatgcctgtagtcccagctactcaggaggctgaggtgggagaatcacttgaacccaggaggcagagattgcagtgagccgagatcgtacccctgcactccagcctggcgacagagcaagactctctctcaaaaaaaaaaaaaggtgcaggagtatctgtgggctagggcagagtgtgttgctaagtagcacgsccgtctgcctgtgtggctatgctgatggaagaggtatttgtgatatgccagactgatatctcagtcttagtgactctcacagggaaaacctgggaccacaggagagaggcaaggccctttgagtgggtatgggaagctgggttggggggctcctgatacaaatggtaggagtggcagggaaggtctaggtagctcaccactttcaatgccaaattgcacccggcgatctacatcatctgcccagatggcttctggaggttcackgtaaagcaaggggaagactcytyrgcatmagtggayctggmgggcagcctrggcagagyrggtgacaryaatgactgctgcccgaggtcggtaccgagacagaagctgggctgagctggaggaggcagagaaggtcagcccagaacagcaagaaagtggtgaaygaggaaaggagaatctttgttccagttccaggtgtcactaacaagctgtgtgaccctgggtaagtcatcatacttctctgggccttggtgttctcacctgtaaaatgagtgtaagaatgcctgcctcccaggccgggagcggtggctcatgcctgtaatcccagcactttgggaggccgagatgggagaattgtttgagcccaggagctggagaccagcctaggcaacatagtgagaccccatctctgcattaagaaaaaaaaaaaaraaagaatscctgccctccctaccacacaagaaagatatgagataatacagatatatcaaatgagataataaggagaaatctctttaagaaatataaaagctggccaggcacagtggctcatgcctataatcccagcactttgggaggccaaggagggtggatcacctgaggtcaggagtttgagaccagcctggctaacatgatgaaaccctgtctctactaaaaatacaaaaaatatgcagggcgttgtggcatgcgcctgtaatcccagctactcggaaggctgaggcaggagaatcacttgaacttgggaggtgaaggttgtggtgagctgagattgcaccattttactccagcctgagcaacagagcgagctgccgttctcaaaagaaaaacaaaacaaaacaaacaaacaaaaacccaagagtataaaacccttttgagaaagtccattatgtgcttaatttactatatagatattaagtactatctagtacttaatatctcctgttaatcctgccaaccccatgaagaacaaatcattaccttgtcctgttcatgaggaaagasagcaggctaatagagctacatttctgagtaaagacttaaactcagacctactggacccttctgtaatacctcagtattggtaggctctgtgggccgaatggacttgcctctgagccccagaagcccaaatggccttgaagccaatgtgcccagtgatgccgctgtccccttccagcccccagaagctcactggcattctgtctctcctggcctccagctgtcattgctgcctctcctcttgtctcaggtggacactcttcacccctggtgaccagactaaacccaagcctggggcccgtcccagcccacccctgacccaaagctccatctggacattcccaatatccccctcaccggccagttgtggtcagcacaatgatggcagcagcacagcacttgaaggcagcctccayarcaycaatggcggtgacctcagtgggatcacggcttagtggcgctgcccgacgtagctcctcaaacagctgccggtggtacactgcggcctctgcctcccgggcaatctgcaggtgccagaatgttagtctgggaaggkgcactggggtatggaagggrtttggttccctggcccatttgcttttcattctgagctcctaccgcatgctgcatcttcaccgcttccacagggaagttgcccttggcaryctcccctgacagcatgatgcagtcagccccatccagcacadcwytggygacatygcttgtcyctgccctcgttggccggggcttggtaatcatgctctccagcatctgggggacagcgtggatgtcaaagttgtaggactcacactgtgactgrggaccctgcccaagctacttctctgacacccacactctcagagtgtcccaaaatccagggtcacagtcacaacccctgaaaataggagtcaaagtatatttaactttgtcgtttggtcacaacccctgaaaataggggtcaaagtatatttaactttgtcgtttgaggatcaaacacttttcatccaaatgtgctataaacctacagtgtgggctgggtgcagtggctcacacctgtaatcccagcactttgggaggccgaggcgagtagatcacctgaggtcaggagttcgagaccagtctggccaacatggtgaaaccccgtctctactgaaaatacaaaaagtagcctggcatggcggcggtcacctgtaatccccactacttgggaggctgaggcaggagaattgtttgaacccaagaggcggaggttgcagtgagcggagattgcgccactgcactccagcctggatgacagagtgagactccgtctcaaaaaacaaaacaaaacaaaataaacccctacagtgtgggtattcacccacaggtgtccctaaaacccacagagtgccgaacctcaaggcctcactccagacctgtgtggcacagacaacaggcttgcccgccaagttgcagcrcccartcatcatcttctgakccaggaaaacmttctctgctgggatctcgawgbctaggtsccccbgtgmcaccatgatgccgtcgctcacctccaggatttcatcaaacctgagaggttgggagaatcaaggcagaggcaggcaggagaagaaaggtgatggggaatagcgacagggccgaaggggaacagagcccaagcctcacctcttcacgccttcgtggttctcaattttgctgatgatcttgatgccgtgtccttccggacccagagcagccctgacggcarccacgtygctggctttccgcamaamggaggcaaagacgatgtycaccccatgctccacccbgaagcgcaggtctcrgacgtcctgctcggacagcchgggcaagtccacctgggcccctggcaagttcacgcccttccggctgcccaggacgccgccgttctccacttgggtcaccagtccctctgggcctgcggacatggaaagagccagctgcggtcaggggtgaggacggggcacagttgcagcagagaggacactggggcttggacccgcaagaggtcaggaaccatgtcctcctcatctctccgcccttgttctgggcttcgcccggaagaggcacagatggacgtccgtggaagaaacgacccacccatagtccagcccaaacccagggtgagcgcagagtctacacgctggggactcctgggacgggctggcaaaaacgcgtggccaggggaaggtgtgatcggtctgagggctgatgggggagccaaggagaagggaatgtgcccagcgcacggatgtggtcagggcgggaggcgcgtccgcaccgattttctggaccactagggagatgagcccgtcgtcaatgtagatgcggccccccaccggcacgacccggacaatattggggtagtccacycacacggtgttcgcgttcccccgcgtccggaacgcggggtccacagtcaccagcacctgggagcccttcaccagctccacttccgactctggaccctaaggagggagccagaggagatgtgagttctgagccccggagtccgggacccgcccctgcccacgcctgggcccaaccctacrggcgccgcctttccggccctggcccagcgagtcccagccccactgctcaccccctgcaggatcccagtgcggatctccggtcccttggtgtccrgggcgrtggccacgggccggtagctgagtggggaacctgcaaagctctccaccgcctcccggacgttggcgatgkactcagcatggtactgggggagggagcggagcgagggtttcaggggaaggtggccaggacctcgaggcatcctcctgccccacccactgcccggcggccmgtcccgcacctcgtgggagccgtgggagaagttgagtcgcgcaatgttcatcccggccttgatcatctccttgaggcgctccacggagcgagatgctggccctagaaccagagattcacgttcagacaacgttcccccagaacatgagaggcaaccaaacccaacccattaccattctcagaacgcctcacgccacaggsstcctgttacctgayctttattccctgatgcaacccctgcccacagatcacagactccccttccctctcaagccaacatccatccccttggggaggcagcagtgtggaaatcggaggggagtgccctccgccaggcctgaggtcactgtatgggcatgtatgggcactgtatgggcatgggtatgtaagtgctgcttgcccggctaccccagggtatggggtgtagggcaggggctgggagccaggtgagggcgtttgggtgcgggcttttagagctaggaggcctcatggactgaggagagctgagttctatcccatgcctgcactgctatggggcagctgctagccgagagcaggttggctmmttcttcggtccctatctgtctttccacttgtgcactaggtctcctccttctcacctgctcaaggacataaattaagccattctgtggtcctctgtgacacccatgttttccttttctttttctttctttttttttgagacggggggagtttcactcttgtcgcccaggctggagtgcagtggcaccatctcagctcactgcaacctctgcctccccagttcaagtgattatcctgcttcagcctcctgagtagctgggattacaggtgtgcaccaccacgcctggctaatttttttgtatttttagtagagaaggggtttcacyatgctggccaggttggtcttgaactcttgacctcaggtgatccatccacctcgccctcccaaaatgctgggattacaggtgtgagtcaccgtgcccagccatgttttccttttttactggatcatccccatccgcaggtaaacctactgttatttctttcatcattaaaaaaaaattctcttaatctcctggtttcccctcagtcccagtatttgctctcacttgcagcaaaactcatcgcaagagttatctgtacttgctacctctagttcccctcccccattctcccttgaacccaccccactcaggcgttggcctccatctctccactgcatctgttcttgtcaaggtcaccaagaacctctgtgtttttgctccatgtaatgctcaatgctcagtcctcctctattggcccatcagcagcctgaacatacatccttctttgacacactgtcttcacctgacctccagggctgcaccctctcttggttgactcctacctcactagctgctctttcccagtctcctttccttgttcctccccttaacgttagataccctgttctcttctccgtcatttcacctacactcctttggtggtctcaactagtctcatggcttgagataccatctatatgtagccaactcccaaatgtctctccaatccagacctttctcccaaacccagagttgtgtacctgactgccccctctatcacatttggatggctaataagcatctcagactcaacatgtcccaagcaaacttctgctctccccccaaccccttccaccacagtctttcctgctcagtggctaatgcatcgttccagttccttatggcaaaaacctcagagtcacctgtcacctttgactcctttctttctcgcccacactccataccccatatccgatcaattagcaaatcctgtcagctctacctgcaaaatacattcagaatctgaccacttctcaccacctcactgccgccaactggtctgagccagaaatactgcaggggcacccttccccccaccccccatctattttcagtgcagcagcaggggaggggaggctctattaaaacataaataagagcttgtcattcccctgctcaaaaccctgcagcagtttctcatttcactcggaggaaaacgcaactcaaattctaaaaatggcctacaaagctgcacctgatcttcctgtccgtacacagtctcttcatgtctgccgctcttcccccttgatggtttctagctcttctaaccttcttgacttaggccttgacactgactgatccttcttcctggaattctcttcccccaggtctctgcatggctaattctctcatctccttcaagtcttccctttggtctcatttactcaataataactgacctccctatttagggctgcaacctgtcttcaccctcgtactcctgatgcccttatcacacttgatttctttccccatagcacttaaaactttcactttttctttcttttcttttcttttttttttagatggaatctcgctctgtcaccaggctggaggacagaggtgcgatctctgctccctgccttccagttcaagtgattctcctgcctcagccttccgagtagctgggactacaggcatgtgccaccacgcccagctaatttttgtatttttattagagacggggtttcaccatgttggccaggatggtatcgatctcttgacctcgtgatcagtctgcctcggcctcccaaagtgctgggattacaggcatgaaacaccacgcccggccttttttttttttgagacggagtttcgctcttgttgcccaggctggggtgcaatggcacgatcttggctcaccgcaacctccgcctcccaggttcaagcaattctcctgccttagcctcctgagtagctgggattacaggcatgcaccaccatgcccggataattttttgtatttttagtagagacggggtttctccatgttgaggctggtctcgaactcctgacctcaggtgatccgcccgcctcggcctcccaaagtgctgggattacaggcgtgagccaccgcgcccagcttttttttttttttttaaaaacaaacaaacaaacaaacagagtttcgctcttgttgcccaaactggagtgcaatggcgtgatcttggctcactgcaatctctgtctcccgggttcaagcgattcccctgcctcagcctcccgagtagctgggattataggcacatgccaccatgcctggctaattttttgtatttttagtagaaacagagtttcaccacattagccaggctggtctcggacccctgacctcaggtgatccacctgcctcagcctcccaaagtgctgggattataggcaagagccaccatgcccggccaactttcactcctttctttctttctttctttctttctttctttctttctttctttctttctttctttctttctttccttccttccttccttccttccttccttccttctttcttttctttctttctttcttgcctgcttgctttctttccttccttccttccctccctccctccctccttccttccttccttctttctctctttctttctttctttctttccttctttctttctttctctctttctctctagggtctcgtctgtcacctaggctggagtacagtggctcgatcatgactcactgcagccgtgacctcctgggcttaagtgatcctcccacctcagcctcctgagtagctgggactacaggcatgcaccaccacactcaactaagttttgtattttttgtagagatgggttttgccatttacccagactggtctcaaactcctgggctcaagcgatctgccaaccttggcctcctaaagtgctgggattacaggcatgagccactgagcccagcccactttttttttttttttttttttttttttttgtgagatggagtttttctcctgttgcccaggctggaatgcaatggtgtgatctcggctcaccacagtctccgcctcctgggttcaagcgattctcctgcctcagcctcctgagtagctgggattgcaggcacgcaccaccatgcccggctaattttgtatttttagtagagacggggtttctccatgttggtcaggctagtctcgaactcctgacctcaagtgatctgcccacctgggcctcccaacatgctgcgattacaggcatgagccaccatgcccggcctcactttctaacggaataaataatttacttattttaaataatttattgtgcttactatttattgtcatactcagctagactgtcagctccccaagggtagggatttttgtctgtttttttcactgatctactcccagggcccaaaatcttgtctactatatgctcaacaaatttttgttraatgaatgactgtgtcaaacatggagaagtctcaaaggagacaaaagatgaagaagcacctcaagaaataccaataggccctgtgtggctgcagggggatgggagtgcttacygatggtggcaatgatgctggtactgcgagcagccacgggctcggrgtcaatgtccagtaggcagaggtgttccaggaaggtgtctgccatagcagctggcagctgctgctgctggaagaaggcagtgcccagctcctgggtcagttgggccacactggcccgccgcagataccccgctggccctgtggtagaagggggctcagggactgcatgtcacctgcccttcctccccatgccttcgtctctcagcataccctctgttccttcccttcttatgagctgggcatcatgcatatattattttattatgtcacaaggatcctataaagcaggtactgttaaatgttctataattatccaattttatggataaagaaacagaggctgagaaacaggaaataaatggtccaatattatacagcttctaagtatggatcagctaggattcaaatctaggtctgactaactctagcccaagttcttgaccactcagttatactgaccccgcacaacccaggaccccccgacctgcagctactgatgaccctcaaccccaccaccccttgatgtctagtccccagcagcctcaccctatgcagacccagaatcacccagttcctgctccaaaggtctctgttttctcccttccaacccctggctactggctggcttccccaccccatcctctgagtctccccaggcttctcaaagctgctacagacacagaggtccctgtagcttgacccatcccagttcagaggagcccccgattccagccgcaccttccatgccactgcacacctctctgggtctccctctctgtgggtctgctccacactgttgggttgtcagaggcatgaggcccagctgggctggggatcagttctgcagactggttaaagtgtcaccactgtctcctgttccattggaagccctgtatgccaggggccagagtccaggaaccacgggagtgccccgtggcttacatgctgtggctctggcctgcctatagggcctggaaaagacccaggccagggtccataatttaacacacgggaggctctgaagaacgtacgttcctctccaaaacccacctagccagtggctgatgtggatcatttatgccctccaccctggctcctagttttcaccctcattttcctcctatgttccatggcttctgtctccccttcttacctcctggagccccaatcaggatggactttgctaagtctctttgggacttagagacccatgaccgaagctgcagggatgatatgttctcctggatcgacatgctttcagtgtgggcctggggctgcgggaccatggaatgagagggagaggatgacaaaactgctggtcttatctaagggagacagagaagagaaaaggggcacacccagtaggccaccctgtccccacagaatccctcccccagaacggcctgctctctgccctcatctcctggcatttcctctcatccttttttcctgataaattttcaatccattcatactatctggtcatccacgtgaatagatattttttttttggccagtcatatggccccattttctttgtactttactgaagttagctctagtgaatccagggagcaggggctgtagggtggggctggagcctgaagaaagacaaaagggatcactgtgataatatggtggggggagggttacccagttctgaccactttttttctctgtctcaaccaagaaatgcagagtgccttcaccactctgtaacctggccagctgcatgttttcgcctacatgtttgaacccaagatggtaccttgaacattctcagacactgataaacttgattaggttgttgctggaaacactgaaagatcgactattttgctaaacttatagactcctacccccagggaaattttctttcctccctcccttccttccttttttctttttcttttttcttttttttcttttttttttcacagagtctcactctgtcgcccaggctggagtgcagtggcgcaatctcagttcattgcaacctctgcgatcctcctgcctcagcctaccgagtagctgggattacagacgtgcaccaccacacccagctaattttgtttttcttttttcttttcttttctttttttttttttttttgagactgagtctgactctgttgcccaggttggagtgcagtggcgtgatcttggctcactgcaacttctgcctcctgggttcaagcgattatcctgtctcagcctcctgagtagctgggattacaggcatgcaccaccacgcctggctaatttttgtatttttagtagagacggggtttcaccatgttggtcaggctggtctcgaactcctgacctcaggtgatctgcctgccacagcttcccaaagtgctgggattacaggtgtgagccactgtgcctggcctaatttttgtatttttagtaaagatggggtttcaccatgttgtccaggctggtctccaactcctggcctcaagtatccaccagcctcggcctctcaaactggtgggattacaggtgtgagccatcatgcccagccttgttttctttcttttttttttaaagggtctcactctgtcaccctggctggagtgcactcgtgtgatcatggctcactgtagccttgacttcctgggctccaacgatcctcccacctcagcctcccaagtagccagtactacaggtgtgcaccaccatgcctggctactttttaaatttttatttattaaaaatatttttttcctttctttccacaggtgctgactttttatttttgtagagactggtgtcactctgttgcccaggttggtcttgaacacctatgctcaagtggtcctcctgccttggtctcccaaaatgccaggattacaagtgtgagccatagtactggcttcaaatttcttaaacactcctataaacaccataccccgaacccctccttgagaacatacctgggtagaacaccctttgtcccattgtccacagcaaggatgtgcagtagctgttctgtaggtaagttcccctaatgtatgctttggcctgattgccctggcatttagtgcttcattcactggaatcccaaccagccccatcttgggatggtttggggcatcctttgtgagtgctgccctgatgccacttttggtgtgacactagctgtgggttcagctgatactaactggtgggattctctggaagggctttgatagcatcatcatcatcatagcattcattagttaccatttgcccattccccactgtccaatctttatcgagcacctacgctgtatcaggccctaaggacacagtagtgagcaaaacagacagggcctttgccctctgtgagatttacagtatagtggggagacagactatcaacaagtatcagagaaataaatatgtaactacaaaccttgcaagtgctactaagtagtggatcagggtgctggaacacagaagccagtgggagaagagagagggtgtattttattttatttatttatttttttggaagcggagtttcactcttgtcacctaggctggagtgcagtggcacgatctcagctcactgccacctctgcctcctgggttcaagcaattctcatgcctcagcttcctgagtagctgggattacaggtgcacgccaccatgcctgacctagaggatatattttagacaagatgagatggttgaggaaggcctctttgaagtgattattttgaagctgaaatttgaaggatgagaaggaaccggtgggggcaaatggagaaaggggttttccatggcggcggggcgggggcagaaataatatatgccaaggctctgaggaagaaaaagcttggtgccaaggagacaaagagctgcaatgaggctgagtgcctggagtgcagggtcgtggcccatagtgaagataggggacctgagcaggatcttgtaatgtggtggatttacccaggggatggacatgatccaactgatggtttaggtccctcccgctgctgggtaaagaatagatggtagccgggagcggtggctcacgtctgtaatcccagcactttgggaggccaaggcaggcggatcacctgaggtcaggagtttgagaccagcctggctaacacggtaaaacctcgtctctactaaaaacacaaaaaattagccaggtgtggtggtgcgtgcctgtaatcccagctacttgggaggctgaggcaggagaatcacttgaatccgggaggcagaggttgcagtgagccgagatcatgccattgcacaccagcctgggcaacaagagcaaaactgcgtctcaaaaaaaaaaaaaaaaaaaaaaaagaacagatggtaggtacaggcagaactactgcgggcttaggaagaatctaggtggtaggtgatggactagcatgttggcagtgaagacgaagagagggggacggcttggagatgcattttggagaagagccagcagagtggaacggcaaaacagccgtggagagggcggcttctagtgtcgaggagtctggcttgagcagttgggtagatggtagcgccactaactgagactacggaagaaataggtttgaagtagggggaaattcaagctttctgttttgacaggctaaatttgagaagccagttaatcattaaaatccatagtcagacagttggagctgttcatcgagcacacttcctgtgtgctggaacagcattcatgcctcatggacaccatctccttttatcattgtgacaacctagaaagaaggtaggatcaacaggctgttttacagatgagggaactgggccgtagcaaggtgtgttccttttccactctgctgtggggccaggaggctgacggctttgcacagtggcgtctgtagggtttggagagtggcacccataggagatgagatggagagggtgaggttgagcatttacctccccagttgccattctagggaccattctctccctatcccttggaccttacaggggtaacaaagcccactgttattagatctggggtaatgcactatccgttgtgctttaccaacaccctgcccattcctttgtataatcctgttatgaaacaccttcaaattatcccatttaagagaattctttatttcctgaagaaaccctaccgaatacacttgtctgatgcaaaaagtcttgtcaggagtggagctgggattcaggcccagatagtggagctccagagcccgagctgtaaccactaagctccatgcctgccccttgggactgtttcagtgggtgggaaagggagaagtctctgactctggagttggaaaagaaagagagagatagtagagaggacttccggagggaaatgagcatggggcctcatctttctgtatatagaagacacaacaaataaagagagacaaaatttgtacccacagagaatgtggcagacttcagggactggggattcaggccttgtgcttgtggtgttggcagagacatgggactttaaggatggtctggcattactttgtttttgatacagggccttcctctgtagcccaggctggaatgcagtatcatgatctctgctcactgcagtctcaatctcctgggctcaggtgatcctcccacctcaacgtcccaaggagtcgggactacaggcacgcaccacaatgcccagctaatttttttttttttttttttggtattttctgtagagatggagtttcaccacgttgtccaggctggtgcagaactcctgggctcaagtgatctacccgccttcacttcccaaagtactggaattacaggcatgagccaccacgcccagctgtggtctggcaatattgaactgactccagaaccagttgggaggataggaatcccagatatcccagtcccaagggattagcaggaggtggggggcagttctccaaagcagcccgtgtcctgtccagctaagggacagacactttgacctgaaatcaggccagtttcctcagcagtctggctgaccctggtccacaagtgaccacatgaagcatggtctgcactttgtcacaggatcatccctgagcaagaggcctgtgggtgagaaacagaagcccagcatccaaacacaacactcagctttgtcagttgagagccctccctcctgccacaaacacacatgctccaacagccacactcacacatgcacagacacaaacgcaggtggcttttcattccacaggcatggactgaacccccatatgggccgtgccccgacgcatgccagactggaggaggtgaggccactgggcccaggtctctgctcagtgtggggatggagacaggagcgaggccagtcaggtttaataaaggaagtcggggggcactgacagaactgtgctcagcacacagagggacaccaggagagacagagcattgtgagtgagggcagaaggaggtcagggcagcttaacagacgaggtgccccctggtcagacacatacacacacgtaaacatacacaaagctccccaccattccacacacacacacaaatacgtactccactctaacactcacacaatatccacactcacacatgcagatttatgtatccggaattggtgggttcttggtctcactgacttcaagaatgaagccgcggaccctcgcagtgagtgttacagttcttaaaggtggtgtgtccggagtttgttccttctgatgttcagatgtgttcggagttttttccttctggtgggttcgtggtcttgctggctcatgagtgaagctgcagaccttcgcggtgagtgttacagctgttaaggccgcgcatctggagttgttc

SEQ ID NO: 93290 - DNA, 24108 bp, Homo sapiens
taaaccaactggaaatgcagtccagtaggtctcagccttattctacccagtccctattcaagatggagttgctctggttcacgcacctctgacaattatgctaagtgaaataagccagactcaaaaggacagatactgtatgattccgtgtatataaggtactgtcaccggtggagggtgtccaggttcttggcatcttgaacaaagaattggacaaaacacggctgggtgcagtggctcacgcctgtaatcccagagctttgggaggccaaggtgggcggatcacgaggtcaggagttcaagaccagcctggccaacatagtgaaaccccatctctactaaaaaatccaaaattagcccagcatggtggcgcacacctgtagtgccagctactcgagaagctgaggcaggagaatcgcttgaacccgggaggcagaggttgtggtgaaccgagatcgctccgggaggaatgaaacaggaggaatgaacaactccagatgcgcggccttaacagctgtaacactcaccgcgaaggtctgcagcttcactcatgagccagcaagaccacgaacccaccagaaggaaaaaactccgaacacatctgaacatcagaaggaacaaactccggacacaccacctttaagaactgtaacactcactgcgagggtccgcggcttcattcttgaagtcagtgagaccaagaacccaccaattccggatacataaatctgcatgtgtgagtgtggatattgtgtgagtgttagagtggagtacgtatttgtgtgtgtgtgtggaatggtggggagctttgtgtatgtttacgtgtgtgtatgtgtctgaccagggggcacctcgtctgttaagctgccctgacctccttctgccctcactcacaatgctctgtctctcctggtgtccctctgtgtgctgagcacagttctgtcagtgccccccgacttcctttattaaacctgactggcctcgctcctgtctccatccccacactgagcagagacctgggcccagtggcctcacctcctccagtctggcatgcgtcggggcacggcccatatgggggttcagtccatgcctgtggaatgaaaagccacctgcgtttgtgtctgtgcatgtgtgagtgtggctgttggagcatgtgtgtttgtggcaggagggagggctctcaactgacaaagctgagtgttgtgtttggatgctgggcttctgtttctcacccacaggcctcttgctcagggatgatcctgtgacaaagtgcagaccatgcttcatgtggtcacttgtggaccagggtcagccagactgctgaggaaactggcctgatttcaggtcaaagtgtctgtcccttagctggacaggacacgggctgctttggagaactgccccccacctcctgctaatcccttgggactgggatatctgggattcctatcctcccaactggttctggagtcagttcaatattgccagaccacagctgggcrtggtggctcatgcctgtaattccagtactttgggaagtgaaggcgggtagatcacttgagcccaggagttctgcaccagcctggacaacgtggtgaaactccatctctacagaaaataccaaaaaaaaaaaaaaaaaaattagctgggcattgtggtgcgtgcctgtagtcccgactccttgggacgttgaggtgggaggatcacctgagcccaggagattgagactgcagtgagcagagatcatgatactgcattccagcctgggctacagaggaaggccctgtatcaaaaacaaagtaatgccagaccatccttaaagtcccatgtctctgccaacaccacaagcacaaggcctgaatccccagtccctgaagtctgccacattctctgtgggtacaaattttgtctctctttatttgttgtgtcttctatatacagaaagatgaggccccatgctcatttccctccggaagtcctctctactatctctctctttcttttccaactccagagtcagagacttctccctttcccacccactgaaacagtcccaaggggcaggcatggagcttagtggttacagctcgggctctggagctccactatctgggcctgaatcccagctccactcctgacaagactttttgcatcagacaagtgtattcggtagggtttcttcaggaaataaagaattctcttaaatgggataatttgaaggtgtttcataacaggattatacaaaggaatgggcagggtgttggtaaagcacaacggatagtgcattaccccagatctaataacagtgggctttgttacccctgtaaggtccaagggatagggagagaatggtccctagaatggcaactggggaggtaaatgctcaacctcaccctctccatctcatctcctatgggtgccactctccaaaccctacagacgccactgtgcaaagccgtcagcctcctggccccacagcagagtggaaaaggaacacaccttgctacggcccagttccctcatctgtaaaacagcctgttgatcctaccttctttctaggttgtcacaatgataaaaggagatggtgtccatgaggcatgaatgctgttccagcacacaggaagtgtgctcgatgaacagctccaactgtctgactatggattttaatgattaactggcttctcaaatttagcctgtcaaaacagaaagcttgaatttccccctacttcaaacctatttcttccgtagtctcagttagtggcgctaccatctacccaactgctcaagccagactcctcgacactagaagccgccctctccacggctgttttgccgttccactctgctggctcttctccaaaatgcatctccaagccgtccccctctcttcgtcttcactgccaacatgctagtccatcacctaccacctagattcttcctaagcccgcagtagttctgcctgtacctaccatctgttcttttttttttttttttttttttttgagacgcagttttgctcttgttgcccaggctggtgtgcaatggcatgatctcggctcactgcaacctctgcctcccggattcaagtgattctcctgcctcagcctcccaagtagctgggattacaggcacgcaccaccacacctggctaattttttgtgtttttagtagagacgaggttttaccgtgttagccaggctggtctcaaactcctgacctcaggtgatccgcctgccttggcctcccaaagtgctgggattacagacgtgagccaccgctcccggctaccatctattctttacccagcagcgggagggacctaaaccatcagttggatcatgtccatcccctgggtaaatccaccacattacaagatcctgctcaggtcccctatcttcactatgggccacgaccctgcactccaggcactcagcctcattgcagctctttgtctccttggcaccaagctttttcttcctcagagccttggcatatattatttctgcccccgccccgccgccatggaaaacccctttctccatttgcccccaccggttccttctcatccttcaaatttcagcttcaaaataatcacttcaaagaggccttcctcaaccatctcatcttgtctaaaatatatcctctaggtcaggcatggtggcgtgcacctgtaatcccagctactcaggaagctgaggcatgagaattgcttgaacccaggaggcagaggtggcagtgagctgagatcgtgccactgcactccagcctaggtgacaagagtgaaactccgcttccaaaaaaataaataaataaaataaaatacaccctctctcttctcccactggcttctgtgttccagcaccctgatccactacttagtagcacttgcaaggtttgtagttacatatttatttctctgatacttgttgatagtctgtctccccactatactgtaaatctcacagagggcaaaggccctgtctgttttgctcactactgtgtccttagggcctgatacagcgtaggtgctcgataaagattggacagtggggaatgggcaaatggtaactaatgaatgctatgatgatgatgatgctatcaaagcccttccagagaatcccaccagttagtatcagctgaacccacagctagtgtcacaccaaaagtggcatcagggcagcactcacaaaggatgccccaaaccatcccaagatggggctggttgggattccagtgaatgaagcactaaatgccagggcaatcaggccaaagcatacattaggggaacttacctacagaacagctactgcacatccttgctgtggacaatgggacaaagggtgttctacccaggtatgttctcaaggaggggttcggggtatggtgtttataggagtgtttaagaaatttgaagccagtactatggctcacacttgtaatcctggcattttgggagaccaaggcaggaggaccacttgagcataggtgttcaagaccaacctgggcaacagagtgacaccagtctctacaaaaataaaaagtcagcacctgtggaaagaaaggaaaaaaatatttttaataaataaaaatttaaaaagtagccaggcatggtggtgcacacctgtagtactggctacttgggaggctgaggtgggaggatcgttggagcccaggaagtcaaggctacagtgagccatgatcacacgagtgcactccagccagggtgacagagtgagaccctttaaaaaaaaaagaaagaaaacaaggctgggcatgatggctcacacctgtaatcccaccagtttgagaggccgaggctggtggatacttgaggccaggagttggagaccagcctggacaacatggtgaaaccccatctttactaaaaatacaaaaattaggccaggcacagtggctcacacctgtaatcccagcactttgggaagctgtggcaggcagatcacctgaggtcaggagttcgagaccagcctgaccaacatggtgaaaccccgtctctactaaaaatacaaaaattagccaggcgtggtggtgcatgcctgtaatcccagctactcaggaggctgagacaggataatcgcttgaacccaggaggcagaagttgcagtgagccaagatcacgccactgcactccaacctgggcaacagagtcagactcagtctcaaaaaaaaaaaaaaaaagaaaagaaaagaaaaaagaaaaacaaaattagctgggtgtggtggtgcacgtctgtaatcccagctactcggtaggctgaggcaggaggatcgcagaggttgcaatgaactgagattgcgccactgcactccagcctgggcgacagagtgagactctgtgaaaaaaaaaagaaaaaaaagaaaaaagaaaaagaaaaaaggaaggaagggagggaggaaagaaaatttccctgggggtaggagtctataagtttagcaaaatagtcgatctttcagtgtttccagcaacaacctaatcaagtttatcagtgtctgagaatgttcaaggtaccatcttgggttcaaacatgtaggcgaaaacatgcagctggccaggttacagagtggtgaaggcactctgcatttcttggttgagacagagaaaaaaagtggtcagaactgggtaaccctccccccaccatattatcacagtgatcccttttgtctttcttcaggctccagccccaccctacagcccctgctccctggattcactagagctaacttcagtaaagtacaaagaaaatggggccatatgactggccaaaaaaaaaatatctattcacgtggatgaccagatagtatgaatggattgaaaatttatcaggaaaaaaggatgagaggaaatgccaggagatgagggcagagagcaggccgttctgggggagggattctgtggggacagggtggcctactgggtgtgccccttttctcttctctgtctcccttagataagaccagcagttttgtcatcctctccctctcattccatggtcccgcagccccaggcccacactgaaagcatgtcgatccaggagaacatatcatccctgcagcttcggtcatgggtctctaagtcccaaagagacttagcaaagtccatcctgattggggctccaggaggtaagaaggggagacagaagccatggaacataggaggaaaatgagggtgaaaactaggagccaggstggagggcataaatgatccacatcagccactggctaggtgggttttggagaggaacgtacgttcttcagagcctcccgtgtgttaaattatggaccctggcctgggtcttttccaggccctataggcaggccagagccacagcatgtaagccacggggcactcccgtggttcctggactctggcccctggcatacagggcttccaatggaacaggagacagtggtgacactttaaccagtctgcagaactgatccccagcccagctgggcctcatgcctctgacaacccaacagtgtggagcagacccacagagagggagacccagagaggtgtgcagtggcatggaaggtgcggctggaatcgggggctcctctgaactgggatgggtcaagctacagggacctctgtgtctgtagcagctttgagaagcctggggagactcagaggatggggtggggaagccagccagtagccaggggttggaagggagaaaacagagacctttggagcaggaactgggtgattctgggtctgcatagggtgaggctgctggggactagacatcaaggggtggtggggttgagggtcatcagtagctgcaggtcggggggtcctgggttgtgcggggtcagtataactgagtggtcaagaacttgggctagagttagtcagacctagatttgaatcctagctgatccatacttagaagctgtataatattggaccatttatttcctgtttctcagcctctgtttctttatccataaaattggataattatagaacatttaacagtacctgctttataggatccttgtgacataataaaataatatatgcatgatgcccagctcataagaagggaaggaacagagggtatgctgagagacgaaggcatggggaggaagggcaggtgacatgcagtccctgagcccccttctaccacagggccagcggggtatctgcggcgggccagtgtggcccaactgacccaggagctgggcactgccttcttccagcagcagcagctgccagctgctatggcagacaccttcctggaacacctctgcctactggacattgacyccgagcccgtggctgctcgcagtaccagcatcattgccaccatcrgtaagcactcccatccccctgcagccacacagggcctattggtatttcttgaggtgcttcttcatcttttgtctcctttgagacttctccatgtttgacacagtcattcattyaacaaaaatttgttgagcatatagtagacaagattttgggccctgggagtagatcagtgaaaaaaacagacaaaaatccctacccttggggagctgacagtctagctgagtatgacaataaatagtaagcacaataaattatttaaaataagtaaattatttattccgttagaaagtgaggccgggcatggtggctcatgcctgtaatcgcagcatgttgggaggcccaggtgggcagatcacttgaggtcaggagttcgagactagcctgaccaacatggagaaaccccgtctctactaaaaatacaaaattagccgggcatggtggtgcgtgcctgcaatcccagctactcaggaggctgaggcaggagaatcgcttgaacccaggaggcggagactgtggtgagccgagatcacaccattgcattccagcctgggcaacaggagaaaaactccatctcacaaaaaaaaaaaaaaaaaaaaaaaaaaaaagtgggctgggctcagtggctcatgcctgtaatcccagcactttaggaggccaaggttggcagatcgcttgagcccaggagtttgagaccagtctgggtaaatggcaaaacccatctctacaaaaaatacaaaacttagttgagtgtggtggtgcatgcctgtagtcccagctactcaggaggctgaggtgggaggatcacttaagcccaggaggtcacggctgcagtgagtcatgatcgagccactgtactccagcctaggtgacagacgagaccctagagagaaagagagaaagaaagaaagaaggaaagaaagaaagaaagaaagagagaaagaaggaaggaaggaaggagggagggagggagggaaggaaggaaggaaagaaagcaagcaggcaagaaagaaagaaagaaaagaaagaaggaaggaaggaaggaaggaaggaaggaaggaaagaaagaaagaaagaaagaaagaaagaaagaaagaaagaaagaaagaaagaaagaaagaaaggagtgaaagttggccgggcatggtggctcttgcctataatcccagcactttgggaggctgaggcaggtggatcacctgaggtcaggggtccgagaccagcctggctaatgtggtgaaactctgtttctactaaaaatacaaaaaattagccaggcatggtggcatgtgcctataatcccagctactcgggaggctgaggcaggggaatcgcttgaacccgggagacagagattgcagtgagccaagatcacgccattgcactccagtttgggcaacaagagcgaaactctgtttgtttgtttgtttgtttttaaaaaaaaaaaaaaaagctgggcgcggtggctcacgcctgtaatcccagcactttgggaggccgaggcgggcggatcacctgaggtcaggagttcgagaccagcctcaacatggagaaaccccgtctctactaaaaatacaaaaaattatccgggcatggtggtgcatgcctgtaatcccagctactcaggaggctaaggcaggagaattgcttgaacctgggaggcggaggttgcggtgagccaagatcgtgccattgcaccccagcctgggcaacaagagcgaaactccgtctcaaaaaaaaaaaaggccgggcgtggtgtttcatgcctgtaatcccagcactttgggaggccgaggcagactgatcacgaggtcaagagatcgataccatcctggccaacatggtgaaaccccgtctctaataaaaatacaaaaattagctgggcgtggtggcacatgcctgtagtcccagctactcggaaggctgaggcaggagaatcacttgaactggaaggcagggagcagagatcgcacctctgtcctccagcctggtgacagagcgagattccatctaaaaaaaaaagaaaagaaaagaaagaaaaagtgaaagttttaagtgctatggggaaagaaatcaagtgtgataagggcatcaggagtacgagggtgaagacaggttgcagccctaaatagggaggtcagttattattgagtaaatgagaccaaagggaagacttgaaggagatgagagaattagccatgcagagacctgggggaagagaattccaggaagaaggatcagtcagtgtcaaggcctaagtcaagaaggttagaagagctagaaaccatcaagggggaagagcggcagacatgaagagactgtgtacggacaggaagatcaggtgcagctttgtaggccatttttagaatttgagttgcgttttcctccgagtgaaatgagaaactgctgcagggttttgagcaggggaatgacaagctcttatttatgttttaatagagcctcccctcccctgctgctgcactgaaaatagatggggggtggggggaagggtgcccctgcagtatttctggctcagaccagttggcggcagtgaggtggtgagaagtggtcagattctgaatgtattttgcaggtagagctgacaggatttgctaattgatcggatatggggtatggagtgtgggcgagaaagaaaggagtcaaaggtgacaggtgactctgaggtttttgccataaggaactggaacgatgcattagccactgagcaggaaagactgtggtggaaggggttggggggagagcagaagtttgcttgggacatgttgagtctgagatgcttattagccatccaaatgtgatagagggggcagtcaggtacacaactctgggtttgggagaaaggtctggattggagagacatttgggagttggctacatatagatggtatctcaagccatgagactagttgagaccaccaaaggagtgtaggtgaaatgacggagaagagaacagggtatctaacgttaaggggaggaacaaggaaaggagactgggaaagagcagctagtgaggtaggagtcaaccaagagagggtgcagccctggaggtcaggtgaagacagtgtgtcaaagaaggatgtatgttcaggctgctgatgggccaatagaggaggactgagcattgagcattacatggagcaaaaacacagaggttcttggtgaccttgacaagaacagatgcagtggagagatggaggccaacgcctgagtggggtgggttcaagggagaatgggggaggggaactagaggtagcaagtacagataactcttgcgatgagttttgctgcaagtgagagcaaatactgggactgaggggaaaccaggagattaagagaatttttttttaatgatgaaagaaataacagtaggtttacctgcggatggggatgatccagtaaaaaaggaaaacatggctgggcacggtgactcacacctgtaatcccagcattttgggagggcgaggtggatggatcacctgaggtcaagagttcaagaccaacctggccagcatrgtgaaaccccttctctactaaaaatacaaaaaaattagccaggcgtggtggtgcacacctgtaatcccagctactcaggaggctgaagcaggataatcacttgaactggggaggcagaggttgcagtgagctgagatggtgccactgcactccagcctgggcgacaagagtgaaactccccccgtctcaaaaaaaaagaaagaaaaagaaaaggaaaacatgggtgtcacagaggaccacagaatggcttaatttatgtccttgagcaggtgagaaggaggagacctagtgcacaagtggaaagacagatagggaccgaagaakkagccaacctgctctcggctagcagctgccccatagcagtgcaggcatgggatagaactcagctctcctcagtccatgaggcctcctagctctaaaagcccgcacccaaacgccctcacctggctcccagcccctgccctacaccccataccctggggtagccgggcaagcagcacttacatacccatgcccatacagtgcccatacatgcccatacagtgacctcaggcctggcggagggcactcccctccgatttccacactgctgcctccccaaggggatggatgttggcttgagagggaaggggagtctgtgatctgtgggcaggggttgcatcagggaataaagrtcaggtaacaggasscctgtggcgtgaggcgttctgagaatggtaatgggttgggtttggttgcctctcatgttctgggggaacgttgtctgaacgtgaatctctggttctagggccagcatctcgctccgtggagcgcctcaaggagatgatcaaggccgggatgaacattgcgcgactcaacttctcccacggctcccacgaggtgcgggackggccgccgggcagtgggtggggcaggaggatgcctcgaggtcctggccaccttcccctgaaaccctcgctccgctccctcccccagtaccatgctgagtmcatcgccaacgtccgggaggcggtggagagctttgcaggttccccactcagctaccggcccgtggccaycgcccyggacaccaagggaccggagatccgcactgggatcctgcagggggtgagcagtggggctgggactcgctgggccagggccggaaaggcggcgccygtagggttgggcccaggcgtgggcaggggcgggtcccggactccggggctcagaactcacatctcctctggctccctccttagggtccagagtcggaagtggagctggtgaagggctcccaggtgctggtgactgtggaccccgcgttccggacgcgggggaacgcgaacaccgtgtgrgtggactaccccaatattgtccgggtcgtgccggtggggggccgcatctacattgacgacgggctcatctccctagtggtccagaaaatcggtgcggacgcgcctcccgccctgaccacatccgtgcgctgggcacattcccttctccttggctcccccatcagccctcagaccgatcacaccttcccctggccacgcgtttttgccagcccgtcccaggagtccccagcgtgtagactctgcgctcaccctgggtttgggctggactatgggtgggtcgtttcttccacggacgtccatctgtgcctcttccgggcgaagcccagaacaagggcggagagatgaggaggacatggttcctgacctcttgcgggtccaagccccagtgtcctctctgctgcaactgtgccccgtcctcacccctgaccgcagctggctctttccatgtccgcaggcccagagggactggtgacccaagtggagaacggcggcgtcctgggcagccggaagggcgtgaacttgccaggggcccaggtggacttgcccdggctgtccgagcaggacgtcygagacctgcgcttcvgggtggagcatggggtgracatcgtctttgcctcckttktgcggaaagccagcracgtggytgccgtcagggctgctctgggtccggaaggacacggcatcaagatcatcagcaaaattgagaaccacgaaggcgtgaagaggtgaggcttgggctctgttccccttcggccctgtcgctattccccatcacctttcttctcctgcctgcctctgccttgattctcccaacctctcaggtttgatgaaatcctggaggtgagcgacggcatcatggtgkcacvggggsacctagvcwtcgagatcccagcagagaakgttttcctggmtcagaagatgatgaytgggygctgcaacttggcgggcaagcctgttgtctgtgccacacaggtctggagtgaggccttgaggttcggcactctgtgggttttagggacacctgtgggtgaatacccacactgtaggggtttattttgttttgttttgttttttgagacggagtctcactctgtcatccaggctggagtgcagtggcgcaatctccgctcactgcaacctccgcctcttgggttcaaacaattctcctgcctcagcctcccaagtagtggggattacaggtgaccgccgccatgccaggctactttttgtattttcagtagagacggggtttcaccatgttggccagactggtctcgaactcctgacctcaggtgatctactcgcctcggcctcccaaagtgctgggattacaggtgtgagccactgcacccagcccacactgtaggtttatagcacatttggatgaaaagtgtttgatcctcaaacgacaaagttaaatatactttgacccctattttcaggggttgtgaccaaacgacaaagttaaatatactttgactcctattttcaggggttgtgactgtgaccctggattttgggacactctgagagtgtgggtgtcagagaagtagcttgggcagggtccycagtcacagtgtgagtcctacaactttgacatccacgctgtcccccagatgctggagagcatgattaccaagccccggccaacgagggcagrgacaagcratgtcrccarwghtgtgctggatggggctgactgcatcatgctgtcaggggagrytgccaagggcaacttccctgtggaagcggtgaagatgcagcatgcggtaggagctcagaatgaaaagcaaatgggccagggaaccaaaycccttccataccccagtgcmccttcccagactaacattctggcacctgcagattgcccgggaggcagaggccgcagtgtaccaccggcagctgtttgaggagctacgtcgggcagcgccactaagccgtgatcccactgaggtcaccgccattgrtgytrtggaggctgccttcaagtgctgtgctgctgccatcattgtgctgaccacaactggccggtgagggggatattgggaatgtccagatggagctttgggtcaggggtgggctgggacgggccccaggcttgggtttagtctggtcaccaggggtgaagagtgtccacctgagacaagaggagaggcagcaatgacagctggaggccaggagagacagaatgccagtgagcttctgggggctggaaggggacagcggcatcactgggcacattggcttcaaggccatttgggcttctggggctcagaggcaagtccattcggcccacagagcctaccaatactgaggtattacagaagggtccagtaggtctgagtttaagtctttactcagaaatgtagctctattagcctgctstctttcctcatgaacaggacaaggtaatgatttgttcttcatggggttggcaggattaacaggagatattaagtactagatagtacttaatatctatatagtaaattaagcacataatggactttctcaaaagggttttatactcttgggtttttgtttgtttgttttgttttgtttttcttttgagaacggcagctcgctctgttgctcaggctggagtaaaatggtgcaatctcagctcaccacaaccttcacctcccaagttcaagtgattctcctgcctcagccttccgagtagctgggattacaggcgcatgccacaacgccctgcatattttttgtatttttagtagagacagggtttcatcatgttagccaggctggtctcaaactcctgacctcaggtgatccaccctccttggcctcccaaagtgctgggattataggcatgagccactgtgcctggccagcttttatatttcttaaagagatttctccttattatctcatttgatatatctgtattatctcatatctttcttgtgtggtagggagggcaggsattctttyttttttttttttcttaatgcagagatggggtctcactatgttgcctaggctggtctccagctcctgggctcaaacaattctcccatctcggcctcccaaagtgctgggattacaggcatgagccaccgctcccggcctgggaggcaggcattcttacactcattttacaggtgagaacaccaaggcccagagaagtatgatgacttacccagggtcacacagcttgttagtgacacctggaactggaacaaagattctcctttcctcrttcaccactttcttgctgttctgggctgaccttctctgcctcctccagctcagcccagcttctgtctcggtaccgacctcgggcagcagtcattrytgtcaccyrctctgccyaggctgccckccagrtccactkatgcyrargagtcttccccttgctttacmgtgaacctccagaagccatctgggcagatgatgtagatcgccgggtgcaatttggcattgaaagtggtgagctacctagaccttccctgccactcctaccatttgtatcaggagccccccaacccagcttcccatacccactcaaagggccttgcctctctcctgtggtcccaggttttccctgtgagagtcactaagactgagatatcagtctggcatatcacaaatacctcttccatcagcatagccacacaggcagacggscgtgctacttagcaacacactctgccctagcccacagatactcctgcacctttttttttttttgagagagagtcttgctctgtcgccaggctggagtgcaggggtacgatctcggctcactgcaatctctgcctcctgggttcaagtgattctcccacctcagcctcctgagtagctgggactacaggcatgygccaccacgcctggataatttttgtatttttagtagagacagggtttcaccatgttggccaggatggtctcaatgtcttgaccacgtgatccgcccgcctcggactcccagagtgctgggattacaggcgtcagccaccgtgctggcatctcttacacctttaatatactgcagtggtcacattccctgcatgccacccgtgggacatacttcactgcctcattccctacaggatggccttgatgtggtgaaaggtggtggctggttctcgttacagggctggcctggtccctcaatgactaattttctttcttttcttcttttattattattattattattattattattattattattattttgagatggagtcttgctctgtccccaggctggagtgcagtggtgtgatctcggctcactgcaacctctacctcctgagttcaagcgattctcctgcctcagcctccctagtagctgggattacaggcatgcgccaccacacccagctaatttttgtattttcagtagagacaaggtttcaccatgttggccaggctggtctcaaactcctgacctcaggtgatcctcctgccttggcttcccaaagtgatgggattacaggtgtgagccaccacacctgtccaatgatttgttttctttccctcccccaggaaagctccgtggcttcctccgtgttggagacctggtgattgtggtgacagsctggbgacctggctccggctacaccaamatcatgmgggtgctaagcatatcctgagacgcccctcccycctctggcccagcctacccttgtaccccatcccttcctccccagtctacgttctccagcccacacccctccaaagccccacctttaagtcctctcttctctattcctgaccctccctacctgaggcctatctgagactataactgtcatctagccccttcgaggttgccccttccccatctccatttcacacaggtcctgaaagtctgtgtccaattatgcactggccacccaacagcaccaattgtacattcyctgcatccaatctgctcagcaggccctaagatgccttgagtctttaatcccagtttggctggttaattccataaccccaggcatcccatcccttggggtgggggagaggggagacagggcaatcttgtccacagtctcccattctcatatgtagccctcatgataatctgggcatctcgtgccagggcaggctaccccttcatggtgactaacagttacatgaaagtccacgcttttgggaaaactgggtgggatggatgctggggagaagtgagggctgggcagctgattttgtcactgtcttcacaacctccgtgctgggcttgtagaccactgtcctggctgctctcatgcctgcctgataccctgcttggtcaaatccccggctgcttccttctgcacccagaaattccttcccactcatgttgttcccacacacaaaccaagagccaaaaatgagtgtgtctattttatatttaaacccagctgtttggaagcaattataaaacttctcccacacaccaagaaccccagaactccccacccagaaggaaaggagacttagggtcctggtcccacagtctttaatgctgtagagtaggagaggggacaggcagagtgagggtggtaaaggactactcttgtccctgagaaggcagaggtgctggctggcctgcccttccccaggcttggataccttgggcctttcccttattcctgcaccaacagcaaactcagaaggaaaaaacaaaacaaaactctaaaggtaaacrcggtccttctccctctctcatgtggctcctcctgcccctacctgggagaaggttcaagtattgcgctgatgggtttgggcaaggaccacagaggctggcatggagaggccctgcctcctcctactcctcctgtctccttacctgaaaaggaggggagggatggataaaggaatgggtaaacaaaattaattggtaacacataaagttagtaaatgaataaatacaattaaataaatgaataaataaacaagcgaagaaaaaaatatcacacaaggattcagccatttgcccctccaccgggggggatctaggctggcatattaataaggaggtgccaactaccccttaacttttagggggtcacgactggggcagagggtacagggaagaggaagctcgcagtttacaaaaagatggtctaccacaggacagagactgcagggaacttagaagtatgttcccactcagagggtagacacagagtgtccacaggtggcagtgagcgggtaaaagtggatacccacactcaggacccaagacatctgctgacagcaatgggggcacagrtgaytggcagtgcctggctatgctacaggaacaggaagataaccagaccgggcagaacctgcaggatcattggcagggaaacagagacatctagttacttggcagtgatggcagtggcaagtacttgtgcttagtaaaggtggggtcatgggcctgggcctgcacctggcaggaccatagccaagggaatatccttgtcagagggttttgagtcacttctacttggcagtggagacatacagcgcctggcatattaccttgaacatggtagctgctcagtacacatgatgaacgggtgaatggattatgatgggacaagctacaggattcttgagctgaggacacagagaccgtcttcatggcagtatgcggaatgtccgcacagggtcgacatttccatggggcaatgtttcaggtccccatggccttccccaagaggcatctgcccttgggtacatactactgcaccccaagaactaaggctggatgtactcaaaggttttacatgttggcagaaagctggagaccccggggtgtggctggctcaggcactggtggcctggggggctgggctgtccttggaggtttggccaggagccctgagggaggcagccgctcacttcctgatcccttacgcccaggagagccatcgcctgttgcccgctgaggcagagagggttgggaggctgagagtgggcggccccgaggtcctagccgccgtccacctcctcctggagggggacccagcagggagacctgggagcgccctgcccgggataggctggcgtgcagggttcgggcaggtggggcgggcaggcgggaggtggatgcccatgggccagctcggacgggcaccagcggggaagctggagagcctgctgagcgccaagcagagcgagcaaggagggtggctggagagtcaggggagaggggcagarggccccgctgatgagtcagggcaatggccacattggaggtcacagcagctgcctgaaggggcgcatgtaccagtggctcccacagtactggctttccactaagctgagctcctgtgctcggggcccgaccccgaacaccccgagccatgtctctgtcatgttgcaccaagtgctgctccatgatgccaccactgctgcctggacttggctcggagcgcttccgctgcagtatggaattcttcttgcctagaagttgtaccgggagggagaagttaaggatagggaaggaatccaagatggatgttggatatcaaagagtatgagactatcaggatggggtggggttgagggtaggggatgggagtcagtagtatggcaatggggctatgggggttgagatgggggttggaggaagagggtatgtatcagagacagcgagggtcaggggactggtactcaggggaaggaggactcaggacatgggggcttgggatgctatctctcctgggaaggacatgctgagggatagggacagtgggccacagtgttgaaagtcctgttagggagcatttgttgggactgaatggattgggatatgaccctggagccctaaagcctgggctccttgctttggaggtggggtgagagcacagtctggacccagagcagatggggtggacaggtctcaccgatgcggagcagccgatccatggccacagtctcraaggcccggcgcatcatggggaactcctcaagcacagcattgaaatggtccacgctgagtgagtaaaggcggcagtaggtgtcagcccgaacactggctgtgcgccggcccctagttagcaggcagatctctgcagaaattgggaggaagcttcagaaccccgtccttgtccccagaactcctcttgctgagcctgcagcagtggacccaactttctaaggctcctccctagacttgggagaaaccattgattacctattacctccgtgccccaggaaccctaaacaccccaagcattgtctttctccagacccccacaattactgggttactgctccctgtccttcctactctctccatatgaaggctgatgaccaggcaggtcttgctggccctaaattcccagtgattccactccactttaactcccacccctccccgactgctcaatcccaagaggtagacctgggcaactcagtgtacccacccctcccacccccttgaataaacactgagggcagccctgaaggagaaaagcagtatcaaagagcaaagtgcaacatgatgggagtagtgggtggtttggggactgagagattatataagcctcaggtcactttgggcagtggaaggctgaactgcccctactgccacaggctgggtccctgaaacacgccaccaggcagctccaaaaagcttatgctccaggacagctctgcttcactcctgcctttccctcatctcataggatccttggatttcactgtctaagggttctaaaaggccctctggcccagtagtttgcaacctggctgtgcattagaatctcctgagaagctttaaaaactacagagctcaggcctggcacggtgattcacgcctgtaatcccagcactttgggaggctgaggcgggcggatcacgaggtcaggagatcgagaccatcctggctaacacagtgaaaccccgtctctactaaaaatacaaaaaattagccaggcgtggtggcgggcgcctgtggtcccagctactcgggagtgtgaggcaggagaatggcgtgaacccaggaggcagagctttcagtgagccgagattgcgccactgcactccagcctgggcaacagagcgagactccacctcaaaaaacaaacaaacaaacaaacaaacaaaaactatagagctccagaccccagcccagagattctcactgagtaggcctggggaggggctggagctctgtgattctgcagcgtactggggcagggacccagagcctgggagcagttgccctctccactgtctgctcgtgaccctgccaccctccctgaggcctgctgacccccaaagtaggatccatcggtgaggcgtgtgtcccgggcgccgcgggccagcacactgagcagcccatgctggatgaagtacatcttcctccccacggagccctcacgcaccacgagatcccccggctggaagacctcaaagcgmagcttggtgagaactgcagtgacgaagctggggtcggcatgggcaaacagcggcatgtgggccaccaggccccgacaggtgaagttaatgatctcctggacaggggaggggcctgtcaggcaggctgtgcccctgacctgagatgatcccaccgagctcatccgcttccagaaaccccacccctggggtcatgttctgccaaaggatggggaggcatcagtgggcctgggaccatccctaagctcctgccttcagatctttcccatgagcccttgcaggaccatcccccaaaaacagagatccctatagtccctcctcatgtatccttcaccctcaaagggccttcaagaaagaccctagcccctgaaagcccaaatacctggcctcccacggggccctctgcaggcctcattccctataggagcacctgctgaccaatagcccctaccaccagacagcactccaggtccctgaagagccccccttccaggcccaacccagccccacctcgcgaagcggctcgctcagctcgcccaggatgctttcctcatcgaacatcttgccctggtagcggtgctcatagtactcgtggatgcgctgccgcgtgtctgctggcagcttgtggaaggacatgtactgctccacctgcttgtactggagggccagcccattgccaggggcaagaggacagagggagagatttggggccggcacagtggggtgtgtgtgcggaaggtcagagacacaggtcaaactcaaaggggtgaaacgtggaaccagacatggatacacagggccacagaggaatacggataatgatggataccgggaagacacagagcacagtcataggaaaacccaggcgtggacagcagaggggccaagcacaggcataggttcaaacaaggaaaaggtacatgcaggggcagggaacaaatggacacagggcaggaaaggaaacagagacgcaacaggggcacacatcagaatgggcctcaagtcaggctacccagtctccaacacccctccatgccacacctccctctcctgtccctgctgaccttctcctggtactgacgccgggaagagtccagggactggatgagtgccgtggcatggccgatgaacatggcgtagcatgtggcacctaygatcatgctgagcatggtgagccagacgtcgggcatgcctacaggtgcctgctgcccatagccaatgcacagcatgtggctcatggccttgaacagggcatgggaatactggcggccccacgagtggttctgaggggcagagtatattgcagagctgggcatgggcccctcggagcctcattctctgcctgccccttttccttctttggtctttctgtctgccccttctactgcaggccttcctcctggcaggcacttaagtttggttctggggggccctgaggcaaaagggtcctctattgcaacttgggggcctcagcttccgggtaggtacccttcctttgcctgctccctccaacacacgagcacttcttctgggtctccttcccctttcctccctcctccccacctcctcgctcctattttctgttgtgatcatctcccacctcctgctccctgtggccatccctgctactcaggcagaagagccctaagaaggcccaggaaaggcagagctgtggggacttctcaccaccatgtggttgatggagacccagcagtcgggagggaagtcctgcagcatgggcaccaggaactgcagacagccatcccagtgacatagcagcagcatcatcccaatgaggttgaagatgcgaaccacagcactggccaggtcataggtcatgtgaaagatctgaggagtccgaggaggagctgctgtggacaggaacccctccctgcttgtcctcctccattcccagcctggcaaattctcttctgaactactccctagccccagcccccatgaattaaaaaatacaactattattcatttgtgtggagttttgtggcacacatgtatagctaatgcaaagtagtttcttatttctctcatcttatagataggaaagctgaggtcagtcatgtgcccagaaccacatagtaagtgtcacagcagagaatcaaacaaatctattgcacaagctgcccaggtgtagcctagaaaagagagagggcatttcacagtgtaatgtctccagggcatatgtgtaagaattaatccagcagccctctcctttccagtcataataatatataatgggtggggggaggggggagggatagcattgggagatatacctaatgctaggtgacgagttagtgggtgcagcgcaccagcatagcacatgtatacatatgtaactaacctgcacaatgtgcacatgtaccctaaaacttaaagtataataaaaataataataataataatatataatagtggcttcactgagaacttagtatgtgctagacacctttctaagtgatttgcatgtattaattcctttaatcctaacagtcttatcacaggtaagtg

SEQ ID NO: 93291 - DNA, 151870 bp, Homo sapiens
  misc_feature (1)...(151870): n = A,T,C or G
agatgtttggtgttttagtaaagacagacttcaaactaagtggtgactaagcaaaccccttacataaagctttgaataggatttcataaatattccaatgaaaaacatttggagataagaaggaaaaaaagctcacacttatgaaaaaattattttcagaaaaccacttaaaattcaaattaagtcctattcatttaaatattaaaatataccataaacccaaatttaaaggaatgataatacatacatcagctttcaatggtagctgcttatttaaaatgagcatctgagggtatattccagtttcatcctcttcaaattgtgcagctcagataaatgtttattttatggaaaatatttgcaaaattacaatataaatacatgattatattaaggtaggatgactatataatttattcttatctatagatataaaatgaactcagtaaatatagcacactcttgatgaattgttagtacacagtgtttctcagtaaagtattattaagcaacagttatctagttttcaaatgtacatcttaagaagcttttaagatggaaggatmcactaaatcccccaataccctttttagttggggaaggttagtacttctgtgaattctgagatatcatatttgtgttagtgactgttcataggttccttgcatttccttaacttgaaaccttacttctttagtctgaatgttctttaaataatgccacatcagctaaccacacttttaatttgagtataatattatgtactgcatatttattcattacttaaacacatatcaacaatgaaacaatgattgaaaaaaattttgtctagacaaattccccaaattaactgtcagggcactgtggggaatctcaactaaatatagtctcaactgtaataagaatttgggttagaaatagtattttatttattctagttcttaagacatcaaatgtgaactctactttaaaattctttgttaaatatactgggatttgtttcaaaagcatcttctacccttctccattacactgatttaatggaaacctgttacaacaacagttccaacacaaacatatgcatgcacgggatcaccttatagattctagctacatagttattgaaacacatcccacctgtcaagtggcataaatgtacatcttctatatacaaaaggtaaagtgcattattaaattagtgaactgacagattgtctgcctggaccatacagctttcaaatagacaaatgtgaaattctcatattagaaccaattatttcaagaggttccaactagcttttccaccctgtcatttatttttttggccatgctctttagtgcaaataagcttgtgtttgactcaagtttcagggacatggcagtctggggctttaacaaggaaaattataaaatgtagaggaactttaatatctttataatacattgcatcttttgcataaagcaacagattagtgctgctttcgattgctaggagcacactgccaactatcaagaggaacccgtttccaaatttcatactattagcttatattactacagtttgagcctgtaccacattatgcttggattattaggtgcaaacatcatcagtgttttagaattatacagtgaactagtacttttggttactaactttcatgctcattttttaacttctaacttccagttgccttaagagtttaatgtcttcaaggcagggattctgttattttgaaggataccatgaacacttgcagctccatgtatgttacaaatgacaataaataaaatgcatattgcacagataagaatagtagcttattttataagatacatggcaatacatgtcctaagaccagagttttgaactggatcatatttaattacggctaatgaattcttgggaattttaagtatcaaaaagtcatagcatcatctcatttttgaatgattaactatgaaaaaaatgaaacaaaaggactggcagaaggcttaataattttagagtatactcaattgccagtatatatgcatctatttaatctgcagctttgagatggtaaaaactttgaagtatacatacaaagtagaaaatctggctgcttaactaattctttacttaaataattaatggaaaactaaatttaataatgtttatatacaatgagttaaagatatttatctttaagtctgacatggtattgtatgtatgtatacacacatatatatgtatacatgtatatacatatgtctgtgtgtatatatatagatatagacacatacccaaatcttatcagacccaaaaggtaaaaggaaatcatttagacctaatggatataaatattttagaaaggaagactttaagagagtgtatacactcatagcaatagcgataggaacaatcaaatactagaatattcacagctccagtttgccaaaatctgacaggttgattattattaataggcactatgatgggcagcaataacaatcagtagtacagtaattcaagtgcacatcattccttcatagaccaaaaactacttttttagcaagcctacatagttattttacagttaggactgtttaaaaatccttgctacttttagagtctcaacacccaccatgtgctattagctctagtactaacattatctcctaaccttcagttgttccatagtgatccagatggtccacaattataatgaactaatgagattccttcacgctactagaggaaatgtgaaatacaatctgcaaaccaacactagtatatatgtcggggttactgattgcttgttcttaagtaacataaaccaatgaaattaatttttttaattcataccatcaagttttcttagtgacctcacgtaaaggtattgggggacaaaactctggaagaaaaaaatcgctgatataattttaaattacttttagcatataaaagaagagctacattctgatttgaatccatgcagccagctctcatcaatgagagtgatatttgggggttgaaatcagtgttctggctcttaaatatgattagatggacttattgtgtgggaggtgaataaagccaagataaaagacaataatttcattcagaagaaaatatagctgaatagatgtaatttcagtcaattaatacaggatgggttggtacacatataacactatatccacttgtttaaaaaattgcttaggtgttgaaaaattgctgtggcacttcctggaaagtaatttttaatacaggtaaatgggtgagtcttgtgtaaagtcagaaagagcaccttggaaaatgcctgaattttcctttcaaatatatttataaccaatcttcaaataatatttttctcagactggaaatttgtattctaaattatttttagaaaaaaaaaatccccaccccctccagaattaaaacacctgtaaaatwcaggattatattggaagtgttgacatggttttaagggtagcaattgcaaaagtgctactaaaatatattattacaggtatatttttatatcagttaattggtacaccaacccttctgaaagagtgttaaagaagaagcataaagtataacaccttgagtccatgatatattttggggaagaaacctcttgcaatctttaaattagcatgaaaagctacaccaccaagatttccatagcaaagccattggatgaagcctcccactcaatgtgacataaaagtaattcctgaaactttggaaagtcaataaaaatatatggaacattaagtagaggtaaagaagggattgtaactaaacttagaataacgaattaaaactctcccatggctttgatatggcaactataaaatgtagggttaccacaaagtttgaaattatagaatactatagtattcttaagaaatattatgacattatatttttaaggtttaattaggtaataagatttgatcctttgatggtatattcagttattcaacggacaatatacgtctacttgtacttttataagtaaatatttatatataccggaggtcaatttctgtttctgtggtaactgccctacaggtaagcttagcagcttttaatgaagtagaattgaaatacttttgggggaaagtcacacttctatttaagtatatgtatcttttttcgggattatgtcatagtgcaatgtaaatcttagttatggtatttagaatgtcagaatgtcacattttgtgctgatttgcatacttcaatagtctggagcagttgaagcagctaaactatttagctctgggaaggttggaattcccgtaagaattatagtgatctatgtgtaacataacatgagaatcagacttcctgaagtatcaactactagaggtattactaataacaacgggccaaaaaagaggaaaaacttcttcaaaggataatggatcagtacttttagccaatttgtgattttaaattttgcctgatggagttcaatttcactctagtcgaggcattcttgttcttcaccactggcctttctgccatccattctcttttctttatggctgttgcaaattttcctcatctcttcttcatacttgataaaattctccccaaaccttgtccaagctttgaatggaacagtaatagtattacggtaaggtggtctcacctcacttaccttcaggaaaattccatatttattagagcccacatcaaagtagaaccttttattgtccactctgaaagaagtcccctctgggagttcaagcgggtcatcgtctccacctcttcgttcttctatgtctccttcgccatagtcttcaatcagctgaaccaaggcatcacgaaactcaatcattccttgtgctgggaggacaatagtctgttcttggcccaaactgtggccaaaataacctatcatgccagtcccccgcatcatggtttgtctaatccgtaggaagcgaccccgctgattttcctttaggtctaggtaatatttcctattgtccctctcgatatagtctgttttcaggacactgtgaggatgctcttcggaccccaccgagactggtggggagggtgccgagtgcttctgcctccttctggagccttgctctttgctgtggccatgctcttgccggtggcctttcaggcccaggtgggcatagtgctcgatgaagtcccctagacagtccttcagctccgctgccacagacagggagagggtcagtttactctttctgatgttgtcctgccggcctctccctatccagacttcggctatctttaggaagcggccccgggagctttgcttcacgtcyaggtaaaacctctttttctggatgtccactcgtttggaggccagctcctggatttcggctgcgcccccggcctgattaggggtggctgaggccgcgtagtgggggtagtgggagtgctgggcctggggatagagtctactcttgcttaggccagagccccctacattcttgcctccgcggccgcggccgccgccgcctccccttcgcctggctctttccatcttcagctgcaagtaacaaacagacacacgggatggggtgggggaggggtgttgagaacaatcgcagacgcccctcggcctgaccgccccgccgccgcccgcgacccccacgccgggcccrgctcccccggcgccgcagcgcggggctccagccactgccggccggttggcggccgccgctccggctctgcccgcgctccccgcatccctccgccgcccccggggccgctcccgcacgccgccgccgcccgtcccgcgctccgcggccccaggtctccagccggcgggcactcacatcatctctgccatcaccgccgccgccgatgcccttcacgaccaccgccgccgccaccgccagctctcggcccctctgctgcagccgccgcagccgccgccccccgcctcctcccccgccgccgccgctcgcactgccccccgccggagcagccgggcaggggcatcgcccgcggcgcccaccgcagccgcccctcctgcggccgctgcgggggccgccgcctgacttcggacaccggccccgcacccgccaggaggggagggaaggggaggcggggagagcgacggcggggggcgggcggtggaccccgcctcccccggcacagcctgctgaggggaagagggggtctccgctcttcctcagtgcactctctgactgaagcccggcgcgtggggtgcagcgggagtgcgaggggactggacaggtgggaagatgggaatgaggaccgggcggcgggaatgttctcacttctccggattccaccgggatgcaggactctagctgcccagccgcacctgcgaagagactacacttcccgaggtgctcagcggcagcgagggcctccacgcatgcgcaccgcggcgcgctgggcggggctggatgggctgtggtgggagggttgcagcgccgcgagaaaggcgagccgggccgggggcggggaaaggggtggggcaggaacgggggcggggacggcgctggaggggcgggtcgggtaggtctcccggagctgatgtgtactgtgtgcgccggggaggcgccggcttgtactcggcagcgcgggaataaagtttgctgatttggtgtctagcctggatgcctgggttgcaggccctgcttgtggtggcgctccacagtcatccggctgaagaagacctgttggactggatcttctcggggtaaagtgtcttcctattcccgttttcccagctccgtgccccggggtatctatagtgctaggcttctgagacacgtggaggcgcttaggcccgcggagcaggcccctgggctgtgtttgggagattctggaaaaacagactttctcccttttcctttcccctctggagcagctgggaaaggcgtctctcggagcttccgccattcagaaagtgtttccccgcccctgacggccccagcttgatgtttaccttgcgcgcttagttaggattgctctttctagtacggcctttattatggcagaaattgagccactacaggtctgcacagcaaagtcgagggaaataacctgctgtctatgatttagcaagtgatgatggatatttttgagttcaaatcactcagtctttaatggattttcttttctttttttcctagttgaatctcagttgttctcaggctaggtttgatatgaaaaatactactccctattgaagagggtaatataattcttaggatgctaatacaggagtctgtaagtcggagtacttcaggctttttatggttcggtacatttctttttaggggtgggatattgggataagtaggacagttcagatcttgatgtcattgaatagtggtgtctacctaaaaggaagaggctggggcacaaaattataatttaaagtgtttacttcagccaaaatgaggacagctgcccaggactcatttcccagttgccttggggagtgctccttcagccttggttacaagcaggtttttaaaggcgaaggggaagagtgggctgagacaaagttggtcaggaattgttattggtttacagagataccattgcttagtgattggctgtacactgtaactcatagggtatgagttatcgtgtccagcatatggcattttatggcttcttggttccagtctagagcccatatagcaggtgggctttaagagataattatccagctcagaccgggagtgagacgggactgttttttcattctaatrcctctctgggcctgataatttaaaggggcttgcattcttcagctaaaattttattttcttttattttttttcccccacagtggtctccctttattaatccaacaaatgtttattaaggactgctctaggcactagagataccaacaatgaacaaaacagacaaacatctctctccttttggagcttacattttagtggaaagagacaggcaaaaagtaaaattataggatgacagaaggtgaaaatagagattaaaaaggaaagggggatgaagagtgtgtgtgtgtgttgtgggtggggggctgtagggagctgcagttttacaataagtggtcagggacgtcctcgctgagaagggaatttttgagtccagagctcaaggaagtgagagaacttaccttgacgttctctggaggagaagaaagtacaaaggccctgggggaacctgcctctttatgttcagagagcaacttaagaggcctagtgagctggagcagagcggagaggaggtcagaggtcaggccagaaagggaaaggggccagaatgtgtaggactttatgggctatattgaaaattggggctttcattctgagggagatgggaagctgttggagagttgttagggaaacgtgatctgaattatgtttctaaaaaattggagtaagatatcataaaatttgccatcttagtcttttttgtatctggccaattccactcagaattcttttttaaacagctttattgagatataattaatatatcatatgattcactcatttaaagtgtgcaatacaatggtttttagtttgtcttcagagttgtacaacctttatcacaattacctttaggactttttcattacccaaaagagaatctccataaccattagtactcaatcccacccgctttcctagcaatcacttacctatttttttgtctctatatagctctcaaaccctatgatattccttctatctaactgtatttttgtactcattaacagcctctcttcattcccaccacccatccatcccagcctctggtaatcaccattctacttactacctcaatgacatcaaattttttagctcccacatataagtgagaacatgcgatatttgtctttccctgcctggtttatttcacttaacagaatgtcttccagttccattcatgttgctgcaaatgacaggatttcattctttattatggcttaatactattccattgtatatgtatatcacattttctttatccactcatctgttgatggacagttagcttgattccatattctggctattgttgaatagtgctgcaggaaacatggaagtgcagatagctctttgacatactgatttcatttcccttgaatatataccctgtagtggatttgctggacccgcttgtagttctacatttaatattttgagttatttccataatgttagtaataatttacattcccaccaacagcgaggaaggagttcccttttctccacatcctcgccaacacttatcttttgtctttttggtaatagccattctaacaggtgtgaggtgatatctcattgtgattttgatttacatttccctgatggttattgatgagcaatgtttcatatacttgttggttatttgtatatctccttttgagaaatgtctattcaggtcttttgctcattttttaaatatggttttttaatttttttatttttttgctattgagttgtttgacatccttaaacattttggaaattaacctcttattagatgtatagtttgcaaatattttatccgattctgtagattctgtcttcagtctgttgaatttgctgtgcagagaagcattttattttgatgtaatccctttgtctatttttgcttttgttacctttgcttttgaagtcatatccaaaaaatcattgcccagatcagcagtccccaacctttttggtaccaaggactggtttcatcgaagacaatttttccatccacaggagggaggggatggtttcaggatatttcaagcgcattacatttattgtgcactttgtttctattattattacattgtaatatatagtgaaataattatacaattcaccataatgtagaatcactgggagccctgagcttgttttcctgaaacttgagggtcctatctgggagtgatgggagacagtgacagttcataaggcattaggttcttctaaggagcatacaacctagatcccttgcatgcgcaattcacagtaggttttgcgctgctatgagaatctaatgccaccgttgatgtgtcaggaggtggagctcaggtggtaacgtgaggaatggggagcagctgtaaagaaaaatgaagcttcgcttgcttgcctgctgctcacctactgctttgtggcctggttcctaacaggccatggactggtamtaatctgtggccctggggttgggaacctctagccctgaccaatgttagggagcttttttcctgtgttttcttcaagtggtttcatggtttggggtcttacatttaagtctttagtccattttgagttgatgctgtatgtggtgagagataattgactactttcattcttttgcatatggttatcagttttcccaacaccgtttattgaagagcctgacctttccccattgtgggttcttggctcttttgtcaaaaatcagttggctataaatatgtggttttatttcttgggtctctgttctgttctattatctgtgtgtctctttatgccagtaccgtgctgttttaattactagagtttagtatattttgaagtcaggtagtgtgatgcccctagctttgttcttttagctcaacattgctttggctattcagagtcttttgtgaggataatgttttcaaggttcacccatgttgtggcatgtatcagaactcgatttctttttatggctgaataatattccatttgtttatattatatatatgccatatttatttattcatatgttgatggacacttaggttgtttccaccttttggctattgtgaataatgctgttattaacattggtgtacaagaatctgtttgagttcctattttcaattcttttgggaatatacctacgtgtggacttactagatcacatggtaagcttttagtttagctttttaaggaactgctaaaactgtttttccatgggagcagtgtacaagtgttccagttctccatatgctcaccaaaacttaatttccttttttaaaaattatagctatcctagtaggtggtgggaagtggtatcttactgtggttttattttgtatttctttaatgactaatgatgttgagcatcttttaatgtgcttattggccattatatgtcttctttgggaactgtctattaagtcctttgcccattttttaattgagtttttttttctgttgaattgtgggagatctttatatattctgaatattaaacccttattgggtgtatgatttgcaaataatttctcccattttgtgggttttcttcactttttgatattgttctttgattcacttttaaatttttatagagtccagtttatctgttttttcttttattacctatgcttttggcrtcatacctaattcccaaatccaakgccatgaagattttctgttatgttttcttttaatagttttatagttttactttttctattggagttttaagtaaattcttgtatattagtgtgatacattttaagttatttttgtatatggtgtgaggtaggggtccaacttcactsttttccatatggagatccagttgtcccagcaccacatgtttaagagtctattctttccccactgaatggacttggcacccttgtcaaaaatcaattggtggtaaatgtatggatttactcctggaatctcaattctattctattgtatttatatttctgtccttatgcctgtaccacamtgttttgattacagtagctttgtagtaagtttagaaattgggaaacatgagtcctccaactttgttcttcttttcaagattattttggctatttggggtcccttgcaattctgatgagtttgaggatcaccttttccatttctgcagaaaagccttttgatagggattgcattgaatctgtagataactttgggtagtattgacatcttaacaatattaagtctttctatgcataaacatgggatatctttccatttatttgtgttttctttaatttctttcagcagcattctgtagttttcagagtacacgtttttcacctccttggttaaatttattccttggtattttattcttttagctgctattgtaaatgcagttactttcttagtttcctttcagattgttcatttctggtgtataacaacagctgatatttcaacgttgatgttgtactctgaaactttgttgaatttacttattagatctagwagctttctttgagatttttatatgggattatgtcatctgtatatagagatagttttacttcttcctttccattatggatgccttttatttcttttccatgtctaatttctctggctagaactttcaatatgatgttgaaaagcagtggtgaaagtgggtatctttgtcttgcttcctatcttaggtggaaagctttcagtctttcaccattaagtatggtgttagctgtgggttttcataaatgccctttatcatgttgaggaaatacccttttattcctagttttctgagtttttatcatgaaagggtgttggattttgtcaaatgccttttctgtgtcaattgaaatgatcatgtatttttcctcccttatcttaatgtaatgtgttatattgattaattttcttatgttgaaccacccttgcctttctggggtaaatttcagtcacttatgttatatagtcctttaaattgtgttatcttataacagaatcactctgctactgttttgagcataggccatagggaaaagcaggtaaaaggtaatatggcttgaaccaacattgtagcagcggaagtggtgagaggaggtcgaattttggctttgttttgaagatagaaccaacagtatttgctgacagattagatgcagaatgtgaaaggaggagatgagtcaggatgaatccaaggcttttggcatgagcaaccagaaagatgaaggtgacttactaagatgggaaatatacaaaaggagcagtttggggaaactttatatctattgagtggaatatgccaattagagattcaaatatccagtaaataattggctatcaaagtttgaagttaagaggaatggtctaggctgtttatataactttggaagtcattagtgtataacagctaatttaaaagccagcagactctaagggagtgagtgtagagggagaagagtagaggtctgtgacttgaatcctggaatgctgtgatgtttagagattggggaggtaagaaggagcagcagagtatactgaaaagggattgttatactgaaaagggattgatatagatggagactcaagaattatcacagaaacctgataaaatgtttcaagaagatgggtgtgattaattgtgtcacttactgccggtacattgactcagatgagcgttgagaattggctataggatttgacaacataaaagtcattggaaaccttgacatgagcccttttcgtggagtggagtggttacagtgggtttaagagaggattaaaggagtggaaacagagatgctattatagatgactcgtttgagtagttttcctacaaaggggagaataataatggagcagttagccaaaagttgagtttttttttcttcttcttttttttagttggaaaaaattgcgtatatgttgatgggtcttttctggcagaccagtagagaggaaaaagttgatgatgtaggagatgggaaaatgtctttgagtagatgtcttygagaaaatgtctttgagtagatgagaggtttgcacacatggagaggttggatgtaggagtactgatagttcatccatagttacataagaaaaggtagatgtattagagttctcctgagaaacagaaccaatgggagatctttatatctctgtgtccatctctatctgtatttctgtctctgtatctatgaagagattataaaagttttaagatctgccaggagacatacccacgggagctaatggtatagttccaggccagttgtgaaggcctgagaaccaggagagcctatggtgtaagttccagtctgagtccaagtctgaaggcaggagaagaccaatgtcccagctcaaagacaggcagagggagcagatcttcccttacttagcctttttatttattcaggccttcaacaaattgaaggcccacccacattagggagggcaatctgctttactcagtctactgaatcaaatgttagtctcacccagaaacatcctcacagacacacccagaataatggttagccaaatatctgggcaccccatggcccactcaaattgacacataaaattaaccaccacagtagagtatatgggtacaaatataattatgtgatatagatttcagggtaagagcctgtggaaattcatttttgattgcttctagtgaaatcggaagcaagatcatcagctaagagtgacgatcggtggaggagatatgaagtttaagtggagaggagaaggtataaaatagtcttaggaggggaggatagtaaatagatkagggaaaagttgtaggattgccaggaagtagtaagggcccacttgaggctggtggtcacaaatttaaggtgagaccagtcaaaatggttgtgcttttcacctgctgcattcattcagctgcataggtacaggcacagagtaggtcaagagttcttttttattcggggttagagttttgccaggagatagtaataaagccagaagggcaatgaatttgagggagtatgcaaggaagtggctgttaacttggagtttaaactagtcaagaagagaattaaggactgcccaaggggtgaggacaatgatatggtagcagggcccttaaaagccccagttagatgaaaagattgttggaattgagtttctagagggaatgaacttgaaaaacaggaggtgttggttggagagtgggatatatggaattgagattatggaaggattcagtcgttggtaataacatagtatctttgtaggaataaataggtggagcaggatgcagacaagatcactggaggagggctggtcagaagactgggaggcactatctcccttggatattatacatcaaagcttgtgatctactagacaagtagtggggaaagggtaggatatagatattaatggctatagttttgatggtgatggtcatggtgatgatgatggtccattaacactcaactcaaataccatcaatttgatttatatctaacaccacaaagttaggtgttgagttacatgtggttatattgtaactaatagtcarcccttcatggacttctattctttgatgagactcttcttgtaggagtagtaggtgccttaaagcaccttttcatagttgtcagattgaaatccttcaccagtgttttaggttaaccctgttactgtggaagtttctcttggctttctgtgtgggctgcttctttgtctagttttaccttttggggttagcatactattgtgaataatttattggtgagaaggtaagcagagaagtagagtactctatgacctagtaatttcatatctaggaatctatcctatagaaatgataggaatgccttacaatacccacatatccacaagggtattcattgaacgttatttttggtgaaattcgcaagcaacctaattatcatcaatagggaattgttaaattatgatagataaaatggaattctattcagtcttcaaaaagtcagatcaagaagtggtcttacattttaattatcccatcctgtcaacaagagtgtcttcagttgcaagtaatggaaaaaccattcaaactgacttcagcaataaaaggttatttattggtctgtttcatggagacatctgaggtagagtggccttcaggcaagttcactcagggatccgactatttttctggccttattcttggccctcttctatgaaaacaccttcagggtggtttcttgtatgcttgtaagatggctacttgcatcaaccatgaccacatctagcaggagcaaaagcatcctttcccrtaccagaggagagtcccgaaatttgttgcaattggactgccttggaagcaataattatggccaggagatggaggctagagaactgagacctgatcatagctcctatccttgaatcagttgtatagcarggggaattggattttccttaagacagttggatttcacctgtagtcttggtgatgaggtcagttccatccataaaactttgctgttacacattttgggatggggtgaggagggctgaatggagattaggatgctattgaaatttgctgtacacaatggatcattatcgtcttctttcttagtgttaaggtaatcagcctctttttcctcctcctatgcttgactttactaaaaccatgagacatgtttaacctcaggactccaatttgaaaaaatatagactgttatttactttattacttacagaagcccttcatactactctcagcaagaaagaggtaggcagggagtgagggaggggggatcatgcttactgagaaacaaactatcgagtattgaaactcccccttcatatgcctgacctcagtcccattcagttaccagtaggggcccctattaattggtacctcaccagcttttgctgttcgttcataaaactgagtcattgaagtacagtagaaaaataattggactacaagataacttatttccttccataattgcaaaatatctgatttttcttcttgtttgtattatgtaaacttaccctgtctgagggtcctcctggattgttctttgcatttatatatacatagaatttcattttcttttttcttgttttttttttagacggagtctcactctgtcgcccaggctggagtgcagtggcacaatctcggctcactgcaagctccgcctcccaggttcacgccattctcctgcctcagcctccccagcagctgggactacaggtgcacgccgccacacccggctaattttttgtgtttttagtagagacggggtttcaccatgatagccaggatggtctcaatctcctgaccttgttatctgcccgccttggcttcccaaagtgctaggattacaggcgtgagccgcttgcccgaccttcttttttttttttttttttttttttgagacgttgagatagagtctcactctgttgcccaggctggagtgcaatggcacgttttcagctcactgcaacctccacctcccaggttcaagcgattctcctgcctcagcctcctgagtagctgggattacaggcgcccgccaccatgctctgctaatttttgtatttttattagagatggggttttaccatggtggtcaggctggtctcgaactcctgactacgtgatccgcctgcctcggcctcccaaagttctgggattataggcgtgagccactgtgcccggccaatttcattttctattttgaaatttaaactaccactgacacttcgttttccctctgttttacttagcatttatcttagagaataatcttaatatgtatagttctattttattcttttactggcagcttagtatgccatattttggatgtgtcattgtttatttacctattaatttaccctataactgcttcccatatttttgcttttacaaagggatgtaatgaacatcctttacatacgtctttgtgcatatgtgcaaatatttccataggatagatgtaattactgacttgaaggttatgcagatttaaaattttgatgccttctatgaaacatctttcaaaatggtgatgccagtttcttctctcgtaattactgcatatggtcaatcttttaaatttttgctggtaatgatatttcaaaattataaccagttttttggcctcatttcttgaataacttgttttttctcaaagataagaaatgtctccttcatcgtatgtcaaatttccatatttacatggatctatttctggacatggcaagttttatttatttattgtatgtatttacggtgtacaacatgatgttttgatacacatatacgtagtgaaatgattcctacagtcaaacaaattaacatgttcaccaccttccatagtctctgcagtcttcaaggttttctctatatgggattagacatgctatgtctgatctgtttttgtatttttacaccaattccacactaattttttttttttttttgactgggagtctcgttcttattgcccaggctggagtgcaatggcatgatctctgctcactgcaacctccgcctcccaggttcaagcaattctcctgcctcagcctccctagtagatgggattacagcactcgctgccacacctggctaatttttgtatttttagtagagatggggtttcaccatgttggccaggctggtctcgaactcctgacctcaggtgatctgcccgcctcggcctccgaaagtgctgggattacaggtgtgagccacctcacctggcacacactattttaattactgtagttttaaaagtttcatatttagtagggtgagtttttccttgttggtcttgtttttcaaaaaaaatttgctgctcttgagtattttctcttcccagtgaactttaatgtaaactcacgtggttcaatgaaaaattctgatgactttttttcttggtattgcttcttgagtgtattgatttaattaatatatttacagttttgggtctggctgtgccgaaacgcagtgtgtcttatccagtccttttttaactgtcttaataaaatttgctggttatctttaaaatggatcttgtatattttatgttaggtttattcccaggcaggttgtcatttttgctgttactgattttggatataaattttggatataattgtataatttggacttggatataattgtatttgattctgtcttatatataaaaatgagataggataataatttatcctaggataaaaataatttgagtatccttattttgcatctggtaccttacttgctcctgttaaacaaatagataaaattacttgtcttcaaagagatcctgtggaaaaattatttattttaggagactttggagctttgataaaaattaggcttatcttttgtaaaagctggttagtgatagcaatcagactcttttaaaggtgatttttttttctttcctttgataaaatgcttaatatgagggaggattaagaaagaggatggcttttgaacagtttcttcatggggaaataagaaattagaataatttcatgttctccaaaaaaaggagaaaaatgaccttccctcctgagcctacttcaagcctctgtttctttctgactctattgttctcatctctgcatttttccaatctcttctactgttagtgttttaggctagctcctcagtggagggcagaaattcaccttctctttagctgtctttgaaaccaagaagatagaggtatgagatcttcgtagtctgtagtaagaataatagaagccatcagaaaaaaatatcaaagctttgtagctgctcctggaagttttgatgtgaagcaggagacatcacctattggtacctgacttgcttttgctgttcattcataaaacagagtctctgaaatacagtagaaaaataattagactggaggataacttttttccttccaggaattacacaatcacaaaattgctgatttttcttcttattcatgttacataaacttatcctgtccgaaaagactgtatttgaacttactatgtaaratttgctttaggtaaatttatggctgcttccagaattgtgtattaattttccagtttcttttttaccagtctccacttttacctttccctcttccccctatacttaaattggtcttactgtaaaatttatgcgtttctctttctacctggcaatgctgattttttttttttttttttttttgaggcaaggtctcactctttcacccaggctatagtgcagtggcaagatcgtggctcactgcaacctcgaatccctgggctcaagcgatcctcccacctcagtctcccaagtagctgggactacagatgtgtgccatcgcacctggctcatttttgtattttttgtagagatagtattcgccatgttgcctaggctggactcaagccagcctcctgccttagcctcccaaagtgctgggattgctggcacgtaccgctacrtccagccagggctgagtttctgaatcatcattgcagcaagagaaattggattacctttagaccactggctctactgtgggctgggagtgggacaccttccttaaagcgcattggacattggctttgtgggtaactgatctttacctgaatgaaatttatcagtactgtattaagggtctagggtggaayggatgctagcaaggcaaccgttaacatccacttactgatgaatcctataaaattttatttcaggccatacgaagtaacagtaataaatataaaaggaaaaatagacaacctaagcaactttttaaattgacttacttgaaaactttccctgcaatttcccggtttataatggttgatttcagctgactggctatagctacttagagaacagaggaaattcattaaaaataatgaattattcagttgggtagtgaaatccagttataaagcacttcgctgtgccatggattcagttcaggtcaagtgatgttcctggtttatgggcagtgtggcttctcactatgacacagcaaagaacgtagcttttatcctttacccttgttactaactaaaattaatggcattttattgtgtttatttgtttgattccatttacagtttatttcacttggttttattagtacaaaattgtgctttatataatatttgacagttaggaaaaattgttagatacctataaagaaacaagtctctcaaaaatcatcctactacttttaaaaattacatcgtcttactacagttaacctagatgtgaatgggtagttttatttagcttttctggtttgtttgcttggtctgtttggagggaagttaagattagcagaaatgtagtaatagattcatgaaagtcttgaaagcttctttaattagagaatttaatgagggctttggcatgcattctttggtttttctctgttttcctctaccccttcttattctttttggttcattgaaaagtagaaagaaattctcaaaaaccgtacaggagaataccttataaatgatatcttctgcaataaactatagattgtatatatgtatatgtatctagatacacaatctgtgtgtgtgtatatatatgcwtgtgtgtgtataaatgtataaattagttactagtatatacgtaagtataaaamctcaatgtgcaaggttacattttcagaaaatatgtaatataataaaagaaatcaagcccagaatttttaaaaagtttattgcgctttctgttaaaaatgaaaggctttttgactggaagctgcttctcagtaaaaataacataattgtgttggtgaagcccaaagattctaatgaaaattagggtattgacaaccaaacggaattgctggagtacttaagctgctttggttttgtaatctttctgtgtcagaatatttgaaaaacacttattaatccagtcttgtaacttatccttgaaatctcttttttaatattcttttccacacacatgaaaagttagatgagtgtatgaatttctgttgtcagactagttgtaaacctcctaaatatagtttctgcagtatagttaaagagaaagaacatcctggctaacacggtgaaaccctgtctctactaaaaaaaaaatacagaaaatgagccgggcatggtggtgggtgcctgtagtcccagctactccggaggctgaggcaggagaatggcgtgaactcaggaggcagagcttgcagtgagccgagatcacgccattgcactccagcctgggcgacagtgcgagactctgtctcaaaaaaaaaaaaaaaaaaaaaaaaaaagaaagaaaataggcccagcaaggtagctcacgcctgtaatctcagcacattgggaggctgaggtagggaggattgcttgaggccaggagttcaagaccagcctgggcaacatggtgaaactccatttctacaaaaaatacaaaaattagctgggcatggtggcatgtgcctgtagtcccagctacttgggaggctgagtgggaggattgcttaagcctggggaggttgaggctgcagtgagctgtgactgagcaacagagctagactctgtctcaaaaaaaaaaaaaaaagagatgggttttgaaattcagtactttttttgagtgaggtccaatgggtcagaaagaagcattggataaatgaatccattttctcttctctgtttgaatttgtaatttgaaagaatattctacctataaagtacttcagtgcttaattagctgtcagtgaatttatatatcttatctaattcatatggatttgctatttttatctgtacctacagattcctgacctctctaaggggatcccagtatactatagggaatgaggtataatagaagtaaaagacctatcactagtcctgtcatcattccaactcatgtgtaattatagtttaaaagaagtgacatcatgtgtattgctgtttatctttacattaatcttgtggtcaagaaagcaaatactataatatataataattatataatatcataagacaagtaatataataatgggaatataatcccattttacaaatgaggaaatgaaaatttagagaaataaagtgacttgtccagggtcacatggatactaagtgaccaagtgtcaaagcagaattttccaaataacttaaagataattcttgtacaaatatagaaygaacacatgtcatatgtgttgtgttaatgagggaaccagaaggatgacaacattggttcagagagatgcaaagataaatatagacattggaggaaaaagttggaaataagattgttaggttagatacaaagctgtgttataggccaataaaaaccatagactttgaggttatcttttttactggacaggattcagttacacctttatgagaccaaaatttattatttaacatgtggatattagagtctgagttttaaaattattagtaaatgaccgtcaaataaagatatgtcccctaatgaaatactgataatcgctgggtgagcttgtgctcctatatgacattgaaatgacatactgccctctctttgtcttctaagttttggatacttttttttttttttttttgacacaaagctgcattagaacctaggtttcttgaytttcagtccagatttctttccactctacttcctgcttcttcatagtataattttcaacactagagcagtctgcataacttttgcaaaatcagctagtctttcttattagttttcctttgtgcaaagtgatgtagatacagctttcttcttcagagaaacattgtgaaattcaatgaatatttgtaaaatttgcatacgtgcccaatgtgagaaattgaaattattacttaagtattgcaactgttcttttaggatattttgtttgcaaatttcagagtaattataaatattcttgcatttttattgtaatcagtatttataaaacagtgtatttcatcacattaacctttacatattttgaataaaatagtattgaaccattttaaatagtaagtggaaatttttccacattaaacagtataacgggctaacagagttaagcattgcattatttaactaataattttttcctgaacttcagattattatctgtatgtgtcatataacttgacaattttttttttttagtgctttttaaaaagagtgggatactttattcagtttagccctcaagcaattaggcaagtcagttaccatggtaacagtaggtattaatttccttacctagttrgaggttttatgaacaaagaaatctctgagttcatccaccaaaacccaactttctcttgagactggcctcttgagactggtgttaaatttgtctattttctagaagatgacrctattctaagtggaaaatacggttctcttgaggtgaatttctactctatcaagagtgaagtagagtatggcttaaaagttaagtgattaaaaagctaccctttcttagctaatttgkaatgtaattggtcttaatttttctaaattcgttctaaccaaaatcttattggcgtgatttctattgacatgaactagaagtgacttcagcagacaacttgtcccaatatctaaatgctgtcaaatagaatcacttaagatgaatttcttccaaaacagagttcacaattttgacagataatctcttagcatttaattgactagtattaccaaccttatggaataggtccactcgtttagctatcatgaggaccattttgcaactaacttatcaaaaagccttcaccaagaagttgcatatcttattgatattttagaatgcgattatggagattaaaaatcaccacaatgggttgttaataacgccagccttgaactttcagttttagagcattttatctgtgttctgtagtcaaagttggtaaggtgtccagtgggtcatgtttgacttgctgcttgtttttgtactgtgtgctaaatggtttctacatttttcagtggttgaaaagtcaaaagaagaataatattttatgaaatttaaataaatccaggtttcagtgtctataggtaaaatttcattgtaacgttgttatgcttaagtattgtttatgacttctttgctatagtgacaaacttgagtagttttgacaaagatcatctggcctgtaaggcctagaatagttactgtctaaccctttagagaaaaaaattgctggcccttgttctatagtatgaaaaaatatagccttgattattcattaaaaaattattttcccattttattgacatacttttgtcccctgattgttaaaaggaatgcatgttcttatagaaaagttggaatatatagaaaagtataaagaacaatatgaaaaaccatttgcaattgtgagataaccactaatgttttggtatacattgctccagacttacacacaaacacacacgcgtatttattttatacaattagagtctaattttttttttgagacagtcttgctctgttgcccagggtggagtgcagtggcaagatttcagctcactgcaacctctgcctcctgggctcaagtgattcttgtgcctcagcctcttgagtaactgggattacaggcgtgcaccaccatgtccagctaatttttgtatttttagtagagacggggtttcgccatatgcccaggctggtctcgaacccctggcctcaaatcatcggcctgccttggcctcccaaagtactgggattacacacgtgagccactgcgccttaattttttaatttgcttttttcacttgaataattataagaacattatttttaatgactgtgtagtgttctgttttatggatgtaccatacttaattatttagtcataatttattattatgaggttgataaacatgataatcagattgagctcaagaagctagttatagggttgcacaattaatgaatcccaggtacctcgctgggttgctgaggctgctatttttttcctgcctgtttggaacactgtgtttgggaccaatgaggcaaaagaaattgaagagctgccattttcaattattctattagaagatacattgaagatttgtcaaatgacatagacacaacactaatccagaagattatttaatcaaaaaggcattcatttcagatatgaattcataaacatttgtaacgatcctcagtttgaagaccatatagaatccctgaagaactggaagacactatttgcttggcaaagagaagtccccagaccaactggggatgaaatattcaaagagataaatgaatactttgaaacatacaaggtactatggaaaaagagtggaagtttgggacaggtaatgacaggaagatataaaagctttacattaagttcaatctaaaactttattccaagtaacaggttgtcttattcatggagaagcagttgtaaattaaaacttgcctgtggtttggaatttcacattaaatgattacattaaaaattcaaatggtgaacctaactaaatccaagctcctacagtaccttcttttcacctttaggtgaagaaatgcggtgagctattttattactgattatgtggacagtccaaaggaaggttcataagcgaaaaggaaaaatttaaattattccatgtgagcgattcttactttgcagatttgttgaagtgtagttactggcttcaaaaagtggtatccttaactgacattttgaacacttgaattcactcaataaaaaaatgcagtgatcatgtggaaaatacattaaggtatatgacagagtttatggattcagagcaaaaattcagctttggaaaagtgaagttaaaatggttttttaagtgatgtttaattggtgttatttgaatcctaaagaagaattaatagtactagtagaggaaagtcagtgtgtctgtgacaaagctttagtattattttgaaatacttgatataaaaaagttcacgtttactcaaagcttacttaaatcatcagaataaattaacatgtttcttaattaaagaaaaggagaagctattagacttaaaaaatttttgcacccttgaaatacatacaatttgaagagattaagttgttggaatactggttaatggtgaaaaaggagttttcagtctatgaaagcaaagccttctcctttgccatttgcttttttgtagtggttgctatgtagaattcgaagaaaatattgttaaaaagtcttggtcaggagtagagtgtagcatgaacccaatgcattttaacgttaataatgaggaaaaagggaatgcatgataatttcatcaagtcagaaaaaaatggaaaaagaaaaagaggaaactgaagaaagtaactgatgaaagtaaggtgaaagggaaaacaactttttataccacctgtgaatgagattaattttcgtttccatactgaaagacaaatatattccaattaagccattcaaaataaaaaacaatttttttttggtaagagatgggatctcactatgttgaccaagttagtcttgaactcctgccctcaatcagtcctcctgcttcagcctcccaaagtgctaggatttcaggcatgagccactgtgcctggccaaaaccaaaattaagcaacaaaacaacaacaacaaaaattccagacagcctttaaaataatgataaaggttgaaaaattgtagatagtggtaggtagataagatttcaggaaaagtccaaagcaaatcataatacgttattttaaaggggggtttaaaatcctttaaaggtacaatgtgaagcattatgaaatgataaaatacatgttttttaaaaacattaattttattttaagttccaggatacatgtgcaggacgtgcaggtttgctacataggtaaatgtgtgccatggtggtttgctgcacctatcaatctgtcacctacatattaagccccgyatacattagctgtttttcctgatgctgtccctcctccaggacccagtgtgtgttgttccccatgtattctcatcgttcggctcccacttataagtgagaacatgtggtatttggttttctgttcctttgttagtttgctgaggataatggattccagttccatccatgtccctgcaaagtacatgatcgtgttcctttttatggctgcatagtattccattttatatgtaccacattttctttatctagtctatcattgatgggcatttggtttttttccatgtctttgctattgtgaatagtgctgcagtgaacatgaacatgtgtgtgcttgtatctttataataaaatgatttatattcctttgggtatatacccagtaatataattgtataacccagtaataggattgcagtgtcaaatggtatttctggttctaggtctttgaggaatcgccacactgtcttccacaatggttgaactagtttacattcccaccaacagtgtaaaagcattcctatttctccatagccttgccagcacctgttgtttcttgattttttaataaacgccattctgactggcatgagagggtatatcattgtggttttgatttgtatacaaaaaagatttgtatttctctactgatcagtgatgttgagctttttttcatgtttgatggttgcataaatgtctttttttgagaagtgtctgttcatgtcctctgcctactttttaatgggattgtttgttttttttttcttgtaaatttgtttgagttccttgtagattctggatatagacctttgtcagctggatagattgcaaaaattttctcccattctgtaggttgtctgttcactctgatttgctgtgcagaagctaaaagacatgattttagaaaaagacatgtcaaagtcatacatgctcaacgacatagcgagtacatatgtaaataaaaaattattttatgctgtgaatttgaccgaaaataacctttacctcgtcaggaattacaatcctcacgtatggtaaaggatttccctattgcaaattattccacaacattaatgttctgtgtgctttttatctatcccaagatacaagtaaatttgacaaagatattaggtttgtaaacaaatttacgttcaaatctttgcctggaagtatctagatagaattttgcatgcaaaagagtatttacatctaaaaaattacatatttcaaattaaaatgattttagtgttatagatagaaggaaagagttattgaagtttatttctgttttggcagtgtaaatgaattacttacaaaattttagaagtctacaggtgtttttataaagtttgtgttatttgtggaaacctcagttttctggcattttgccaatgaggtctactctaagtatagcagaaatttgttttccagctttataaatatatattttaagattaagaactgattttacttatataatctgggatcaacttttggcttctcctgtcaaggattttgaatttgtgacaaaatatacacttattgataaccagtgacatatataaaatgctttacaattaataaagcatatgtattttacatattttttcactacatatgacgcatgtggcaaccccaagagttgagttgtacccatcggcaaactttgatcatgattctgtgaatataggcaagcascaattgcaggtagaacattctttttttgagtcccaaaccgtgagaaacaaattacagaaatgtacctttcttttgcattaggacacgttgtagttttgtatgaacactctagttttaagcagtatgtgcaaaaacattgcacaaaggatttgtgtgttgattttgggactcctgtattattaattatgtggtttatttgactaccccacattttcaagcataaattaataaatccataattccaggcttattaacaataaacaatctagatagttgaactctttcttgctaacattttctagatatggactgtttggtatttttctactaataaagacccttagtaagctgccttctggtttgatgtcattgggatgtttactgggaactttggtggagatcttgcagtctctctcccccagtggtgaaagaatgagttacaaaccagctttccttcccagtgtacaatagcgatggagtttgttctatatggaaaatttgtttgataaaagtattctttaaaattttttgttccataaattatcagtattttcagtttctgattcatgcttgggatagttgctgcatattgtttaattttgtcagaatttatattgttaaatatcaaatacgacagactaccctcaaatcataagtagttaatgtaattaacatcctgtttcatcatgagactcttcagtgttacattaaaaactgctacctcctgggccgggcgtggtggctcatgcctgtaatcccagcactttgggaggctgaggtgggcgatcggatcacgaggtcaggagattgagaccatcctggctaacatggtgaaaccccgtcgctactaaaacatgcaaaaaattagccgggcttggtggcgggcgcctgtagtcccagctactcaggaggctgaggcaggagaatggcatgaacccaggaggcagatcttgcagagagctgagatcgtgccactgcactccagcctgggcgacacagcaagactccgtctcaaaacaaaaaacaaaaaacaaaaaaactgctacctccttattacaaataggaactaaagttgaagtttgaggaatttgctaagaactaagccttgaactaaggctattttatttgagtatgagtcatatcagggtacggatccattttactattaacaaaacaaatatgttctkttttttttttttaaatgcacacaccacgtttgagagattcttattcactgtattttctttaattatacttgaattttggtttacattgaggagtgccctcaaagatattaacagatttttaaraaatcctctaaaaaactcattcttagggaaatttgttcacttactaggtraggagcaaaataaaaatccttaatatagaagagctattatctgtcttcaaaattaagtctttgagtagatttgtgaataaatctaatagttttgctgaatttacttagatcttaagacagaataatcatgtagaaaatttaaaatgtcaggaattcataatgattcatatacccaaggattttcattgatagtraggtaaggttattcttgagaaagactcaaagtcataaaataatagamtttcgaaactaccagaattatacaagtcaattaaaatgactgatttgttttaagaggaagaaatactaaatgtataattattagatgcagcatattgtatctgttttgttttgtgattctagctcttataacctatgcttggacctaggtgtcataacttactttaaatatgtatgtttggttttcattcatattgacagtactacctctcagttttctttcagatattgttttgtatttacccatgaagacattgtttttyggactctgcaaataggacatttcaaagatgagtgaaaaaaaattggaaacaactgcacagcagcggaaatgtcctgaatggatgaatgtgcagaataaaagatgtgctgtagaagaaagaarggtatgttgytcattgactattctttygggtgagaaatttaatttatatttgactgygcaaagagtcagttgttacttgtaaacttcaagtcattgtttaggtcagagttgctgttgtctaaatgcaccaggacctagttgttgaaagggtaaactggaataaactttaattgggtttacaaaatgagaattcttactgtatattttctctttttcgggttgactttaccagtttgttctagttcagataatttagacaacattaactttgttgaattttttgtttgccagccggtcttcagcattttaaggcaacattattattacagttgtaatacgaatataattaccagagaaraaactcaggaaaataaatgcytttatgaaaatgggattagaggtttgaaaataaacttgttaggagaaataatttcacaatgggatggttttttctttgttaagttttctttatgacttcattagtttataaaacattaattgataaaacttagaactataaattgaatgcttcagtgaactttattatttcagtgaacatttgttatttgatgtgaactttgtgcctgttttgaaatttactaaactcaaggcatgtgttcrgaagagtgtttttgaagatgacctccccttcttagaattcactggatccattgtgtatagttacgatgctagtgattgctctttcctgtcagaagatattaggtaagtgatttgaatttcctgattttatttgaatttggacccttagaaggtactattatggtaatgtttgtgaatatactgagttttacaggtgaggtgtgttcaatagataattatttctatgtatacactatcaccaagttttacatttcaaataaaagtcactgaattaatttgtaatctgtcagtttgttcattcataagcttttctattacttcagacagtttttttttaacttttttaatatatgtgctgctgaagcgagcacgacagttttttaactttcagtacttaagatgttatatatagagctactgaacatactgtgtttattttaccaatttagggaaaaagtgcaaaaattatttaacctttaaatgcacctttatatttcattaaaaatatcaacatagtaatattgaataatggctatgatcggctctgttgtgtgtaattagtaacagttgtagcaaatgatccttaaaaaatgttctaactaaacattagaggccaggcgcggtggctcaggcctgtaatcccagcactttgtgaggccgaggcaggtggatcacaaggtcaggagattgagaccatcccggctaacatggtgaaacaccgtctctactaaaaatacaaaaaattagccaggtgtggtggcgtgcgcctgtagtctcagctactcaggaggctgaagcaggagaatcgcttgaacctgggaggcagaggttgcggtgagccaagattgcatcactgcactccagcctgggcgacagagtgaggctccgtctcaaaaaaaaaaaatccaaaaaaacaaccccacaaacaaacaaaaaacattagaaatgtctgttagtacttttaaaggttgccttgtaaaattaggactgcaatagtgcaatctaaggctctcaaagcataaaacaagtaataaggaattcattcagatattttccgaggtggttatacctgtcttttaaaaaaaaaattttgttatatattgggttaaaaaaagcagaggtgctgggcacagtggctcatgcctataacccctacactttgggaggccaaggcaggaggattgcttgagcccaggagtttgagaccagccatagtaagacccccatctctacaaaaaaatttaaaaattagccaggtgtctgtggtcccagctactcaggaggcctaggttttgggcccgagaggttgaggctgcagtgagccttgatcacaccattgcactccagcctgggcaacagggcaaaaccctgtctcaaacagacaaacaaacaaacraaaggcagaggtaggttaagctrtttattaatggtcttctactggtatagatataagctagaaataacattcaagtgtttttacttttactacagttatctggccactttgggactcattatactgaattagtttcacagaggaggtaaaatctgttgtttatgattacatattaactctaccattttaccttcagcattgctrtagtatgtcatatctgaaggcaattagcacaagtgacttgaagaattgtagttttgatgacttatatgtattttataaaaggcaggcagagtttttgtgtttgctttcccctcctctggacactttaaatttttgctaccacaggtttccaacaatttgattatgatgtgcccttgtgtaatgtggttggtgtttatttggcttggagttcgttgaatttttttgatctgtgtgggcttatacctttaatcaaatttgaaaaatgtcttcagatcctttttcctcccatcctgttattcttttctctttctgggactcttagtacacacaagtttgattgcttgatactgtgtcacaggccactgaggctctttcctttcagtcttttcttctttcttcctttttttctttctgtgcttcattttgaatagcttgaatagttttgtttcctgtcttcaagttcacttatatttttttcttctgtagtgtctggtctgtttataccatcctgtgaatttcttttttagatactacatattttgtttatctctagaagtcccatttggttcttaatttttttttccattttggctctcattattcatgtttctttcaaaattcttgaacatatttagcatatttttaatagctgttttaatgtacttgtctgttaattccattattctagggtttttttctttctattggatgatttttctcctgattatgggttatattttcctgtttattcctacagctgttaattttttttttttttaattaggcattgtgatcttactttgtggaatgttagattttattgttttcctttaaagaaaggaactttgtcagacatctaagttacctgaagatcaactttatgttttgaagcttgttttcaagcttgatcagggaaagtctacgtttgcctttagtctaaaggtaatttagccctataataagatgtgacccttctggagtctttgtagactgcctctggtgatcaacgatctcttctctgacttttcagaacgttaatgcctcttacctttgtgtaagtccgtcctaagaatcattcagcttatggttgtttgcccagccccatagagttttagtctatgcatgcttgtcttcgtattctgcaaagaccaaaggagtcccttagggagatttctggagctcttttcctgcctagcttcctcctctccagaactctgccccgtgagttccaggtccttcagcttccagggctctgaactctgtctccccaactcagtgctctccttgggattcttctccctgttctgttgtctgcaatgggtcccaggaagaatgtggggcaactgtaaggttcacccttcatttcccttcccttagagatcatagtcctgtactgcctgttgtctagtatctgaaacagttgttttatatgttttgtccaagtttagatttgtttgtggtgggagggtgagtctggcctcccttgttatatcatgttgkcctgaagcagaagctgagtttcttttattttttaaatatagtttcaatttttaacaactattaaataggcaagtatcaacaacaatagataacaatataatagatatgcatattcctcccactttatcaaatcttaattttcttcaatttttttttttttttttaatagggtctcactctgttgctcgtgctggagtgacagtggtgtgatcttggttcgctgcaacctccgcctcttgggctcaagtgatcctcctgcctcagcctcctgagtagctgggactacaggcatgcaccatcatgcccagataatttatatatatatttttttatagagatggggtttttgccatgttgcccaggcggtctcaaattcctggactcaagcaatctgcctgccttggccccccaaagtgctgggattacaggcgtgaaccactgcgcctggcctgttttcttcagttctttattaagaaatgaaacagtaaaatacagctgaagccccgtgtttgttctttctgattctccctctgtgcccctctgagataacttctatgagttttgtgcatttttttttctttttaataaaaacagggtcttgctctgttatccaggctggagtgcggtggcgagatcatactcaatgcagcctcaaccttatgggctcgagtgatcctttcgcctcagcctctcaagtagctacaactactggtgtgtgctgccatgcctggctaattttttatttatagtttttaaagacagggtctcactatgttgcccaggctagttttgaactcctggcttctagtgatcctcctgccttggtctcttacttaaagcactgggattacaggtgtgagccactggctgctcacatgttttttataatagtacttaataattttatgtctgaaaatattatataatgttattttgcccatttaaaaactttaaaaaatgctaacaaactgtgtactctgtaacttgtcttttttactcaacactaygtttttgagaatttttcttgttgatctgtgtagttccattttaactgttatatcttactatgtttcattatgcaacagttggttcaatccattctcttgttaatggaaatttagtttgtttctaatttttgccagtaggaacagtgttgcaatgcatattcttaaacatgtctgtacacatctgagggtttcatttatttgtgacaaaacttgccaggtcatagtgtttatgcaccttcaactagatattgtcgttgtcaaagtttttttccaaaaggattttaccaatttatacatgaaccaccgatagatatcctcttaacacgtggtattctgaaacttaatttttaccaatcagatagatgtgaaatcacgtagacttagtttgcatttctttgacttctagtgagaagtagtgtcttcacatattttttggatttttaaaatttattttttatttttgtttttcttagagacagggtcttgaacttttacccaggctgaagtgcagtgatgcgatcatagctcacgctaacctcgaactcctggactcaagtgatcctcctgcctcagcttcctgagtagctgggactacaggtgtgtgccaccaagcccagctaatttttaatttttttttttgtagagacatgctgtgttgcacaggttggtcttaaactcctagtctcaagcagtcctcctgccttgactttccaaagtgctgggattacaggggtaaaccaccatacctggccatatcttttggatttattggtcatttggattttcttttgggaattacctgttcatatttttctccatttttctgctgaataatttgtcttttcttacttatttttcaagaaattttacatattttctggctgttcattgtcagttgtatgtgctccagataacttgaacagtctgtggttgccttttaatttttgaattatgtctttagttatgcagaagtttaaaattttarcataaattaatttacactatttttctcactttagcatgagtctatcagatggggatgtggtgggatttgacatggagtggccaccattatacaatagagggaaacttggcaaagttgcactaattcagttgtgtgtttctgagagcaaatgttacttgttccacrtttcttccatgtcaggttggtatctctacatttcwtttttatatggctgataattgtaatatgtcaactttatccctataaaattaagttcttttattagctggccgttctctcattatctcaaatttatttaagtatttatgttctacctgattcactcacattccttgttttatttaattttcacaacrtacctgtgaggcattgacattttttctgttttagagaagagaaaactgaaattttaagaggctaaatgaccaggatatgtactgctattgctagcaggagtggcattcaaactgattattttttcttgtcatttatcaatcaggactgtttgctttagttaagaaatactcaaggtcaatgtgtttctgaatttaaaattactgttaaatacaaatttayacataaacatggtatgtataagaagtaggacataaatccatcatacttgacagaacttatggaaataacaagaaaatgttacagtttttccccagggattaaaaatgttgcttgaaaataaagcagttaaaaaggcaggtgtaggaattgaaggagatcagtggaaacttctacgtgactttgatatcaaattgaagaattttgtggagttgacagatgttgccaataaaaaggtaaaagcaatatatatataattttcatgatgaagattattttgtgttacacagaatgtactttctatctgaatgttagatttttttttgaaaaagcttgttatataatgtttttgtagcaataaaaaagttccaagtgaatgttctttaatgaaaacctttatttatttatttatttttaacttttgtttcaagatcggggtacatgtgcatgtttgttacacaggtaaacttgtgtcatgggggtttatcatacagattattttatcacccgggtattaagcctggtacccattagttatttttcctgattttcttcctccctcctcccaccctccacctcccacagtgtgtgttgttcccctctgtgtgtccatgttttcttatcatttagctcccacttataagtgagaacatatggtatttggttttctgttcctgcgttagtttgctaaggataatggcctccagtgccatccatgtccctgcaaaggacatgatcttatttattttttttatggctgcatagtattccatggtgtatatgtaccacattttttttaatgcagtctatcattgatgggcatttaggctgattccatgtctttgctattgttaaatagtgctgcagtgaacatatgcgtgcatgtgtctttgtaacagaatgatttatattccttttggtatatacccagtaatgggattgctggggcaaatggtatttctttctttaggtctttgaggaattgctacacagttttccacaatggaaagcctttagttctaatccatgtcttggcatagagtttcttttctttttttttttttttttgaggkggagtttcgctcttgttgcccaggctggagtggaatggtgtgatctcagctcactgcaacctccacctcctgggtttaagtggttctcctgcctcaggctcctgagtagctggggttacaggcatgcaccaccatgcctagctaattttgtatttttagtagagacggggtttctccatcttggtcaggctgatctcgaactcctgacctcagataatctgcctgcctcggcctcccaaagtgctgagattgcaggcgtgagccaccgcacctggccggcagacagtttctttttttctttttgagacagagtcttgctctgtcgcccaggctggagtgcagtggtgcaatcttggctcactgaaacctctgcctcctgggttcaagygattctcctgcctcagcctcccgagtagctggcactacaggcgtgccaccacacccagctaattttttgtattttttttagtagagacgaggtttcaccgtgttagccaggatggtcttgatctyctgacctcatgatccacctgcctcggtctcccaaagtgctgggattacatacagtttctttaagcaagccttctcttttccttcctcccagttcttggtactctttcactttcatatatttgcaaatgtaaaattgtgttttaggtgtatatttttaatccatgtataccagtaacttaaaaaaaaatttttttttttttaagggagagcataatggagctcttgtgatacggtgctcttagtggaagtttggctatcaattccatcacctgtatttcacatattttattaatgaagttcttaaattaaattctcatatttagccaagtattcatttggctgggaggtagaaagcctactaaccaactttttttcatgaacaatatttttaaagtccaagatttttaatacctacattagggaaattctagaattaaattcttacaatgtggactgcatatgaggcttttagtgacagggaatttgttgaaggctatctgtgggttgtattttggtataacatttcctaattttatttgtggtatgttcatttgatatcatttggtaatacctgaaaacaggaactgattttactgtgttgctttttcatcatttctagctgaaatgyacagagacctggagccttaacagtctggttaaacacctcttaggtaaacagctcctgaaagacaagtctatccgctgtagcaattggagtaaatttcctctcactgaggaccagaaactgtatgcagccactgatgcttatgtacgtgcttaaagatctttagaaattgtgatgtgttttaaaaacattattataaatgactttagaaaaattttattatagtagtggcagaaactctaccaaaatattttatatcaatttggcattgaaaaatgcttaggaagacatttagtgaaactattcattttcgatattaattagcaagtaccaatcaacagattgttcaatgctagtttattttcattgtcatgaagccaaattaatgtctaatttgtatgttaaaaaatgtgaacttgctgaaaacatgaaaggctaataaatccaggctgagcaagcataaatagtactgatgatggatttgatatataaacaattcagaatgaaaataattatagtacagtttctattttaaaactggccttatttcttatatataaaatgtggtgaaattttagaaaaattgcctccaaatttagcttgttgctgccattagatatatttttatatttacatgtttgtatgtagtgaaatctgggcttatctttatatatagcactattgtgtgttttttaagaaatgtattttattccacagtgaatttgttttctcctaactcatgctttcatttgtagatgaatattttattgtttctcctttgcatctatcaaaggaatggaaactcctttgaattgtaaccagcaaacaattcacttttgttagggaaattggatgataattttcctttaaaagataccgccaaacttgagactaacattctcagctgatttaagtaggatttctcttactagattgcattttgttagattccattttaagttattttatttggatattgtgtgtaatattgagtgtgaaaaagtgaaaacaaacttttaaggctcaggcacctttctcaattttcacaattggtatgattattaaatgaggacatattgatatttgtgtcacataataggttgaattccatgtttgggtgctttgtgaatcattctcttcgatttttctgaagatgggacttactgttttatttcggtgatctttagcatacttttwaaatttttctgtttttttataggctggttttattatttaccgaaatttagagattttggatgatactgtgcaaaggtttgctataaataaaggtatgttaagatccataaataaaatgtgaattcactcttttgtgaggtttatctccaaaaaaggcaatattcayatatttgcaaagcatttagtactataacttcttgaatgtctgagcrgtcctgrcattagggtgggatccatcagggcccaagatgagtgtttcatctttgttacttgtggcaaagcagcccttacttcttttactttgtagcattgctatgtatttggcttctagagttggggctttgtggctttcttattgcagtgacacaaccagctttctcctagtctggagrttatacatccttgctataagtatttaaaatgctttctatataatgctttaaaacatgtaagatggcttatccccaagatggtagctaataaacactaagtgataaagtaggtaaagatctatttattcatttattaaatattgttggtcattttacagtgctttctaacatactgatttacatttctaattttcttctgtcatttttctccaaaaataatggtcatgtcatccaacctcagtgctgtttttagaggtcttgataagccagtgagagcagaaggagccacgtagtagagtgggtgagcccaggctttttgttgcacagaccaatgtgaatcccagccatgtgacctgggatgtacctgtttctccaaacatggaatgtagatactagcataatgtccgttttaccgttttatagaataattgtgaagacttaaagggacaaactattcgaagcatctgtattgatataaagttatcactattctcgtagcttccttttggagattttaaatgattgtgtttgttaagatgttaattaaattaggccattttgctaaatgctcttaaaaatatggcatgactgcctcatataaaatgatatgatattctttataattgtcgttgagcctctgtgggtggcaggccctcctttatatgttaaggtagaagagtctttattcttacttctcctccctggagagccacttcctatgaatgcctgctggttctctgtagtcagaggtcttgtggctgtaacttagagtcagtctccatatccctgggttctgcatctgtggattcaaccaaccacagattgagaacattcaagccaaaaaaaaaaattcacagttttaaaaaaggaaaagttgaatttcttgcatggagtaccacattgaatctatatgaatgaagtgatgcgtaggcattttataaggtattataagaaatccggagatgatttaaagtatacaggacaatgtgtatagattatatgcaaatattgcagcattttatataagagacttgatcatctatggatttgatatcagtgggagggaggttcctggaaccaatccctcaaggatacagaggaatgactgtatgttaattaactgaggcaggtgatcggttttttaagctgattagggaaacagtatataagaacttacttaactcataataaaactaaaattcaacaggggagagttatgattttttggctttatggttgtggaattgcatgtaggttacatgtacaattttgttacatgtgcaattttgatgaaaatgcttccaaggaatgtttatgatatttttcactaaagtaacatatattaataacacagtactggaagtcctggtatctgtgtacttgtcattgtaatgctacattatttgaccttcactttttttcccctttattacattatatgtgtgagtatattgtgacatcttgactcagattccagtgaattgtattaggttggtgcaaaaataattgtggttttggtaatttttaatggcaaaaaccacaattacttttgcaccaacctaataactaagattaccatctttttttccttccttcctcccttccttcctttctgttattcagccagaagtatcagcatcactgttctcttattttcttcatgtacatatggatgatattttcgaatgaccacttttctcttttgctttttattattagactgtttttttcttcttgttaaaggataaaargattagaacataaaaggatatttacacattgtttccccattgacttattcccaagatggtagctaataaacaccaaatgatatagtagttaaagatacattgactcatttattaaatattgttgagcattttacgatatgggaataccgtagtgaacaagccaggcatactctgtttcctgaggggcctacagttttattggggatatagatgagtgaagaaagcaattgcagtgtagggagatgagtcttaygtcatgggaaaacaaggtgctgtagttgacacaccgagaggcatctgacacattgggggaaatattctagaatatttcctggagaaagtgcaggtaaaagccagacctgaaacctgagcaagagttagctaaggccaggtgcagtggctcacgcctgtaatcctagcactttgggaggccgaggtgggtggatcacctgaggtcaggagtttgagaccagcctggccaaaatggtgaaacaccatctctactaaaaatacaaaaaattagctgagtgtggtgacgggcacctgtaatcccagcttcttggraggctgaggcaggagaatcgctttaatctgggaggtggaggttgtagtgagctgagattgcaccattgcactccagcctgcacaagagcgagactctgtctcagaaaaaaaaaaaaaaaaaagttagctagctgaagagtataggaaagaatgggtacaggaaattacaggtgccaagttacagaggtgagagaaattatggtatctataggtaattgaaagtaattcagtatagtgaacattgaatagggctgggcggatgaaggcaaagcagaaaaaggaaagcagawgggccatggtaaggagtttatatctcctcccaagagcaatcgaagtgactgagagttttaaacacagcagtgaagtgaattacattaaaaaaataagaacttgggctctagaataaaaaacggatataggaggaaggcaggagtcacagtaggaatatcttttgggaggctgtgacaataatccaagtgagaagtaatggcaacttgagtcggttaattgtgttgagaatggagagaagttgacaggttcaaaattcatttttcttctttttttgagtctcactctgtcacccaggctggagtgcagtgatgcgatcttggcttaccgcagcttccacctcctgggttcaagtgattatcctgcctcagcctcctgagtaactgggattacaggtgcctgccaccacgcccagctaatttttgtgtgtttagtggagatgtggtttcgccatgttggccaggctggtctcgaactcctggtctcaagtcttccgcccacctcakcctcccaaagtgctagaattataggcatgagctaccacacctgacctcaaaatacatttaatagagcaagcatgagccactatgcccagcctcaaaatacatttaataaaccaatggaatttgaggtaatgatgaaagacacatgtcaaggatcattcctgtgttgttggcataagcaacagggatgaaaagcattgaggaagagcaagattttgggatgcgttgtcacacagttgattttaggtatgttaagggagggagacctgtaagacagcaaagtggaggtggtgcaagaattagttgtgttggctgtagcacagaggacagtttgagttaagagagttgggactgagaatcccgaggaactcttagtgttgaacatttgcgtggaggaggggacaccaaaggagttgccatagacatcgaggaaattaggaggtgtggtgtgcagaaagccaagtgaagaacatgttttaagtaggaggatgctatcaactgttttaaattctgctgagagtttgagaaactgaggacttagaattcatcattagatttggcaatgcgccaatcatttgtaatcttttaaacaatagttttgctgtactgggtagcaaaagagtgatttgaggagtggtcatttggagcatatgctattcaaacagagaagagtccacgggctttggtaacatgaaggtcctataaccatagcaagagaatgaggtgggtggaagtcatattaacgtgaatagaggagtaggttagatctgaggaatgtgggaacagagacagggtctcattatgttgcccagcctggctcagactcgtggcctcaagcgatcctcctgcctcagcctcctgaatacctcgggtttcaggcctctgcatctggcttgaaaacaacattttctcagaagcttgttttagttgttttagaaataacgaaggcatgtgtaaacaactgttctagaagcttagtttggaaagggaacgtttattgatgcatataacacttatatgttgggtgcttatgtgtcaggcactgttagagttgctcgggaaaatttacaaaccaagcaaaccatgccccttcatttcctttgggtgaagtgagggagccatgtggttatctgaaggaagagcttagcaggattagagggaagaaagtgcaaagcctcctagggtgattggctggctcttttggaggaacagtacctataactgaatgaaatgagtgagggtaagagtggcaggaaatgaggctagaaaaggagcttgggccatatcacgtagggcctcgtaggctgtgaatctgacttcatttcttattaatgaaaataaatacgatgatgggtgatgggaaacccatagaggatttggagcagaagaatgatataattaaaattttattttagaaatatttttctggttgtcgtaagaggaaaaatatttagccccagggcattttggcagagagttaggaggctattgtaacagcccaagcaatagacaataattgtttggattaggcgggtagcaatagaggtgatgagaagtcgtagcttctgtaggtatttggaagatatatattgtgaaggatttgctgatgaattccctgtaaggggtgagatgtaaagattcatagaacattaagatattttggtcagatcatctgatcaatggaaaggtcagttatagtggacagattatgagaagaacaggtttgggtgagaaaactttagatttcagtgttggatatcctaagttttagatgattattgatatccaagagatatcaatatttgggatcaatttgggaaatatgatcccaaagttcaaggttgaggttggagatgtaattcagatccgatggtagttaaagcagtgagactgaatgagataaaatagggagtgaatgaaataaagagtaggtgtgatattgacctcaagggcacaccagcatttagaggttgggaagatgaggagagagcagcaaagaggactgggagggccactaatgaaggagggaagtacaggaggtgtttagttctgaagccacctgaagaaaatgtttggaataggaagaagttgtcagttgctttaaatcattcggggaggttgagtgagatgagagtctagaactaacagttaggtttgatggtgtggaggccatcagtaaccttttctttcttttttttttttgagacagagtcttgctcagtcacccaggctggagtgcagtggcgcgatctctgctcactgcaagctccgcctcccaggttcacactattctcctgcctcagcctccggagtagctgggactacgggtgcccgccaccatgcccggctaatttttttttttttttgtatttttagtagagacggggtttcaccatgttagccaggttggtctcgatctcctgacctcgtgatccacccgcctcggcctcccaaagtgctgggattacaggtgtgagccaccgcgccyggcccaagagtaaccttttcaaaagcagctttgctctactgatttgggtaaaagcttagttgcagttggtttgggaggaaatgggagcagaaaatttgagagagtgagtgtagacaactctttcaaggaatttcgctataaatgggagtagagatctgaagactgaataattagcaaactgaaaagtgggaagacgtaattctcttattatttcatttttcttagtgaaataagaggtgaagttctctgagtaataggagggtcaaacaggtgttagaagttcacaaagaaaggaagaggtttgaaatagtcattttgagagtgggaaatgtagaagaattaacagtcattgctgagggtgcgtttgaaatctgtcatgagtttaaaataacttgtgtcatcatcgatgtgtttattttcaactatattcaactgcttgggtgtaggcatcaggtaggtaaaaaaagtgggttttattatgagtagaggttttgccacgtaattaccatggagggagggaagagcaaaggagttgagagtatagatacaaaggaatgattactgtaatgtgggtaagagaggaatggaaggctcagtgggcagtgggagtagggatgttgataggtaaggaaaaggtgataggatcaatgcatttggttctgcaagtgtcaaagtattgttggggaaagcatgctggaaggaaagatagggatgctggtgttctcagggtggaaggcttacagttgtagtctggaagtggtgattttattggcaattataaggtcaacggtatgactatggaattgagtggctaaggtctgttgaagaaaagattgtcggaaatgcaggggtcaaggaactggcctgtggatgttgaastcactggcastgatcaaggaatagtagtggagtgaaagtagttaatgaatcaggcactaagatctccaagggatgaaaggatgcagtttggagatgacaagataactgtagtaatcaggaatagcaggttttgtagctctgtctcataggcctcagaggagatgggcttttgaaggacaagagaaatgatgatgaataaattctaagcaggggaagtgtttgggaaagcagggcaggctttgtgctgttgatggcaaatgatgtaccagacaggatgaagttgagaatytggaagttgatcactgattagaaaggcttacattttattttggccgggggtggcagctcatgcctgtaatcccagcactttgggaggccaaggtgggcggatcccttaggccagaagttggagaccagcctggccaccattgcgaaacactgtctctactagaaatacaaaaaaaaaaaaaattagctggtcgtggtggcacatgcctgtagtcccagctactccgggggctagggaatgagaatagcttgaagccgggaggtggaggttgcagtgagccgagattgcgccactgcattccagcctgggtgacagagtgagactctgtctcaaaaaaaaaaaaaaggaagggcttacattttattttggwgctgactgggaatgaaggcaatgagggatgactgttggagaaggctgtgcttactaaacagtattattaagtagcagcatacatggtgttatactgacttctgattttgcaatagtacagacaggttcagattctcatttccaccttctccttcygcctaggtgaataactgctgggttatagtacagatgactgcagatcatttggaatttactttaaatgtaaacagtaaaaatttgaaagagagggaaagtgattgaggcaatttggggattgaataagaaggtctttttgttggaattcatttaaggaaagaaaatgaaaatttgatccctaatattatttaatgaagtggctaaatgaatatctctgctttgtggtttgaaaattaatattgattttttttccccctagaggaagaaatcctacttagcgacatgaacaaacagttgacttcaatctctgaggaagtgatggatctggctaagcatcttcctcatgctttcagtaaattggaaaacccacggaggttaaatattaccttttttttttttaacttaaatcaattctgtttatttttttatyacattttcctatatgtgaagaatactattcattaaggctgactcatagaaatttgcttgaatacacacacacagactgatgcataaatttgagaaatatctttccagttgttgaatagtgaatccaaaggtttaagccttttctgtctgctttgtaggatgttttatgaaacaaaggaatagaaattgtattcatattatacattttgaaattatatctatattatattttttgtcaaagcaaaataaattatacattaaggaaaatatttaagattcaaagttgtcattttctttctgttaatgagtatctttgatttaataacatttatagtttggtcacttgaaatctatagtgaccaaaagcaatgtcatatttagtagcctcatttctgttactatctgattattacttaagaattctacttaattaatagattattagaacaaaaggcattccaattttagagattcttttatggttaaagcactaggtaacttaaaaaatttggatcaaatgttatacagattaatagaccttggaatacaggggctatgtctttttggaatcagaccttgtcctggccttaattgcaggatgacttccttattaaatctctaaaagcaggaatgctctggaacaatgaacaattagaatgtggtaatgtaattttgggccaaaaaatactttgtagaaatgtgrwtctcttacttggaatagaaagaattctgactcgaaaaagtgcagttaatgtatgcttttctgggtaagatttgtgatagattttgattgagatttaaaaccatgatatataaatttagcttttttgtcaaagtaatttgccaccctagaatttgtgttggtaatttttaatgcaacttggacaatttctgaaagatgtaactttcttttttttgagacgagtctcgctttgttgcccaggctggagkgcagtgacatgatctcaggtcactgcaagctccgcctcccgggttcacaccattatcctgcctcagcctcccgagtagctgggactaccggcgcccgccaccccacctggctaatttttttttttatttttagtagagacggggtttcaccgtgttagccaggatcgtctcgatctccggacctcgtgatctgcccgcctcagcctcccaaagtgctgggattacaggcgttagccaccgcgcccagcctgaaagatgaactttaaaatggggaaggatactagtaaagccatttcttactcatgtatacattttyccctccatgaaattaragcagccaccttttacatgacttttacatgcatttcaratttttgtactarcaattaaaatatctactggatgtaaatcacatgtgcttaatgctttgcttcataatatctgttgaagtcaattaaaatataragacagatctttaaattgaacatgttttatttgggaagcaagaattaaatttgaggcatatacacagactgggtgtccttggtatctctgaagaacaaagrgaaktttggaggttatagaaaaaggaaaatgtgacattgtttttccagaaagttctttggcactagtaaattttggggagttggaagctctgatgggttagtgactgtggtgggtaaaactagtcttagagtcacaacaggttgtttcagtatctattagataaaacaggttttaggttacaataggcagtttcagcagctaggcttgcagaaaattacattcttagagtaatgttatgtgccttgagtgcttttttccccttggcccttgactctgatttagttgggtatgacaagaattatcaatttatataattactttttacatattgaagctgaataggttttcttaaaacttggaaatgggaaatactgggtcttgtgaagttttagtgtgaaaacgataactagtctcttatttcatgctctttgtaacaagtctacagtaatacctaatgtatctagatgacacctcagaaccaggagggaacaaaaaagacctctgagcagtcaaaataatgctataagcatgtattccagcttactttcggcatttctgtggagtgcaggaggccacattttgttcatagatccagtttgacaagcttgggtactgagttaaagtgaaaatggtgtaaataagtaatcatattcacatgacagtaggtggaagtgacagctgacaatctgaaagagtggacaaaactataaaaattagaactaagaactcttaaaatagaacggtttgaagtttgttacagaagggagcagctttatgcttcagtggactctgaaggtattggcagtgtatagtactgcttagtcattgatttaaattcggtatatatctcttctattgctgtcatgtacttgacattctgctgggtgctaaggctgtctgcaggctactaatatgcataataacaatcctgaaaaagaaggaaaagtatactgtgccttactgaagaaggcaggacagcckttggtatttgttagagtaaatattagttatcttacataaagcatgttatattccctgatgtcagggcctgataaatgagcccttacactcttgatagtcaatctgtgccactgttgctgtgtttgtatgttacaccatttcctgtccatgtaacagttaaactgtatcacatatctgttcctactaaactatttgcatataattttaacatttgagtggctgtatataaagctaaaagttctttataagatttatagcatcttagaatgtttaaattagrtaacattagtgtgcttttagtttttgaatttaattttgctcttgattttgtttgtgttaatgtagactttgtctacgtaagcttgagcccaactttggagtggtgttttcagtgatggaagtaactggaaataactcatgaaaccacttagtacttttgatagtttattcccatgaaggatcaaatttttacttgagtcattaatataaaaatttaaaagacatgtcagattttattaagcatggattttaaatatataaatattagaagacctaaacaaaatcgctaatgaaagagtaaaacatgtccctgcctatcatactcccttcactttcactgatttctgcttttatgaagtactttaataagctctacaacaaataaacaagacattgtgcctcattttacactctagcagtggttttccattccaactaactagattgggtttataatatagtcatttaaacttacttagttaaaatgttatacattagcaactgcaattaaggagctaagaaattcagctcgtatttatttatatgcatcttatccatagtttctcacttgttatatttgcctactgatggcaaattgattttttctgttccaaaaatgtagtgttttgagatttttggagatgcaaaacagcatcattttcaaattagatcacaaacaatcttacttgttgcagttgagactagtaattgatcagtgaggtgaaaaaattaggcaaaacggtatcatcaaaattttctttctttttttttttgaaacagagtattgctcttgtcgcccaggctggagtgcaatggcacgatctcagctcagctcactggggcccctacctacgggattcaagggattctcctgcctcagcctcctgagtagctgagattacaggcgcatgccaccaagcccagctaatttttgtatttttagtagagacagggttttgccatgttggccaggctggtctggaacttcagacctcaagtgattcacctgcctcagcctcccaaagtgctgggattacaggcatgaaccaccgtgcccgccccaaattttcttttaacttaaagtgttaatgtttgtttgttcccaatatttttatatatgtcaaggctttttcattatatacaggccagctcttkggagttctgcatagtgtttcttgtttaaaccacacctataatgtaccatctacaatttccaattctttaagacagagtgaaaaattaagacacctgaagcaatctgagtgcggagtcctaggcattatgattttccttgacacttttagggttcttttatcacagtttatcaaacaccttttttttttttaacaaaaaacaaatttacaaaatctttccatgtattcaacttagaatttaatgaaatagggtttttttttttttggtggtcatgtatcatcaactttctttacatttaattaaattaatcaacaaaaaacatatagttgacataaacaaatttgggaccaagcactactgactcttagtaaacatacaagtcaactgttggtgcagaagtgccttgatgctagagagtagcctgcaagctgtaattatatatgggcattagggaatgaagaacagccttaatactattgatcttttaagtgaaggtcascttagaaagcttttacttgttaaaaagcttcacagtttgtccttgtagttaatgcaattgaagttgaattaatctttcttaattttttttttagggtttctatcttactaaaggatatttcagaaaatctatattcactgaggaggatgataattgggtctactaacattgagactgaactgaggcccagcaataatttaaacttattatcctttgaagattcaactactgggggagtacaacagaaacaaattagagaacatgaagttttaattcacgttgaagatgaaacatgggacccaacacttgatcatttagctaaacatgatggagaagatgtacttggaaataaagtggaacgaaaagaagatggatttgaagatggagtagaagacaacaaattgaaagaraatatrgaaagagcttgtttgatgtcgttagatattacagaacatgaactccaaattttggaacagcagtctcaggaagaatatcttagtgatattgcttataaatctactgaggtactaaataaagaggaagcacatttttagttattagtaggttctggcagactttattcccgtaaagagacagatagtaaatattttaggctttgtgggacatacagtctctgttgcagtaactcagttctgttattgtagtgtgaaagcagccacagacaaatgtaaacaaatgtgcctgtctttcaataaaactttatctasaaatacagatagtgggccacatttggcttgcgagctgtagtttgctgttcctgacttagtatgatatgcagcattgtgtagtggaaagattttatagtatcaacagacatttgtaggagtttgctattttataatttcgtatgcttttttcataatagatgtctctgctttttgtggattctcttcatatctactagtgtttactcttctgactttgatttttgggggtgtattttatttctttatacagaatttttttcttttttctttctttttttgagacaaggttttgctgtgtcaccccagctggagtgcagtggtgggatcttggccccctgcggtcttcaactcctgggcttaagcgatcctgtcacctcagcctccctagtagctgggaccacaggcctgcaccactacactcagctaatttttgtattttttgtagagatggggtttcgctctgttgcccagactggtctccaactcctggactcaagtgatccacctgccttggcctcccaaagtgttggaattataggtgtgagtcactgtgcctggcccagaatttctttacttgctcatgtgagagagtttctaataaactcctgatgcttttgcttgacactatagttttactgtcatctcagagtcagattttttccttaatttcttcattaaattgatttcttaatttctcatttgttttgcattagtttacaaaattacttaagatgcctatattctctgaaattttatattttatttcacgataaataagtttaaaaaattagatttgaccatttaattagagttatttccccatcatttttctaatggcaacaataattttagcatttgagcaattctctgtattttggtaactattagtaatcacttttatcagtataaacatgcatttcattttaaaatggttttcaaaatattctcataccaaccattcataaaagatgttccccttctgggaaatatcagtttttgctaacatctgcatttccctttgattttctaggaatttcttattaggtatacactttaagtgatatgtttcatataatattataggattatcaggatttcatgattttttttttttgagatggaatctatctctgtcgcccaagctggagtgccgtggcgcagtcttggctcactacaacctctgcctccccggttcaagtgattctcctacctcagcctcccgagtcactgggattacaggtgcccgccaccacacccggctaatttttgtatttttagtagagaaagtgctgggattacaggtgtgagccactgcacctggccttggatttcgtgatttgactgacatcttttacaccaattattgccatttttttattgggtactaattattagtattgctttctttattygttaaataagaagtaaaagaacttttaaaaaataaaataactttttttcctagtacaaagcttattttcaattttttttattgcttaaattttgcaggttaattaaggctgtacttctttttcctacttcctgtttaaatatttggcattttttgagggttttctttctatggatttttgtgggggatcccatctcgttggacacttggttcctggagattgccaaattattgaaaagtttcctcatacccaaacattggcaatagactgaataaataacatctctgacattatttttcaattatatagagaatgctttttgtaaaatactgatttatttaaagatattacartcatagtagttttttgcaatctttttwaaatcagtggatgtcaaggaacaactattgttctttgtacrgcatttttcaacattgtgaagagttcttatactcaaaaagtttgggagacacagtktgayattgtttaacctgagttgaacttgtcattttgtattcttgtttagagcagggattttattttgtctctttatctaactttgtattcctaactatttctttctttctctttggttctttgtttctttgttcattcttctctctctcccttttttatctatcatataaatatgtaaatatatattatatatccattagggaagaggaagytgtctaaagatatctagtatataggagctttgttctgcagaaaagaggatatgaagtcaattatattggaaattaatgcttaatacttttttttaaagcatttatctcccaatgataatgaaaacgatacgtcctatgtaattgagagtgatgaagatttagaaatggagatgcttaaggtatgtttacaattataaaaayattacttcaagttctttccaaaggacatttaattaagtaaaatattaactaattctaaacyaggttccaccacaatgaaattgctactaattatgtaacattagatttcacattttccaattcatgtttcttttatgtagtctatgaataatgggttagaggtaatatactaattttaattgtgctttctttgttccttcttttttttttttttattttgagacagggtctcactctgtcacccaggctggggtgtagtggtgccatcttggctcactgcaaccttcacctccagggctsaagtgattctcctgcatgagcctcctgagtagctgggattacaggcgtgtgccaccatacccggcttatttttgtattttttgtagagatggggtttcaccatgttgcccaggatggtcttaaactcctgggctcaagtgatctactggcctcagcctcccagcgtgctggggattgcaggtgtgagccgccgcatccagccctgtgttccttcttgtgttactttcttgtaattttttcctggaatatgggtagtgatttggctctccagtattgaaattgagtttcctttcttccaattcatgtgtatccatttttatttggaagttttgtttttatacattcaataatcatctttactttctttggtattatttactatggatattttatattatataattttcaaatggattaaatggttcagttttactcttattattgagattgaaaatactagtttataatttatatattttctattcctttacctctaatttctttgtcaggtgttactaaccaaagatgtataataagaaaagccaatgtagctaaattaagtaaaaaatgaagaaaaacacagaagttccccattatgcatttttttattcctaatctttaggttgatgagatttttttatttttatgaaatgagattaatttattgacttttttagttttgaggccaagtaatgagtagtgagtaagaatgtatattctagggccaggcatggtggctcactcatgtaatctcagcactttgggaggccgaggcaggaggatcacttcattccaggagtttgagaccaacctgggcaacatggcaaaaccctctctctccagaaaaatacaagaattggctgggtgtggtggcatgtgcctttagtcccagctacttgggaggctgaggtgggaggatcacctggggagcctggggaggttgaggctgcagttagccatgaccatgccactgcactctagcctgggtgacagagtgagaccctgtctcaattaaaaaattaaaaaaaaaaaagtagattgtgaattcagatgtaggtttgtatcccagcttttccagttagtatctgtgtgactttggggaagtttcttagcatctttgatactcggttaacagttgtaattattatttaaggtattgcttgagaagagcttagtatagagcctgacatttagtaagtgtttaatacatattagctaacagtaaaactagaacataaatactgaattgtattttgttattaattatccatttctctgagaagtactgttccaatagtacatttataggaaacttgtggacgtctacaaacgtatacattaaatctcttagaaggcaacctggatgcccatattagagaactctattttaaacatgcattctaagtatgtttgtggacttgaataaaataaaacaaacagaaacacttctttcttctgccttcaggcttgaaatgaacatacttttttttaaaaaaaaaccttcaaaatgaaaatattaaataaaagatttaataaaaagagaaagtaaaaactgtagtttaataaagtcttcctgtctcttcatagttaaaaaatgttatagatgaaacaattttgaaatattcttgaaatagataatctttatttaggggagaatgtcagatactgtcaagccaaaataaaaacaaataactttatttcatgtttgtaaaattccttttctaaaatgatttgaatcttttgttgttttgacaattccaaaacacatttattgtttgctcatagtttcagccttattcagaaagaatgcgactgacacatgatatagagaaacttgttccaaaaataacattaaaatccacgtttactacttgagaatcgaaaatattgaggtgcaataaagaataaaatgttttaaattatccaaatttaaaatttatgatagctttccccaggggcagtttattatatgctattaatgagccttgtttatgctggaaatgttccatctttggccttgcgccttagaaaccattcatgagcacatatttaaaccggagcacacatgttcttttgtagtatggcttgcacatctgccagctttcgacaaaattgtaggccctgttaataatagtccttttgtgtttggtgaaaaagatacgacactgtcagtggttttgcttttaagatttcttttaaactttcagtctttagaaaacctcaatagtggcacggtagaaccaactcattctaaatgcttaaaaatggaaagaaatctgggtcttcctactaaagaagaagaagaagatgatgaaaatgaagctaatgaaggggaagaagatgatgataagggtaagcactgaagtatgtttgaaatgactcacctgtgatacctaccactgactttaacttaggatccagttttggatggtttggaggtcagggactttgtggcatatagttaattattggatccttataagcttttgtctccttagtgcttttgtctccataaagcacaatcttactacttagaaaaatagagtaatagcattatgatgataaaaatatctttccctttgtttttttgtatttctccaaatcattatagctctcatttagaattattaaagctgagaactctaacaatgaacttttattgtttagtggttaattatcttgattctttgttttgccctttcttggccactcaggaatctttcaagctcactgtggacagggaaagtgacttgggtagagctaacataacttcattgtgctgtgcagttagaattttgaccaaagatgtgggtaactaacttttcctaactaaatgacatttaggtaactaaactaaacgagattttcgtaactaaattttggtgtaactacatttagctttaggtaactaaaacgaagattttattttatctgtggatttttttagtgcgggactaatgtaatttctgattaccattaattgaaggttggttatattataacatttggattggtatattgcttgccatggtttgttctaaatgttagcctttagaagtattcctgattctaaaacatcagttttttttaatagtcctggcaaagtgtgaatcacaacaaaattctaatacttaaaagtaatccaagtgtcacagatggtacccagaagaccagtttgtattggaattaaaaaatagaaaacattaacccatggtagctgtcactgtattctttcaaagaagccaatgaaataaactgttttctccctctatgkggtgtttttctacttgaacataaatgcacattttattttatttcmagactttttgtggccagcacccaatgaagagcaagttacttgcctcaagatgtactttggccattccagttttaaaccgtgagtataatctcatttaatcaaatcacatatttagtattctctttaaaacaagggaaaaggcaaataacctgtctgcttaacagcaacagcacaacttcactatagttatacatgccacackgtattttctgtgtgactacaaaattatttcaaagtgatatttatataaaattcatttctgcaaattgtttttataagtgaggaaaaatggttttcctttaactgagcagttctgagtagaaactagtttaaagatacttataaataaatgttaatttaatactgacttgtttttcattaaacgagtgtctatgtgcctgttttgtgtatattacccagaacatgcagatgtactagaagttcttaatacaacaatttgaggaatagtgataatcttatctattttaatgtactcaaaatttgtttacatctaacaggcacatttttgtgaggattaaatgagatgaataagaatgagatgaacaagtaaatgtgaataaaactaataagcctgtgaaaatctagactggatttttcctattctgagaatttaaaatataatccactgaagtatttctttccttttttcttttgatcttaaacattttttatttatgtcttacatacagaaaagtgcacatgttgtagagatcaatgaattgtcataaactgggcaccctgtggccagcacttagttaagaataggtcagtaacagcatgccagaagaccacctctccaattgatttttcccatgatattttattaagaaaattttctaagatgtagtaaagttgaaagaacttttttctgtgcatgtctgtattcccaccacctaaattcaactatcattactatacttgctttatcacatatccatccattcatatgtctctatccatccattcattcattccagttttaaaatgcatctcagggtcaatcgaggacaccattacacttccacctaagtatttcagcatgtaaattattaacgagttaaatatttacttaacagttttttctttggtgtaaaatttgcacgtaaggaaatataaaactttaagtgtacatttgcaaattttaaatatacatgtgcatacccatgtaacccaaattcttatcaagagatattattatcatcaccacacagagttcccttatttcccttttcagtcagtccttgtccctgagcatttctcttattattttaaagtattgattcttttggatatctagtatgaagcttagaatctgttttttactttagatgtatgtagtgaaatttaatatatataccaaatggtagttgttagttagcttgaatgggacattggtcaaatggcattgtttgttttaaagttccaggtttgtgcatttatgtatgaagtttgaaaataaattctatgagaggaaatgaaaaattgaatggattttaatttgtaccttgggtttcttattaataaaacaaaatagctttttgcttttcaccttcaagagttcagtggaaagtgattcattcagtattagaagaaagaagagataatgttgctgtcatggcaactggtaagttgtacttaagcaaaaccwaatcctttaaaaaaataaaacataaagagtttgaaatgcttaatctttcattaaactctcaaaatacaaatgcarctacaaatgatgtaaamtatagaagagagtgaacaaagaacagatgctcagatttatgtatcaattagcttttaggaagatagcatactagtattgaccattcatctgtataagtacattgtaaaaagaaatgaaagcatcaaaggtttatttttatttctatatttttttcattttatttttatatttttttcatttcaaggatatggaaagagtttgtgcttccagtatccacctgtttatgtaggcaagattggccttgttatctctccccttatttctctgatggaagaccaagtgctacagcttaagtaagtcatgttatcattgccacamtatcaccctctttttttcttctgtgggtgaaacatctgatccatcatgcatgttaaaatctagttcacaataacacatttctgcaggtattgctttatctttattggtaataaatgaccctttagtggaagagcttaccttctttcttgtgttctctgtaattcaaagctaccaggtggccctgataaaatttttttaaaaaacattattactttatgctggtttacattgaatatctcaaaattcttttctctttttgttacccttgctttttagcttgataagaagtgtatacatggaagtatattttttatctatgaaacacttttcagcttcttcaacctgagcttgcaatctgttttaaattgatacataatatctttacatattcatggggtactgtagtattttgatacactcatatcaaatacacttgatcaaatcagggcatttgttcatcaacttgaacatttatcatttctttgtgctgggaacatttctaatcttttctttgagttattttgaaatacacagtgttgttgttaactatagttaccctactgttggttaatgagtacaaacatacagttagaaggaataggttctagcaacctattcctttaccccctgtcatcccctgctgccctgagcttgcagtctctttcaaagacccaccttaaaaacttgcattctgataaggcccttgaaggaatttgcttatcaagttagtaagtgacaaaaaagaaaattgcaaagaacaggaatataaattattatatttctttattctttctcacttaagagtgaaattgatatgtgtaatgtgtacatggtgccagaatatttgtttttcttcttatagaatgtccaacatcccagcttgcttccttggatcagcacagtcagaaaatgttctaacagatattaaattgtgagtaatttttttccctcaacttttattttggatttatgggggtgcatatgcaagtttgttaygtgggtgaattacatgttgctgaggaagttgtgagtaatttatgtcatttctaatcatgtggtcagatgtctgtggtatatgagagaattttgtatacaaacaaattttactaaatgcatgaaaaaaaaagtccatgattttaaaatgcactttcttttgtacctttgcaggactgttactttttaaatccttcaaacttgaagaaatctgttattctcggttcttgggctataagattagcattgtactcatagaattataaaaattttggttttggaagagaagttggagaatataaagatttgtctcattttatagatgagaaaactgaggctcagagacaagtaatttgcccaaaatcacacaatgactggctgagcagggactggattctaggtctcttgcccaaccaattctatcatgatgtaattcctaaggagaatgtcatctcagatacacatacacacacccattttgtgtgtgtgtgtgtgtgtgtatatgtacacacacacacaaacatatgtacacttatatatacatacacacacatatattaatatatatgcatatatatgcatgttctaattcagaacattttcatcactcccaaaagaacacccctgcccattaagcagttgctttctttacgtatatattagtatatacatacacacgagatacacatatatttactgagttttgataaatgcatacaaagatgtaaaccaaacctctaacaagatacagaatatcactgacactctagaaagtttcttcatgtccctccccagtctgtccttccatcctccatcctaggcaagccactgctccgattttctctaccatagtttggtagaatgccatataaatgcagtcacacaatattaactcttttgtgtaagacttctttcatttgctgtaatgtttctgagattctttcatgctgttgcatgtatcagtagttttttgttttgttttgttttgtttttgttttttcagagtcagggtctccttctgtcayccaggctagagtacagtggcgcaatcatagcttactgcagcctctaactactgggctcaagctatcctcctgcctctcaagtaggctaggctgcaggtatgttccaccatgcctggctaattattaaattttttgtagagacaggatcttgcttggttgcccaggctggtcttgaactcctggcgtcaggattgtttccagttttggattattacaaataaagctgagacacatataagtctttgtatggacatatggtttcattttattgatacatgtcaaggagtgggatgactggatcgtgtggtggatatatgtttaactttcttttttctgagataaaattagaaggcgatcctcctgccttggctttccaaagtgccgggattacaggcgtgaaccaccgcacctgatgcagttgttgttgttgttgttgttttaatatctgrttattattttattgtatttcattgaatatagcacagtttgtttttacattttcttattgatagacacctaggctatttttctggttttggactgttactaataaagctgctatacacatccttataaaaatcttttttgtgaacatgttttctttttttctaagcattttaaatcacctttattgaggtgtaattgacttacaataaattttatatgctgagaatgtataatttgataagttttgacacaggtatgcactcatgaaaccatcatcacaatccagataatgaacatattcatcacccacaaagtttacctttttgttttaaccccagtcaccgggtaactgctgagctccttcctgttactgtagactagtttgcattttctaaacttatatacatggagtcattcatattttatgtgctcttttttgtctgatttaaataatgcagtataattattttgagattcattcatgttattacagtgattaatagttcattcctcttattgttaagtggattacattttatggatatccaacaagttgtttatccattcacctgatagacatttggatcgtttccagttttgggttattacaaataaaactgctatgaacattcgtatgtaagtctttgtatggacatatgttttcattttattatatatgacggagcggaatgactggaacatgtgatgcatatatgtttaactttcttttttctaattgagataaaattcacagaacataacttttaccattttaatcattactaaagtccagtgggttttggtatagtaataatatataaccatcataattaattccagaacattttcctaactcccaaaagaaattccatacccattaaggagtcattccctattttcccttttcttttctttctttttttttttttttgagtcagggtctccctctgtctcccgggctggagtgcacttgcatgatcttggttcactgcatccttgatttcctgggctcaattgatcctcccacctcagtctcctgagtagctgggactgtaggcatatgttaccatacctggctaatttgttttattttgagtggagatgagattttgctatgttgcccaggttgctctcaaactcctgggctcaagtaattgtcccacctcagccttccaaaatgctgggattacaggcgtsagccactctgcccggcctattatctctgttctgcccacttccaaccactaatctactttctgtctctatgatttgcctattctggatgtttctataaattaacttatacattatatggccttttgtgtctggcatcttccacttagcatagtgatatcagtacttcattcggtctttttttatgactgaataatattccatagtatgggcatacacattttaaaaattcattcatcagtgatggacatttgggttgtttcctttttggctgttatgaataatgatgctgtgaacatttgtgtaccaatttttttatgaacatacattttcaacgcttttgcatatatgcctaagagtggaattgctgggctatatgctaattttttaagaaactatgaagcttttgagagtgattgtatcatgggatattcccaccagcagtgtatgagaggtccagttcctccccatccttgctatcacttagtctggctgatctttaacttaagccattctaatagtatctcattgkatttttagtttgcttttccctaatgactaattatattgagcatttttcatacacttattggccatctgtatatcttctttgagggagtatctgytcaaatcttttgcctattttttcttagtgagttttgatagtcatttctatattctgaatataaattatttatttgatatatgctttgcaaacattttctcctagtttatggcttttcatactttccacacagttcttttgaagagcagcagtttttcattttgataaagtccagtttgtcgattcgttcttttagggattttgcttttagtgttttgacccaaggtcacaaagatttgcttttatgttttctcctaaaagttttatagttttaagttttacatttagatttacgattcatttttagtaaatgttgtctattgtatgaggtattgattacagtttatgtatttttcacatattgttccagctccattttttaaaaagactatgcttttacactgaattgactttgtacctttgtcaaaaataaattgactacatatatgtgggtctattgctgcactctctattctgtgttctgtggatctatttgtctgtcttgattggtgtcttgattactgtagctttataataaacctggaaatcaggtagcgcaaggcctcttgctttgctcttttctttcaaagttgttctggctattctatgtcctttgtatttctgtgagcatgtcagcatcaccttttcaacccatatgcctgctgggattttgaatgagtttaccttgaatctagatatcgaaacaattagctgtcttgatagttattgtcaccgttttataccgaagaaactaggcatactaaagtaacttggctaacatcacttaccttgtaagaagtagaactgggctgtttgacatcagagcttattctttataccatttcctatgttaattagaatacaatattaatttcataaaggtaaaggcatatctgttttgttcctatttgattccttgtgaaagcacaatgcctagcgcacaatagacacttaaacttayctgttgaatggacaggtgaatgcttttaaagtctttccatatagaaaattaagtttcattacatttgacttgatctaggttttcatttcatagaatggagagcagactctgtaaatattttgccccagacctagcyttattacaaacattgtcttaattaggattctgtctacccagaatagaaattaactcaagctagcatgagtgtatattgaaatttatattaaggataaaggaatgtctcatagatcccactcaaaagaaattagccagcccttaggaagagactggaattgggtttggaaaatacaataggtctttctttttatctgtagtctttagtgagtcttcctcatttttctctctgaagagataagcattctctgcatatatatagcattcttttagattttcgtgacataaagtattatttaaactttcataaggtatcttgattttaagttgtaattccttgagatgattgttttctttattgttaatatgtttcccttcctgtttttttttttttcttttttcttttgtttgtttttacagaggtaaataccggattgtatacgtaactccagaatactgttcaggtaacatgggcctgctccagcaacttgaggctgatattggtaagtgataaagaaagatctctgtaaatacttactgagttaatatttaaagttaaacctatggatggacactggatttcacttctgttaaagtttatttcaaacattacttcctccaggaaatctctgactctctaacttgctgtttcacctatcttatcccatgatactctataattccttttgctatagaaattaggctctgttatcataattacctgtttatatatctgttttcttctgctaggctataaacttttcaagggaaaaatatcactttttaaaatttatgtttccccagtgcagtgcttggcatataggcacttaaacatattgttgaatgaatgttgaatcctaggttctgtgaaattttaatttacttgtttttcatgttctgtatctaaattaagtcagtgtagtggttttgtaccctctttgttcataagaatcacttttcaaactttaaaaaaaatgtaggtaaccaacacccaactctgaaaattctgatttaacaggcctgggttggcacctggcattggtggtttctcacaggtgattctgatatatagcccgggttggaaaccacagtacctttgattagttgccactagtgagtatgatttattacaaaaaccaaaaacttagataagtcacagtttatttcctagaacgtgtaaatatagaattagtcaaaagctgatagcactttttttgtacttaaaaatattttaagcctcagtatagtgagacctcatctctacaaataattttttaaaaaattggccgagcctggtggtgcatgcccatagtccaagctacttgggaggctgaggtaggaggattgtttgagcctgggagatgaaggctgcggtgagccaagatcatgctactgcactccatcctgggcaacagagcgagaccatgcctcaaaaaaaatttttttttcttcttggtggttaggcttaactatccaagaattgcaatcatggcttctattgcaaatgcccctatttcccaccttcagttggcctaaccaaatttaatttttcaatatcatatgatctttttgtataattatgtattmaaataattccagataggttaggttttcgaattgcaacgtctcatttaatggttactttcatataactgtaggaaagcatttgataatttttccaacaatgtaatgaaaacaaacttgtatcttttttattatgtgttaaaaccaacaaaagaatgagggcagcaattaacatttcattaaatatattagcaatgagtacatttatgagctcttaaactcccttattgacatactgtattttttgcctttaatggacaatgaatttgatatgtttcctaataggttgtatgaagttattgtgaatatttcactttggattaagaataactaccctatatataaatttcatggttgtattgcaaaagctggggtctatgtccatagtggtttgggtacgtttttactatttgctttgtttctgtgatagtgttaaatgaataataagcttaagtatttaagcaaatacttaatacttctgacaagtagttagaactctctatttttgtttttttgtaatggatgagttatggacactgcaattattagagcagcgtactttgcttatgatggatgaaaatgttctctggttgactcagtgttgaataaaaagggatacatgaaataaaaattatttttgaaatattttcctttgccttttgttgcgggaaattgtacaatgcttgcaaaaatgaatatacgcaggatattatttgtacagcagtctgacatttagctaatcagattcctcatttttaggtaaatgttaaattacttaagtagtctggatttttaacagaaacagcaaacatagttttatagggaggctccttaccaaccagacttttaacttaagtgaatgttggcaaaagcttgtctaaactgatttccagggataaggtttagctccattaaaagctagtttgtcaaacctgtaactaaagctttttaaaaaatgaaagttttaaaagagaccatcattctgttttaacctatttaatttaaaatctgggctgaagtaggagtattgcttgaacccaggagttcgagaccagcctgggcaacacagtgagaccccatctctgaaaaaaaaaaatgagctgagcatggtacctgttacagtgctagttatgaaagaaagaaagagagagagagagaaggaaggaagggagaaaggaaggaaggggctgggagtggtggctcacasctgtaatcccagcactytgggaggccgaggcgggtggatcatgaggtcaggagatcgagaccatcctggcgaacatggtgaaaccctgtctctactaaaaatacaaaaagaaaaaattagccgggcatggtggtgggtgcctgtagtcccagctactggggagggtaaggcaggagaatggcatgaacccgggaggcagagcttgcagtgagccgagattgcgccactgcactttagcctaagaaaaggaaggaaggaaggaaggaaggaaggaaggaaawatcagtcactcactcaggtttagtttcaaaagccaaaacagtgataatattgaattttttccagccactcagtagtacccagagaattttgatacaaataactgactttgaccccatgtttagtaggttttttttttgtttgtttgtttgttttttttttttgtctttcttctccacactctcttaggackgttgtagcttgtaatgttagtgaattgtaattgtttatttgcatgtctgtctcctcttttagaattgtgaactcctcaggtcatggattgtattttattagtctttttattcctagaaaagtgtttggataataatagatatttattaaccataataggagtagtagcatttttgtgtgtgtgtgccaggccctattttagcattttatgtgaatgatataatttaatttttagagcatctagaaaatgttaggtaccattattatccacattttacttgtgagaggactgagacttggaaagcttaagtaacttgcttaaggtaatacacatggcagatggtggagccaggttctgcatctgggcagtctgactttagagctttttaatcatcctcctcctagtgtccgaacattattaatgctcagagaagtatcaaagaatgatgatactcattgagggaaaaaattattcttaagtatcaatttgttaattgaggacaaaagcactactgttactactgtgaaaaatctgaaaacattgtcacggatgattttacaataacatccttttctgacatgcattacaacacactattgattccgtttcaatgtttgtgtctggtatgggggcggagtrgagaggctactacaggaagaaagaacaaataacatttcttcttactactttgtgcatcatgtgatttagctcctcccataccattttacattagaaaatgtggctgtcctcctgtgctctagtactggcatttcagaggactctttgcaatatgatatgtgatcaatcatggatggcgatgcagttaatttcagtagaaatttgctgactctttttatctcttttaatagctaatgcatgagataaaattgaaggtattaccaaggagaaatgcaggtggatagttttgraggcaaagtcacagtaagcaattcatctctccaaggaatagtgatgaaagctgagatccaataaatgtcttgtttggattaatacataaatatttccttttaaaattcttaaggcttttattcatatatctcccctctccctatttccaataatgatttttggtgttaatatgatgrtatttatgcttctgtttttataggaaccaaatactttgatttggttatttattctcctttggagatgtagatgagtttattttttcctttcgagctttatcttttcctttatgtgtttttcttttttacaggtatcacgctcattgctgtggatgaggctcactgtatttctgagtgggggcatgattttagggattcattcaggaagttgggctccctaaagacagcactgccaatggtaagctttgccaagtctgatgtccygaaattrcattcttaataaggagagcattcaggattggggagtggtaaagaagctgaagacttcactataaaagagcaaatggataatgtaaaaagagaactatttttttaaaaatgctaaagttggtatataatctattgaggaatataatagaacaaggcttgacaaaccttttctgaaaggaccagataataaatatttcaagctttataggccacatgtagtctgtatcacatattcctctctctgttttttcttttagtaaccctttaaaaatataaagagttacatttttcactggtgggccataacaaaacaggctgtgggccatatttgtccgaatgtcttctcagtgatctttcatccrtatgtccttttactctaggatgctgtgaaatcctggttaccccttcttgtatcacattgaaaacctaaagtttgaactattctatagaaattttattaaagcttttggtattagaatttccctttcttccctaattataaaaaatagcaaattttggccgggcatggtggctcacgcctgtagtcccagcactttgggaggccgaggtgggtggatcacctgaggtcaggagttcgagaccagcctggtcaacatggtgaaaccctgtytytactaaaaatacaacaattagctgggcgtggtggcaggtgcctgtaatsccagctacttgggaggctgaggcaggggaattgcttgaactcgggaggtggaggttgcagtgagccgagattgtgccattccactccagcctgggcaacaagagcgaaactytgtytcaaaaaaaaaaaaaaaaaaaaaaaaagtgaatttttacatgaatattctacatgattggcatatttacatgaatggtttaaaaacccacaataatagcactgttttattttttattttgaaaattgtagattcacaagaagttgtaaaaaaaaaaatacctatatagaggtcctatgtacctttcatccagtttcctgaacagtaacatcttgtgtgactatagtacaatatcaaaactaggaatatgacatttgtacagtatctagagtttattcctatttctctagttttgtaagtactcttttgtatggcatgtgtattgttctatacagtttaatctcatgtacatttgtgtaactaccactgcagtcaggatgccaaatgttcccttaccacaaagctccctggagctgttcttcccacccctggccctagccactggcaaccacaaatctggtctctatctctaaaatattatttcaagaatgttatatacatggaatcatgcaatttgtcaccttttggaattagtttttttcactcaacataactaccttgagatctatccaagttgtttgtggtcatgtgttgcctaacaacagggatatgttctgagaaatgtgttcttaggacattttgtggttgtctgaacatggacttacacaaacctacatgataaagcttactgcacacctaggctrtatgatagagcctattgctcctaggctgtaaacctgtacagatgttactgtaatgaatattgcaggcaattgtaatacaatggtaagtatttgtgtatctaaacttatctaatgtagaaaagrcacagtaaaaatacagtataaaagataaaagatggtatacctgtatagggtgcttcctgtgaatggagcttgtaggactggaagttgctctgagtgagtgagggagtggcgagtgaatgtaaaggcctaggacattactgtacactactgtagactttatacatattgtacacttaggcgacactaaatttttaaaattttctttaaaaattttctttcttcaataataaattaatctcagtttactgtaactttaattcataaacctaaaacattttttgactttggactcttgtaataattcttagattaaaacatgaacacattgtacagctgtacaaaaattttttcttccttgattaatgcattccataaggctttattttaaaattttattatttttatttttaaaacttttttgttaaaaactaaaatacacacatatcagactagacctacacagggtcaggatcatcaatgttgctgtcttccacctccacgtcttatcccactggaagttctttaggggcagtaacactcatggagctgtcatctgtgataacaatgccttctcctagatacctcctgaaggacctgcctgaggctgtttttcagttaactttaaaaaatgaatacgtaggaggagtatactctaaaataatggaaaagggtataggtaaatacgtaaaccagtaacatacttgtttattattcatcaagttatatactgtatataattgtatgtgctatactttttaatgcctggtagtgcagtaggtttattgacagcagcatcaccacaaacgtgagcagtgccttgtgctaagacattatgctggctatgacatcacttggtgataggaatttttcagctccattataatcttatgggaccactgttccacatgtgctctgtcattgacagaaatgccgttaagyaccacatgactatttttttyrgtggtctgttcctttttattattacagagtattccacagtatggttgtaccacagtttaactgatcacctgttgaagaacttttgggttgttttccagtttttgactattatgaataaagatgctatgaacatttgttcatatctcaaaggttctttatttttttttatttatttttctttttttgagacagtctggttctgtcaccctggctggaatgcagtggcgcgatctcggctcgctgcaagctccgcctcctgggttcacgccattctcctgcctcagcctcccgagtagctgagactacaggcgcccgccactgtgcccggctaattttttgtatttttagtagaggcagcgtttcaccgtgttagccaggatggtctcgatctcctgacctcgtgatccacctgcctcggcctcccaaagtgctgggattacaggcgtgagccactgcgcccggccttcagagattctttaatgggtgaatggttaaacaacctgaaaatataaaagttttcatttctctgggataaatgtccaggagtgtatttttagtttttaaggaattgtcacaaacctgttttccaaagtggctgtagcattctacattcctgtcagcagtgtgtgaatgatctagttatccttgccaccgtttgttgttgcaactgttttttattttagccatttcgataggtgtcgagtggtatctcacttttaatttgcatttctctcatggctaatgatggtgaacgtcttttcatatactaatttgcctctggtgaaatttcttacataattggagtgcttgtttttttctgttgagttttaagagtttaaaaaatacattgtagatatgagtccttggtcagatacgtggtttcaaatatttctttcactttgtagcttgccttttcattctttttaccgtgtctttcacagagtaaatatttaacattttagtgaaatccagtttatcattttttcttttatggattgtgctcttcacctagccctagatcctgaagattttctcctgtggttctttcctaaaattgttacagttttatgttttaagtctgtgatccattttgagttaaattttgtataaggtgtgaggtttaagtcaaggttcattgttttcccaatagattaaattgcagcagatcctttgttgaataggctgtccttcccctgttaaattgcgtttgcccctttgttgaaagtcatgtgggtgtatttgtgtgggtctatttctgggttctctagcctgttatattaattttgaacgaataaagttggcttatgtttaagttttcttggtagtagcgaggcaatggtgccttctgagcccaggatttcacaattttgtgagtaaactgtgttagaaattgtttgttattcttttggtaggttgtctagttcaatttcattgctcattaatcttgcttatagatagcaaattgagaggcatctcaaaaatagtatcttttgttagcttatctcacagagtttggttggagcagatattaaaacagaacaaaccaaaaataaattaaatatactagttagcaagtttatattgagggaaaatcaaaccatgtgaattgagctccaatgatgtggctggccttgggtcagattttagtatcatggttcaacaaggtagctattaaaatcttcatactttttcttgaaataattctttagtagtcacataggacagcacacactcatggatttcttctttccttactgtctctttattctcagcctcctgttccttctcatctccctgaccttttaatgttggccttccagaaactttagtctttggacctacctttgcactcattttcttggtcatttcacccaacatacagttttatgttattttatttttttatttttgagatggagtttcactcttgttgcccaggctggagtgcaatggcgtgaactcacctcactgcaacctctgcctcccgggttcaagcgattcttctgctcagcctccccagtagttaggattataggtacgtgccaccatgcctagctaattttgtatttttagtagagatggggtttcaccatattggccaggctggtctcgaactcctgacctcaggtgatccacctgccttggcttgccaaagtgctgagattacagatgtgagccaccacgtccagcctacagttttaaatatcaagtctatactgaggactcccaaatttttatctccatcatagactgatatcagcagtatatgagtgattcagttgtttttgcctctttgccagcatttggtgttgtcactattagttcattttagccatttaatagaatatatgtacatatatatgtgtgtatacacaggcacacatctatataactactcaacatgcctctggtgagatgaccaacaggtatctcaaacttaacctcttcctaattgacttctgcatagcactccagatctgctctttcctcactctcctccatcttgtttaacagcagctccattggccaaaattttggaattttcctcaatcttttctctttttcttacactccactgtttatttaaacagtaaggaaatctcgtgaggtcttcagaatatatgcagaattaaatcacttctctcttgatccctgccattccccaggtacgggccaccatctccttagggcctcctgctttcactcttcccatccctcattctgtttcaacacagcgtccagagtgatactttaaaaatgaagtctgatagatcatgtcttcggctcagaaccatctagtagcatgccatttcattctaaataaaggcaaaagtccttatgatgagttaccgatcctcatgtaatctggccttccattttccctctgatctcattctctactggtctcctcattcaccggatgcagccacaccaccctccttgtttttcttcggacattccaggcatgcttcagtgcctgggctttgcgcctgctgcttcctctccctgaatacgtttcccccacattgtctataggatgttctcccatacttctctcagatctcttggatttaggcctcctgggccaccatatttgaaatatcagattagttccccctcccccatyattcagcattcctcgtaaatctttgctgttttaaaaatagcactatcactgtctaacttactgtgttatattttgttaattttctgtgagttcttcttcactagaatattctttgtagggaggagtttttgattgtttggtttataaaatctggaacaatacctggcttataggaggtgctcaatttataatggggtgaatgaatgaatgaatgatgatgagaaagctgagaatcagtaaagtgactttccaaaacaggtagtgggcagtatagagttgggccataaatagctgcaccatacaacatcctgctagtttctaaagcaaatgatttgaaagaggcataaaacataatttctgccctcaggtagctcatagttcagtaaaggagtttagattcatacctataacagtagaagtaatagcaccaaatgaaatatggtattatgaagtggtacaaataatataaaaagatgaacagtgttagtagtacatgtttagaagggatttctgtggtgaaagtcactaggcacagtgcacctggaggaccgatttccattccatttagaatggtttaaagtaagcttttggaaactaggaagattactttctgtaatcctttcctaggcctttgattctagaaggattgtgttaaaggagttttaaatattttatacagttcttaaacattgttaagcttgaattaaatcttttattatgtctggccatggacgtcattggatcattttcatttcttgggaggattaataaagcacattccttctgttgggcctccagtgcggggagggtgttggccgagcagtggctgaraaaacgtttttcccctggtgttttcaagaaccctctttattagctaagtggtgagacatgccacctggtggttatagtagtatcatttttctcactgttcttggtgcttttcttctcsttctgattccagttatactaggacaactgctataaacctggaatgtttcacactatattatttcagtaatttcaaaaacagcagaaatcactaagctgtttggcacaaagattcctatttggaaggaatcagacaaagtgagtgttgagaaagaacagccaggcagaaagctttgcatcagtcttaaagttctttacatttcaagtaagaggaattgtgaaatccataagacatgtggggtttttctattactttctccccagtatctattacaaagatcagcacatagtaggtactcagtaactatttagaatgagtgcatgaatgaatgaagtatgtgtgatgttatggagtacaaagttagaattagcaacatgacctgaatttagaagcaggtgggatacttatacttttctcagtctgtgggcaccacaccattgaagtatatgtctaagattaatttatatttggttgtttgatttagcaaaacttgctgcctgttaaaaaagaaattaagacctgtcaacttaaagaatacattttgtgagttaagaactaaatgacagtataatttattacccaaagcagtttgcttctgaaaattaaagagttcaagctattaataattatgctgtgactgcaggcataaactgggaatgtcctggcaaatgaggatgtattgtcacctttctcagcctgcctgtgtgttgtttttaagcttcactctagtttatatattttaaatgtcataaaataccacatacttataagagaaaaggttctattcattgctgaagtggaagyttatcattaatttttatttatttatttttttttccagttttggaattcttattactttgaacccaagaaccactgataactagcacaatccagtgaaacagaggaagcagcagcttaatcaaaggaaaaatacatttaagattataagtctggttataagcttaaaaagtgacccagaaagggatatcattgctaaaaaaaaaaatccccttgtgacctgggtrcattttgcaaagccacaggtttgcartgttacacaagggccaaaggaggccatgagttgtctttggttgtggggccggagggtaaytgttcatgaaaatagtgagtgtctgaagattaagaaaatcatgctgcagcagaggagaagggagaggaaggcaggaagggaaaggagatgcctgagggtcaaaagctgagcccaagcctaagcccaagctcaagttcaagccccagcatggcacaattttgtgaattaactcaggctgagttgcctccagtctttggaatgtcatcttatactggtactgctgaggcagagggcagtaattggttctttgggataggagaaggggcagttgctgaaatacaaaattaatagtcagcatcccaagttcctyaattgcagccaaaatacatgtgttcaggcctttcggcagtaccgcccccagaactaccagctgtagtgtggtctattcccagacagcaacatgcaagaataagtttacaatacactcagcccttgtggcttaagatcaggggctcagaggctgtgacaactcatgatgctgaaaatgtatccaatgaaaacgaagtactagctygtttagtagtaacgaagtactattaatttttaatatagtctgatactttattttctaattgtagaagcaacattcttagctatatctttctagaatgttgaggcaaaagagtaaatttatagtgattttcactgttaccagattgctggaatagggaatttctggtagcaagatgggaatttttaagttggaagggtctaacacatcatatagccgtctccatctcattttttttgctgaaaaaactgagcccttgcaaatgtcagttgcaaatctgggagtagtactcatgtctctgaagttgttatatagaattctttttatttattttaataacaatatttatgatagttgaaactttttgagtgcttactatattttatttcatgcattatgttcagcactttacatgttttatctcacttgatattcacaactttatgagattggcactgttattgtagccattttatagatgaggaaactgaagcttagagagttaaataaagagctcaaaatctcacatctagtaagtggcaaaaacaggatttcagctcaagcaatctgattccaaaacagacytttttcactgtgctgccattcttttgcctggtttttctgttaacttcttaaatatatgtcatgtttcatgcttacttcctcattttcataaatatattacctgctcacttatacattatattgcttagaaacaaacccaaccctgttttcttatggactgtatcctgaaaatcactgtttttaatatgtggttaaacaagtgttttattagtgcatttatataaattatttaaccaaaacacttaaccggtgaaagtgctttactgtgagagtgagaatgtgcatgttctaagaacctctaatttttaaacctcccttattctcagccttatatttgttaaaacctgtgtgttaacacagatgcacccatgttaggggttaattagagaaaccaacctctttatagattagcttgttcatctttaagttgctaggcaggcactgtaaattcagagaacaatctgattgtaagccacaaatcaatgaaattaattttggggttgccttttaaaatagtgtcacaaaatttaaggataaagaatgcaaaaatgatgccaattatctcatcacattagttttgatttaatttttttaatttgaaaaaacctactcttaaacttaattgatttttttaaatataagtttggagataatttttaattcagtaaagttatagtgattgaaaaagtagtttataatttttaataaattgatcttgttttaattttgagtcatattctagaagtgcttctttgcaaattggtaaattgcacatacatttccacttatatacaagataattgctatggttggtttgtataatagatgcagtgcatctgaagagctattttatgagaatattgtttcttgtatctgtcacgagccaaaaagaatatttttaagaaagttatattcttggtgatagaacagctgataatttagaaacaactgtaagacagtccactttttctgattatgaaataataccatagttaagtgtaatttcctataatagaataaaaacacsagwtctagttttaggggaggcatgttgttacygtaccttagaatttctggaagatgacatattcatgcttttcctgataactgctgagtctcctgctctgtctgccaatccagtcaagaagcctttgctagcaatcaattaataatacgtttcatttatacatatttcctatatatagtatgttattgattatctcagtaccactgaagagaggttatctgggtcattggagctttgcttctagatttgtgaagccataaacctatatatttmaaataggaggccaaaaaaaaacgaccattgctttatatagttagattttcagtgaattgagagtttatcatttgtaattatacattaatcaaatataaggcataatatacccccctgcttatatcagcaccatttcaaatgtaatgttaaaaaataataaatggagaagtagatagctaacaagtaggcttaatttaataagacaaagtaaatggcatttggaaacmtcatggatttaatgttttatttaaatgatttctgatttttaaaaagtaaatattgtwtccagaaggctgagaaacaagttagtagggagattttttctttgcaaaaaaattttacagttgtgtctttaacattgtaccacaaactgttgtcctaccagtctctttgtaagaaagctatagacatgttgggaatgaatgagctctttcctttttaaaatatcagttttacatcattcaggttccaatcgttgcacttactgctactgcaagttcttcaatccgggaagacattgtacgttgcttaaatctgagaaatcctcagatcacctgtactggttttgatcgaccaaacctgtatttagaagttaggcgaaaaacagggaatatcctkcaggatctgcagccatttcttgtcaaaacaaggtaaggatttaatggttgatgaattttggtaatgatttcctttttttttttttaacaacttatgtattttatgttatttaygatttccttctaatgcatatttaacatatttcaaattccacctagttttggttcaagtcaagcatgatgttatataatcaattcagtgattgagactagtgtatttttaaaagcagaaaccaattctcctaatattttaataccccattctgttgcttaaacagggcatatactatttatttttattttttaaaattttacttatttatttatagagacagggtctctctgtcgtccaggctggagtgcagtggtgtgatcacaactcactgcagcctcaaactcctgggttcaagcagtcctcctgcctcagtctcccaagtagctggaactacagtcttgcaccaccatgcctggctaggacatatacttttaatgattgataagtaaacaagcaaacataaaatgactctttcatctgaattctgtctagtttactaattacatgacttcagtcttaaggagcttagaaaaggtcaccttacaaacacagtggagcctgtattgtgttccaaggactattgtaggcgctttctatataaaatgatctaatttaatccctataactgctcagtaagttacgtattattttcattttattgttgaggaaactggcattagtacttttttctgtttattttgtttaaaggcattttaaatatatatgttaagaagttttcaaaagcctatattttactttttataagcctttattttactatttgagacagtgtcttgctctgtcacccaggctggagtgcagtggcgcaatcccggctcactacaacttccacctcctgggttcaagctattctcctgcctcagtctcccaagtagctgaaattacaggtgtgcgccaccatgccaggctaatttttgtattttttagtggagacggggtttcaccatggtggccaggctgatctcgaactcctgacctcaagtgatccacctgtgttggccttccaaagtgctggaattacaggtgttggccactgcgcctggccagtttataattttaaacattaaaataaatgcttcttgtccaatcatggtgtctcacacccataatcccagcactttgggaggcagacgttggagaatcacttgaggccaggagttcgagaccagcctgggcaacatggtgaatccctgtctctacaaaaaatacaaaaattagctgggcatggtggtgcatgcctgtagtcccagctatttgggaggctgaggtgggaggatcatttgagcccaggatgttggggctgcagtgagctgagatcacaccactgtactccaggctggatgacagagcaaggccccgtttcaaaaaaaaaaaaaaagcttctaccaatacaaacacaaaacaagcatagacaaatagagtttaaagaacatcattggtgttttcctctaaagggaatattgatgctaggccaaraaaatcctggagttattcttgaggaccttaaggaataattgaaatgtaggatttgctcctggctttcttgtcctatattcagaataaaacaagaatggatcgaatatattctgagtgttctggccattctagtgctctctgaagtgagtactcactgtgtttcacttccctttcatcctaaagaggaaaagttcttttgaagaaggctgtttgtcctaggttagagtctccacagtcagatcattatctcctcctaatctttgatcctgttcagtctctatggtactttcccttataataacactctctatggcactttcccttataataacactctcctttttaaagcagtttgccttttttgtgtgtaatattgttctcctggttttctgacgtcctggtcctcttataatcctatgcaaatgtttctttctgtttttcatgttgactctgctaattgaggtctttgttactttttagccgagactattataatttccccaacagatayccctctccccagtgccccttgttgctttctatgcagtttacaaattattgtctgcaaacacatccttaagtctggaatacctttctggaactccttactaggaaataaagaccagactcagtgtaacattcaacagtattgaagatctaggtatttaatatgaatttttttttttaaggagatcaagaaagatttttgtacccatttttaatcctccaagaagacttaggatagcaggaaaccattgagagtcagaatgctttctacagatcttaggtgaacagaaactttcctcttcatgagcagtgaggtagagggtaattaaggcttcagagcattgcccgttatttccatcttcttcccttcctttaattctgctaaattcctttaatttgtttatcagtattcaagtatttttatccattgagctaaggtgtttcttaaactaaccctattttgttaaagtcttaattataatatattcatagtacatttaagtgagatagatgagtctctcatataatttagtggttagattagattagaattttctcccctcagaaaattaagaggaaataaaagtctgtagcaaatcacttggcaaaataatggctccttttgtaataggaatttttactctttygatttatctgttacataagttcaaatttttacatattttccaccttttttaaaaaagagtgatatgtagtcaatatcaatttgagcaacactgttgcatataaattgaaaaggactccaattttctaattccgtacctcagttgtgatcactgttggtattttggcatttatgtagacttcctttctctgaccctactactgtgcagatatatagttgcagttttttgttgttgttaagttgatacagaaatagttgcatactatatccattatttatgcaaattttttttcatttaaagtatctgctatctttccatatattgcattttcttaaattagagccttaatatataggatattacaatatctaggttttgttgagtagttttttcttctttgaaaacatgtttttaaaataagrtttttttttttttttttttgacatggagtcttgctctgtcgcccaggctgtaatgcagtggcgggatcttggctcgttgcagcctctgcctcctgggttccagcgattctcctgcctcagcctcctgggtagctgggattacaggtgcatgccaccatgccctgctaatttttgtatttttagtagagacggggtttcaccttgttggccaggctggtctcgaacttctgagctcaggtaatccgcccgccttggcatcccaaagtgctgggattacaggcgtgagccactgtgctggccttaaaataagatttttatacactaaaagaaaacttacatttttcactccattaagtagttcactgtgaatttttgatattgaagcccatttggttgctgtcaaaaatagatttgaacagattattcagtatgactcttgtagtgaaattattgccttgtttcctctgcttaagttttcagtggcttttgccacagtccttaaaggttttataatttttttaatgtttaatttttaaatgtttgcttaatatttcttagtatgagtgtagataatgatgaacatttagatgactttttactattataatgttgcagtgaatatttgtttacatttatcttttggccaataagcaaatatttttgtaaattagaatcctaaaattgaaattggatcaaaagttatatgcacttgaaattgattaacttttcctaaatctaaaatagtatagtcttttttatattgtcagcataaatgaatgcacttatgtaaatgaatatttttaggcgttaagtaaaatattctrtggaaattgaacatttaagttgtttatacttctatggaaatcgtttacgcttttaataaagaagcacaagtttctacaaaatacattctaacagatgttttctataacattcagtctcaagattactagtaaatacttctttgaactgtaaaagcaatctttcaatattataagaaagctcttgctttagtaaacatttagaaactcagctttattatcataagcaagaataagaacagtgtaacaagttttatgcacactcctttgtaaaccctcaccagactaattgttaatctggtgccttgcattccccaaagtatttgtatctgtcgtttataagtttttatcaaggtttcagctaaaacaaataaatttgtttctggttttagctttaatttgaactgaaacagtcaaaactgagttttggggacttcacacaattcatttggatatttgattctccataatgttttaaattttcatgcacttaaatatatcattatttttgataggctttcttcctttagtcttttctttagaaggtagaaaggaagaattaaataagataaaaccaaaygggtctgaagcatgtataaagtatatatrtttgctcttttgttcttctttttctttagttcccactgggaatttgaaggtccaacaatcatctactgtccttctagaaaaatgacacaacaagttacaggtgaacttaggaaactkaatctatcctgtggaacataccatgcgggcatgagttttagcacaaggaaagacattcatcataggtttgtaagagatgaaattcaggtatgaggatcaatcatcattgctctccrttgctcatagtggaagtggatrtttctcaaatgtttatttaccagatctttattgaatactttctttgtgttgaacataaagcagtccctctgataaatgtgggagaacaaacttgcagattagtataaatagcaatctgtacctagtgcttaggtgcacagaggagggaggaatagctctgtcaaggtagttgtgtaatgggggtggtccatccaggaaaattcaattagagtccaaacatgtaagtagaagtttttcaagtatgccaggccagtaggtgatgaggggaaaggaattggttatagaattccaggaagaaggactagcaggtgcaaagacactttgatatgagaacacatactgggttcaggaaatgtgactggtatggaatggttggagggaaagacaatgtggggtaggaatggcacaaagtatggacaaagaggcagggtggaaccgttagagacttgagagaacagttgaatgggtcggttggccaggttatagatggctttaaaacttgcaaagaagcagtctgggcttggtatcatatacctgttagttttcactgactactttagccttagaatttttagtttagatacaattttctgtaataggtaaaacggattaaagtagaataactctggctgaagttaatgtgagggaaaaggaggtacaagagtctcgtctctagaccttgaagacactccctgttggggtcttataatccttggagtgccgcagaatcatttgaaaaccatcttgatgtactactctgtgtttttaaataagataataggattatagaaacattagactggcagcaataagttggattgatttgaagaagagaaactgaagaagggaaagggtatcgatgcagctattgtgaaattctacagttgagattcctgacctgattggactggctcagtgggtgtcatagaggatttatttgggaggatttaagttcaaggcacatgagtaggtttaagtcaacaacttgacactgtcaacatgaaatccacactgtaactataagtccgaggaagagccctctcctgaagttaggaatttaacttcagctcttgcattttctgtcccaccggtcatccatttcttctctatccatctccttttctgatatctagttgttatcagtgttgttgaaaagcttaagtatgattcatattcactgtctataaagttcactacacatagtcatgctgtaatgcatacccgcctgaaagcatctggtctctcttttccttctttccaaagataagaataccattcacagctgtttagaatagaaattttatccaaattcttcagtgtttatatttttgttctgttatttcagtgtcttgaatattgtcaaatgacatttattagctactactggtactactgaatcttaataatcaatcttcaagccattaactgaccaatggtttcttctatcttaatgtattagtaattattcatttagagtaaaacatctcccagaacatgaaagaatacaaactttattcatgttacgttgtgacaggaractttgttggatgcrcctgattttcctgccaatwcacarcttcattaaaacagtaatgctttgaaatatggcttaggaaacttcacaatgatcattaattacacctaatttctggaagagtatatgcatgtatgtgttgcggtattctcccttgctgtggcaggatgtcacaaatttttatccacattacgaaaatttaaaaattgatatggttttttctccctacgttgatatcagatattttgttttatctgacagctggcccaatgtactcctactttgccattataaagaattcaaaagcttcatatttgcattgaaagttctcaaacactttgtaaagatgatgaaagtatgtttcatcatctatgtagaatagtcaggtgttcttgcaattgattacttgctaccgagaattgaatacctactgagtgcataatgtatagaattctagatattcacttttgtgtgtttttacagttgttatataccttagtgtggctctaaaagtggaggtgacagctgtagctcttaatgtcttacactgagtgatgtttagaatcttaaattttcttttataattttagaaaaaagtatacttttctttcttatttttataaccagatccaaacacatttgcatgtagataggcatttttagtcttgaacattcatttttacttttaatcctcacttttattagtttcgtatctttttgtatttcatttcccctttcaagatgccttgagtcctttctttttaggaatgatgttgtgaataaattatttgataaaatgtctttacacctgagagtttataaggatagtttgaaaatcatgtctgtaaaataggttgatctcacctaaaaataataccatataattaaaattagaattattattgtgttgcttattgactcttacatatatcaaaaaattgctgagtcttattcagccagagcttttacttagtatgatattcattcctatatttacttttttctcacctttctcatactttcttttacttactcagcattttcctcctttcctccctcctttcttttcttctttccttcttttctcttcctttcgtattcctggtccatcttagcatgtaatctttctttatgaaatggcatgcagataggtctactgttcttacagtaaaaaacttcaaggcctcatgtctttcccacttctgtttcccattcacaacctttttagctgattcttttggtactttaccactatatcttgccatagtttatgtacctggctcctacttaattttttgtttatttgtgtattagtcgtaggcattatttatcgactcttctctctgaaagatgaaaggttagctctctttcacattcttaactgcccttttttcttaccttgtccatgtatttctaaccccctttcctcctaatatgtttatgtcataattttggctagattagtgtatacgatttacataattattactctgtaaatgctttttatgatctctgagccatgtagtatattatggctatttttctttcttatctatttgtatttttattgttattacctaaaaaaaaattttctatgtcttatcactaattcttccctaaaatttcccacaattgtgtaaacttacctcagtatattcatagatatgagacattctatcaattttaccctcttaaagatgcagarataatgcattatgtttcatcccaccatctttaatgagaagcttccatcttagattaayattagagaatgttaaaatactctgcaatcaggtaaggacgcttgaaacttcatyataatgcaaaagttttctttaacacaataaatattttgaacccyttttgtgtcttgtattcataggagttcagatagaccactttatttactattttttatagagagtgaacagaaatcccatttctagtcaccagtccttaatctgtaaatcaggcagataatctgtaaatgattggttgaaatcacattgaattccactttgtgccagggacttaagttaacgaacaaattattcttacaaaaaggtataaatgtaaggttttcattcygctaaatatgtttgtcaaactgtgttgtgatttgttctcagtgtgtcatagctaccatagcttttggaatgggcattaataaagctgacattcgccaagtcattcattacggtgctcctaaggacatggaatcatattatcaggagattggtagagctggtcgtgatggacttcaaagttcttgtcacgtcctctgggctcctgcagacattaacttaaataggtaaaaaaaatttattgtttttactcttgcagatttctttctttctttccatataaacctcaaaagtgtttgaggctatttccagtatcccaagtaatttgtgagtgcatttaaagtaaaaaaaaaaaaaaagaaaaataaaacctccccaaatccagaggacatgtaagaagaacatttgtggtaagagttgccacttggagatgagctaatttcagcatgccttagttagtgtgaggaattaactaaatcaggacaatacttgggcctgtcacagagatcctatggaatactttcctaccattgtgcattaatgaacaggttcttttcctctcctcagatcctgtcaagttgcgatgtcttcagccatagttacttcaactaccactgattttgttactgattctttcttcccatgctacagtggtgattattccagaggatttctctcagtccctatttgactcttgttactatttgttttcttggttagttccatgagaccatgccagttctccttgactgtgtatgaatcattgtgttgcactgtactgacagactgccgtaagtcaatattaagtgttcagtatctaagtgcaggagaacctttctacttaagtactcaacaagtagtttgttggcacttaagttctatgagattttttgttgtaaaggaaaacattatcttgcaaagattttggggcagcatttaccaatactttgttccttcatccgtaggaaaaagaatctcaggagaaaaacctatacatggtaaccaatggggctgccaagctgatgaagtattttcagagtacacctttgtgtagctgaataaattgagatcttgaatggacatattagctcattttagtaaaatgataagagagtgcctcccactacagtttttgtttttatgcatcattaaacaatgtgtttttgattgtccactgtgttccatgaactatgctatgtgtgggagatatagtagtaaagaaaagcaaagtacctgcttccatagaattcagtataatgggaatggtaattctttagagaatcacataactatggatacataggcttcattttactgttctccttttgtgtttgaaaatgtcaacaatcaaaattttgtaaaaaaggaatcatgcaacatatttaaaattataactgtgttaagtgtaatgaagggaaattgcactgagtagtaagaatatataatggtgtgtggtatttcccaagttaaaaaggtcagataaggcttccttgtggaagtgatagttcaaatctgaaagartaggaattaattaggtaaaaatgtttgatgcaaattttaagattttccttctgagtagtcagtagcttttccttcttaacatagaagatgacaaaaccatcctttttttgtacataacaattcttgttttcctttagacagttgtatctgtcaagcttcttatgatctaatttaaataattgggatagaacacagctgtacatgttactattaaatatggaatatatcaaacataagttgattcctaccagttctgattttatttgtgtattttgttaaaggtactgaggacattaatatccagttttatattgtgcatttgaaggttcatcaataaatacaattcttgtttctctgggtcttaaaagatattttaaatggttatctcattaagatttaacaggaaataacagtgattcaaatcaaatagtggtgccagaaacccatacttgaattttgggtatagacaggttaccctttgcatcaatcctgaggaaactaaaactataggattaatcaggataaaaaagaattgagcaaggattcaggagggatctgtatcatcctggtgacaaccctcttctagaaaaaactagaaagtctaagaataaatgaagttgctggttctcacctggaaaggtcagttactcacaaaatttttagagtctatcttatgccataattctatcactgagagaagaaacttgtccagtcatcatgtaatcttcatgtaaatttatgtttttaattgcagaattcataccacaggcaaagtcccaatgtctgcatttgctgttaccttaaatagtcaaaccccaaagttattgtaatctttttttaacagagaataatttgcagagtaatctcggtccggtagatctttcagtggatccaaatgattgccatgaatggtttagaatttttttaattttcaagttgtttttattctgtggaatactggacttatttttgtagtcccaaaagaaaaataaatatttatttatttgccgttaagagttgtagttttgttttctcaaatttgtcctgacactgacgagattagttaaatgtaggtcatctgaaccaaatacaaggaaggaaggacccagttctgaagagtgtgggcatttcttttcttgtttttttttttttttttttttttttctataggaggggaacgaggtgaactaaacaaacaaaataaagcaaaaaagaactgatttttatcccttgaggtagaaagaatgagattacagtggacccccttgtctgcattttcactttctatgttttagttactcacaaccacgtccaaaatgttaaatagaaaattccagaaataaacaatttataaattttaaatcagtggtggctttgagtactgtaatgaaattttgtgccatcccactcagtckgcctcgacttcccttagaatcatccctttgtccggtgcattcacgttgtatttactccctgtctgttagtcacttgttgcagtatcacagtgcttgtgttcaagtaacgcttattttacttaagaatgaccccaaagcacaagagtactgtgcctaatttataaattaaactttttcataggtatatacatataggaaaaaacataatacatacaggatttggttggtactattctgcggcttcaggcatccactggacgtcttggaatgtatcccttgtggataaggaggaactgtatatggttaacctaggagctagagtcaacagttggaagagactttggggataattacatggaagggcatggtgggtggtcgtttcagatgacaagaatgtttttgaataacggatcatttgtgtcttcagactttccagaactccttgagaattatgcagaggtatttaatcagtcagaaggttgaatagtcaaattattagtgagtgaagtctattttgatgaggattttactaatgctgtcccttagatrttataagtaaatcgttgttttcttttgaaatatctgaaacctagttaacatggactttcatttgttcttgtaaagatatgcaaagctatttgggagattgtcatcatctgatatttgatattcatgggctttcttcacagaagactagaaattaacagagtcatgatgaattatggctgcattgactttaaaaaacaaacacctccttaatgttatttaacaattttgaataaatttgatatggcaaacaaatcagttataatcgattgagaaaggaacttaattctaatacttgactggtgtcccataataacccataatactaagagacagttttggagggcgagaagtcctgaagagctgatagagataaaggttcaaatttgagcttctttcagtgttccttacgtcaatgcttttagtttctcatacaaaataaaataaagaataacctttttactgggaaaaggtaaaaattaataaattgtagaagcattgtttgaagccaaaaagtgtgtgacatgtaaattgaaatgaaaaaccttagagtttttgatactttttcaaagcagctaaagaattgatacttggacacaggaagaattttttttcaaaagcaatttttataaaatcagaaaaatgtttacctcttgttgggggcattgactggaaaggaatacaacagaactttctgagatgctagaaatgtttttttatcttgatggggtgtgggttttgtagataatgaaaaataaacagtaaaaaataaktaaaaaaaaaagtragaaagttgccaatacagttttacatattcctgtgmtgtttttaatcgacaggcaccttcttactgagatacgtaatgagaagtttcgattatacaaattaaagatgatggcaaagatggaaaaatatcttcattctagcagatgtaggagacagtatgtattatttattttrtgccaatagtatggatttatggatgatgctcttttaagacaacaatttggctaaataattatcagtattttgaaaaaatattttgttgctgttacatgtgtgctgaatttttaaggctaacttctttgtgtctgagtaaactgaagtcaaataatgaagtcccaagtgaatcaattaatggtgattttacctcattattttcaggaatgaacttaacatatacgtttctgttcttttatttaatttaaaattttgtcttgggtagaatcatcttgtctcattttgaggacaaacaagtacaaaaagcctccttgggaattatgggaactgaaaaatgctgtgataattgcaggtccaggtaaagatttcttattatagatggacattctaaaastctttctttctcttccttttcatgtttaactgaatttttgttgaatgataagtatttcagttttttaaacaaaacaatgaatgtgtttagatatgagaaagcaaacaatattaaagtattttgcttaaaaaatagataaagcaataaaatggtagccctaaatctaaacatatcaatagttatgttaaatgtaaatgatctaaaatattatttaaaggcgtaaattgtaagaattggtttaaaaacatgaccctgttctgtacgttgtccacaagaaatccactgtaattatatagataggtttaaaaaagaatgaaacattacattccatgaaaacattaatcaaaaggaagttggagttactttaatatcagacaatggacactttggagcaaagaatattatcaggataaagaaggatattatatgatgtaaaagaatcatttcaccaatgtatcagtcagggttcaccagagaaataggacgattgatattatggagatatatatatatatatatatatatatatatatatatatatatatatatatatatatggggagggaaaggaagaacaaatatggggagagagggatgaggcgactgattttgaagaattagctcacgaaattgtgggggttggcaagtctgaaatttgtagagcaggtcaataggctggaaactcaggcaagaggtgatgttgcagtcttgaggcagaatttcttctctagcaaacctagtttttgccctttagtcctgccactgagtggatgaggcccacccacattattgacaataatctcctttacttaaagtcaactgattataaatgttaatcacgtctacaaaatattttacagcaacatctagattagtgtttgaccaaacaactgagcatcataggctagccaagttgatgcataatattaatcatcacaaccaagaagacatcatcctaaatatatatatatatatatatatctacttaacaaaaagactgacagaactgaaaggagaaatagagaaatctacagttacatttggtgacttccagcatctctcaataatcaataaaactgacagaccaaaaaatcagtaagaagacagaagaaatgaacaggattatcagcatgctggatctcattgacctttttagaacattctacccaacaacagtagagtacacattcaagtgcagatgcagtattcatgaacatggatyatattcagagtcataaaacaaaccttaacaaatttaagaatcttgtatttgtatattttttgactagaatggaattaaactagaaaacaataacagaaagataacagaaaagtctctaaaccttagaaattaaataacacacttataaataaatccatgagtcaaagaggaagtctcaaggcaaatcagaaaatgttttgaactgaatgaaatgaaaatacaaaatgtgtgagatgcagctaatgcaatactgagaaggaaatttatagcattaaatacctatgtaataaaagaagaaaggtctcaaatcagtacctaagcttacatcttaagcaacaagcaaataagagcaaaataaatcaaaatgaagtaaacataaggaaataacaaagaacataagtcaatgaatagaaaagctatggtcataccactgctgtccagcctgggtgacagagtgagaccctatgtcaaaaaaatttaaaaacaaagcagcatgcagcattcattgtcagtgaatagaaaatgggaaaacaatagagaaaatcaactcaaaagctcattctgtataaagatcaacaaaattgatataaacttctaacaagactgacggaaagagaaaagacacagaagaccaataccaggaatgaaagagggaatttcactacagacctcccaggtattactagggatgataagggaacactatgaacaactcagaacataactttaataatttagatgaaatggatcaatttcttgataatctcaagctaattaaacttacagtgaattagataacctgcatagtgttacaaccattagagggattgaattctatgttaaaaatctctgaaaataaaatcccctagcccaaagaatttcaatgacaaattctaccaaacatttagaagacaaaataataccaattctatagcatgattccatttatataatagtctttgaaacataaaactatactagagggatgaagaaaagatcagtggttattagagattgggggagggagaaggtatgattccaaaggatagtacaaggcagtattttggagtgatagatttatcgtgccctgattgtgatgggagttagatgaatctatggatatcttaaaatgtgtagaactttacacatacatacaaccaatttgcctatgttaattgaaaaaataaaataaaaacaaattatttacctggtgggttagctacgtacctaagttcaatagctgcgttactgtaagacaaaagaagcattattagggatggagttgttctctgtgtaatgacaaatacttccttcactaagaagacagaattgttttatgcacctttaaaaaaaaacaaaaacaaaaaaaatacaaccaacaaacagtaacttgctggtgcggtggctcacacttgtagtattagcactttgggaggctgaggtgggaggatcacttgagaccaggatttttaagaccagtctgggcaaaaaaccgagactgtgtctctacaaaaataaaaaataaataaaaaaaattagctaggcatagcattatgtgcctctagtcccagctactctggaggctaaggtggaaagatcgcttgagcctggaaggttgagactgcagttgcagtgagccatgatggcaccactacactccaggctgggcatcagagtaagactctgtctcacataaaaaaaataataataatgataaaaactagtctgggcatggtggctcacacctgtagtcccagtcctttggaaggccgaggcaagagaattgcttgaacccaagactttgagaacagcctgggcaacatagcaagaccccatctctatttaaaaaaaaaaacaaacttaaaaatccagcaaatacataaagcacaaagccgacagaagaggtggagaaatcaacaaatccaccatcaaagtgggagaatttgatataattttaagttattggtagggtaaacaatccaaaaattagtacactgtagaaaatttggtcaacatagtaataagtttgcttattactatttatcagtatacatagtatactgatttatcagatacatagtatatggagccctagagcaagcaactatagcagtgtatctcaagtatttttacttcatgacccacatagcaaatgatatgtgtatataacacactgggctaattgtcagagttcagtttctgtccaaaaccctaagatctggagtgattaacctttcagcactcttagaactcacttgtttgtagcacactgattgagaagcactgaaagacttcactcctcaaacatacatggaatatttctaaaaactatgtattgggccgggtgcagtggctcatgcctgtaatcccagcactttgggaggccgaggcgggtggatcccgaggtcaggagatcgagaccatcctggctaacatgatgaaacgccgtctctactaaaaatacaaaaaattagccggatgtggtggcgagtgcctgtagtcccagctactcgggaggctgaggcaggagaatggtgtgaacccaggaggcggagcttgcagtgagccgagatcgcgccactgcactccagcctgggcaacagagcgagactctgtctcaaaaaaaaccaaccaactgaacaaacaaaaaaactaaaaaacaaaaacaaaaaaactatgtattagagcatgggttggcaaactatggcctgtaggccaaatctgcatgctgttttatttttttttatttttttgacatagggtcactacaggctgtcacacaggctggagagcagtggtatgatcatagctcactgtaacctcaaattcctgggctcaagcaattctcttgcctcacctcagcttcccaagtagctacaggcatgcactaccagacccagttaattaaaacaaatttttttttggtagagacagtctcagtatgttgcccaggctggttttcaaactccttgcctcaatcagtcctcctacttcagcctcctaaagtgctgggattataggcmtgagccatcacgcttgactaatgtttttgtaaataaagttttctcagaacacagccatgccttttgtttatgtgttatgtagggctgcctgagttaagtagttggctrcaaagcctatcatggcctataaagcctgaaatacttactatctggtcctttatagaaagtgttttctgaccctgtactagactagcttgtctcaaaattcttcaatgaatttggaagttttctcaccacattttctgaccataatgcacttgagttagaagtaaataagcagataaacaacaaaatcctcatgcatttggaaattaaaaataacacttaaataattcatattcaaagaaaaaatcaaactggaaattaaaaaaaattttaaacctacagataactacattaatatgcattaacatttttagaacttagggatagttacaatgatatacattaaaactggtaagaggctgggtgcgttggctcacgcctgtaatcccagcactttgggaggccgaggctgggggatcacgaggtcaagagattgaaaccatcctggccaacatggtgaaaycccgtctctactaaaaatacaaaaatcagctgggcgtggtggcacgcgcctgtagtcccagctacttgggaggctgaggcaggagaatcgcttgaacctgggaggcggaggttgccgtgagccgagattgggccactgcactccagcctggcgacagagcgacactcttgtctcaaaaaaaaaamaamaaaaaaaacaaaaaaaaaaactagtaagaggkcccagtggctcacacctgtcattctagctctttgggagactgaggagagaggatcagttgaggccaggattcaagaccagtctgggcaacataacgagaccgcatctctacaaaattttaataacaacaacaaaaaaactggtaagaggcaacattgaatagtactttgtgggagtttattagcttgaaatactcataatagaaaagaaaattaatcagctaagcatctcactaaagagattaggagaataaacctaagcatagtttttttcccccaaacattattatatctggaatattgaatgcattcttattgctatttcaaagatacttactctaaggaaagcaattgaattaggtagttgaactctatagtagattttctttaatgagtccttttgttctcaacctacttaaataattctcatttgaatttatgatagtttcagatctacccaaagggtgacttaggaatttaacttctaaatctatttaaatgaaaggtttataatctttktgtcatattttacagtcgttagcgtttaacaatttatagcataggatttgggtttttttttttttcattttaaagaaraagtttatttaagcaagacacttgactaagggaagactatcttggagttattattactagagtaatttatttctacttaaagacagattgccccacaagtaacagctacataaaaacagttgtaaaattgtccttggttttacaatgataaatgaaaaacattaaaattctctaattgaacaaggtatgcaaggatttttatattgttttttgctaaaactatgacagcaaaataacatcctggagtataaagataagagctgaatgagcaggccactaggggacaaagggagtcttttcacagaaccaatgcttcttttgcccaccccatctccatcgaagtcaatctaaacatattattggccatttagttaaaaaaagaaagaaaagaaaagcaatatgcttgtggacatacaccagttactttatgtgcartaaaagagtaggaaggggaaggtgaaagaatagagaaaactatgtagtcaggatgtggtggaaccaaattgcaactttcttttttttttttttttttttgagacagagttttgctcttgtcacccaggctggagtgtagtggtggcccaatcttggctcactgcaacctccgcctctcagattcaagccattctcctgcctcagccttctgagtagctgggattacaggtgcatgccaccatgcctggctaatttttgtatttttagtagagatgggttttcaccatgttggccaggctggtcttgaatgcctgacttcaagtgatccacccgcctcagcctcccaaagtgctgggattacaggcgtgagccactgcgcctggccaaattgtagctttctaattgagactgtcttcttggtctggaagagcagagttctgcagtaaaataacaggtcccccttttagtagacatctccatgtctgctgctggaacacatcagttttgtcttaagcctcacttccaaatgtgcagatgtgtctggttcattgattggctgcctgtcaaattgaaacctgatctgcctcattggcaaaccgtgccccttacaataggctttcattggtttactaagcggtgtggtgcgtggctgttcatcttaaactgcaccacagtttaagatgaaccttcaaatgaacattatccttgttctcagtcttgactttccttgggctttttgtggaccctggtgagtgtggcagtctcctcagctgctgcttcacaaaagaggtaccaggtctgccccgaatgagtgagcccctaaacaggaccaggagtggcagaagaaagaggcagcaactgagatgtgttttttctaagctgaaaggctttttttttttttttttgcaacacacctttaacactaaagtccaatatttatataattggtcaagtaagtggagctgttctagctataaatatggcaactctgcttgctcgtcctattattgacattattcctttctgtggtctgaggtgcctcccatgaaacttgcttctaggacactaggattgagaaccatcagcgtaacatatctgttaygctacaatagtttattttcatattttagctactttacatactcgggtataatgaactttattcatagcttctgaagcagttggcacatttgagatattttttacttggctaattgttatgctaaatcttttgatttctaaagatacatgcctttgctaagctttcttcaaatgttattatttttatttagattggatcattgctattccatggatgactcagaggatacatcctgggactttggtccacaagcatttaagcttttgtctgctgtggacatcttaggcgaaaaatttggaattgggcttccaattttatttctccgaggatctgtaagtatatatctgtgaattcccttcatagatcttcttttacttctattacacttttcttcagaggtttgcagtattatgattgtarctttgacttcagatgggtgactaggaactcatagagtcttactaagttccagttaaacactacattcattactttggataaaacccgtgtgtatggcatcttctgctgttttcatgttcaagccgatgttcagctctgcagctcagtctggaagcattgtgttaatttatcacattgcatttgggtgaatccctagactagtcttgcttaggataattaggaaaagttaactttcattgtatcaagggacaggtagaacaaaattgtccttttgtccaggaaacyattaaattcttcaaggaaaactttagttatagggattattttttaaatgtctaatttcagtaacaatatttgggacatatttatttttccttctgtttcctatcagaagtatttaaagttataagaaaattgtggtttttgcctttactaatgaataaataatcaattaaattcagttacttttttttggagtgattgatgttccagtattcttctaaacaaccacgggtacaaatgtgaataagataggaccgttgcagtccaagagcttgttctgtagtcctttcctttatatgattttttcccctgatttagaagtctataaagcaaagctaagtattacacactgataatggctgaataaatcaagagcaagagataggatactttgcaaatatgcatatttattaaaaatgtactttaaaatagagattaaaattctcgtattgaatgtagaataggtaagcatttatttgtgaaatactcgaatgcttcatgtaaatactttctgagtttgtatttttagaaaggaacattttggaggctgaggcaggagaatggcgtgaacgtgggaggcggagcttgcagtgagctgagattgtgccactgcactccagcctgcgcgacagagcaagattctgtctcaataaaaaaaaaaaaagaaacatatttattaaattagttgtgaaatatttttaatgaaatatattgaaaacttctgttgatttttcatgtactgatgtttttagattctaaatggagtttaaaattttgtttgtaaatcacaagttggattagaaatttaatagtagaagtgttgcctaaggactattttaggtgctgtgagtgaaactgtattttttataacaagaattttagttgtaagggacagcttaaatataattgagatctgtgaaaatgtattctgtctctatcaccttcagaacctgtgtatctcagttgaatgtataatttataaaaattattcttgttttaatttggtgtaatccagccatatccagtatcaacaaataagtctaagtaggctccttgacaaacttgaactggccacaagagagatcagatttcacctattaaaaaaccaaatcagaccacttacactgacagtctcttctgggagtcctcaaattaagaagtctatcctttgtgaaatattacactacccttgctagataaaacttttctaaaagtaccacttaatgaaaatctgtagacactaaatgcaatgaaaataaggcattgtttttttttctccccatttcagtgatcttggtatcctgggatattgtttttaaaattatcgttataattcctttgagaatttagtgaaaygttccctttaaccaacttaggaaaaattaatatctttgtacatgattttgagctgtaaaataaacattttaaactgggaataattggagtttagttaaagagataatgtatataaatatataacatagtagcagcatataattctgtcttacacaagatttttctgaatagtataaacagttatgtagcctatctaggagtttgtgaatagagtttaaaattttgttttgaagctgcaaatttgattagaaattaaacagtraagttattacttaaggaacttcgttttagctgtctgaacaacttactgtataaaaatctttaaacattctgtataaatatgtgataagatatgcaatgaccttaattttatagattagaaaataaaaacacactcattaatttacataactgacagattaagtgaaacttctcttctgatcacgttagcagaatgccaaatcttgtcgtggcactagaattagacggtagttttgataatacatgatttgactatagacatttgttgaaactattggtagttttaatcactcttgtaattttcaaactatctaacgggagaggattatccatcctgttttctagacaaactgtttcatctgaatgaaatatattcctagagataattatcactacttcatcttttggttttattttgcacatagaattatagttcacaatgactttctgaagctctaaagttgcagctgtgagcttctttggcctgtagggactgggaaaaagcacccccgtcctcccccaagcccccccaccaaaaaaagttaaagtgtttttaacaatagctgtgggctttttgtagtttcagaacttaggagttgcccaggctggaatgcagtggtgtgatcatagcttgatgcagccttgaactcctgggttcaagcaatcctcccacctcagcctccagagtagctgggaccacaggtgccaccccacccagctattttttttattttttaatttttttgtaggtatggggtctccccatgttgccctgcctgtctcaaactccagggctctcaggtgatacccaccacccttggcctcccaaagcacygagagtcactgtgccaggctgagtttaaaatttcttgagttggagtttatggctattttttccactagttattaaacatgtatttttgtataaggcactgtattacattttgtggggggattcaaagctaaattagatgagacgcatcatctattatggaagatgttacttaagaagaaatgagtgtaatgtagcagagaattagataagggacgtatgaatacatataaatgctgttgaagttctgaagagagagagtgtttagagaaattagaggagtctttgtgaagktatcactagaacttcctatttttgtggaatatatagtagattttggtgtgatactgtggatttggacattcactcagagaaggaatgagggaagaatggtggagaagaatggcattcacagtacaaaaagcaactgtgacttttaaagaagttaatatggagaagtggcaagtcttttcttctctcttctcttctcttctcttctctcttctttttcttttttctttttttctctgtcagatacygttgtaaagactttgcttttaccggaaactgatacgttgggtcatgtaccctggccagtcagttctctttattctaacacttagccgatcarttagatttccacattccatgatatgtcagttttggtgacccttatttttccacctggtttataaagggaaagaatgtgatatgtcacccaggctctggagtacagtggcatgatcataggtcacagcagcctcaaagtttccagttcaagcgatcctacytccttggcttcctgagtatgtggcactacaggtgcatgccaccatgcccagctaacttttttgtagagacagggtctccctatgtttcccaggctggtcttgaacccctgacctcaagtgatccgcccaccttggcttcccaagatattggcattacaggcatgagccactgtgccggcctgaaaatttctcttttgagatggcatcccacagaagtatacctgcttagagctaacactggtaaaaagactatttaaccctattgccttattttactgtagttgagattgagttaaactgaaagctgaatgacctgtcctaggtcatactgttactttgtgccagagtcaggatgagcaaatggatttcctgcctgctagtctagtgtcttttctatttattgtgctgtaacatacagttttaaatttgtatttttatgcccaatggacatggtagctcacacctgtaatttcagcacttttgggaagccgaggtggggggattgctcgagaccaggagttcaagatgagcctgggcaacatagcgagactccgtctctataaaaaaaaatttaaaaattagctgagtggtgatgtgtgtgcgtgtagtcctccttgtgggaggttgaggtgggaggatcgattgaatctaggaattcaggactgcagtgagccatgattacaccactgcactccagcctgggtgacagagcaataccctgtctcgaatgaatgaatgaatgaatgaatgaatgaatgaatgcccaaatccgtaagctatgttctgtatagcagctttttcatcataggcagtttttactcttatcagtggacaacctacaaaattaactaaacacttaarcaattaacagaggaggccttgttcagagtgagaaatcattaagcatttgttgttgaaatttcttactgtactctgttttaattctgtttttttttttttttaatgttacttgttttagtttggattcctagttgaaaagggaatatgattcctttaaaacaaagatactcygctttaaagcaaaggtatatcatcctcttcatggtgattgccatggaaacaagacaatgtaaatttattcaaatagtacacagtttttatagttattgatcatgaggggaagggacagttaatccctactgatcagataaaacctcattgtttcatactaataaatggtttttttatgcttatgaaaggaaaagccagaagkgtaatttttagtgtttagagagctagtgattctagttagggaacttaatacctttgaagttattagtttgcaagcaatagaatctactactaccaaggtgacccctagcagatgtagagtaccattaacaagtgttccagggaaggaaagccaactagataccaagtcatgctttttactcttagattaagaaattcaggttgagttaaaggatcagctgttaactaataaaaagcagattaatattacagagccaggctctgtcctggttatggacttaatcttcacagcatcctcaagagataaaaatgaatatacctgcatattagatgaggaaatagaagataagtaacttgccagagctatgacgtgaactcaggtaatgtagcttaagagcccccacatgtatgtatattgggtgtgtgtgtggagggggtgcgtgtgagtgcttgtgcatgcgtgtggtataataagaaaaaattagcatttatgcctgtaatcccagcactttgggagaccgaggcacgaggatctctcaaccccaggagttcaagaccagtctaggcaacatagcgagaccctacctctacaaaaaaagttttaaaaatattagcgggcatggtggaatacacctgtagtctcagctgcttgggacgctgaggtgggaggatccttgagtccaggagattgaggctacagtgagctatgatgacacctctgcactccagcttgggtgacaaagagagaccctgtctccaaaaaaaaaaattagaactagttatctggaggcctgtgttctagtcctagctttagtacggctacacagtgacacattaggctaccatttaacatctttgaacctctgataatttgttaacaatatgggtaaaaatgactaagataaatcaaagagctccagcattccctccagctctgaaattctatgatgttttatcttattttacttacaaaaataaattatattatgtatatttaaagtatacaatttgatgttatgggttacctatagtaaaatgattactataatgaaactaattaacatatccatcatcttatattgttaaccatttttttgtttttgtggcaaaagcagctgaaatccactcatttagcaggaatcccaaatacagttcagttgtattaattgtaattctcatgttgtacattcgatctctagacttgtttatgctacatatgtttgacttttaaacattctactcaaatcaaccctaagtcagggttagcacagacaggacttgttaacaaggtagaaggtgccacattgtacctgggtgtttatatttctctaaatcttgttctgatcatattttaataaatataatcatcaggacaccaaaattcattccttagctattaaaaaattctattctattttattgttaagatttaggagagcatggtacagattctcttaactatacctatcagaagcctatgttttaagtccaatgtataggcactgctctgtttgtctctggtgggaacttaccctgctttacctaatttcatcctrgcttcctttttgtgaaagatcacccttgcttagcctattttttggcaaatctacaccttggaaatagtagtaaatgacataagcatattaatatttatgatgtgatttatttttgttttcaagtcatatactggggaagattctcaaatattaaaacaatgtatctttacatttatgtatgtcgttcttgttctgttttagaaggcttgtatttgcatttttaacattccaaaaggtaaacctgtaatcataatgttttcatcaattcaataaaaccattacgtttgtaatagagagccctatagttgccttagttaagtttgctgcaactcattttatatattcttttaattttgatccctggatttttaattgattattaaaccttcattaggatatatatgaaatgtaaaaatattgagttataatctaccgttttctaaaattttatactgcatttttatatagaaattcaaattgctcataatcattctagtgaatttaagtagaaaggtatttattactaggtattaaatggcttataatattgttgacaaggttccactgcaaaatagttcaccaagggagctgtggcctcttctgtgatcaagaagccatctgtcaacttgggaagcttccactatagcacctaaccccagactacattgagtaggaagctgtaataatcaggaagcttctacctttgcatgctctgcaaaccaacgtgaacctgctgtaatttgtaaccacaaaatggatgcctgttgatacttacgaagctcatcattgtatgctgggttctttgctaatactttcttataaaaattaaatacctccacaatcatgcatgctagcagaaacagcagasgagtagccttagcctcacttcctgcttatacctgtcatgcaratatacagaacccagaaccctagctgaaagggagtttgagaactagtatttgtattgtcccagattctgcagtggaagaattcatagtggatggaagttagaatgacccttgaattacaatcggccacattcatcacaaatacattaaataagagtaatttgccataaagctctatgtttgtatacttctttgktttttttttttttttttttttttttttttgagacagggtctcactctgttgctcagtctgtagtgcagtggtgtcatcatagctcactgcagtcttgatctcctgagctcaaacgattctcctgcctcagctcctgcttcagcctcctgagtagcggaacaacaggtacacaccaccacactttgctaattttttattttttattttttgtagagatgtgggtctcactgtgttgcccaggatggtctcgaactcctgggcttaagtgatcctcccaaagtgttgggattacaggcatgaaccactgtgcctggcccatatactacatatatttaaaagtagtatttaaatgtgtaggatgaatgaaagaggcagtaagagaacaaagtgaatgaaaaagtatttctatatgaagtgaaagcaggagagtcctctctgttagagaacaacagaattgcatatgacagactagctttcttaatatttctagaacttgatggctgtgaagagcgtcccgtaggaattctcccttcacttaggaaaacatacctcaaaaccatcagctgtttagcatgcacctgcttttcctggtatatctcagtgaagcagctaaattgtaaatgattaagtaaactttgcagtgtatcatgtgcaaaagcacagtaaaaacaaaaatgcattggaagctgtgagttgttgcactgcactcatggatgaatagctgttggttcgcattgcgttkttttgttttgttttgttttgtttttttgagatggagtcttgctctgttgcccaggctggagtgcagtggcgtgatctcggctcactgcaagctctgcctcccagattcacgccatcctcctgcctcagcctcccgagcagctgggaccacaggtgcccgccacaacacctggctaattttttgtatttttagtagagacggggtttcaccatgttagccatgatggtctcaatctcctgacctcgtgatctgcctgccttggcctcccaaagtgctaggattacaggcatgccgcattgcgttttatataattctcatggttctagtctcgagctgtaggattttgatcactgtttcaaacaataatgtgagtttgctaagaggtctaaataacaaaagctaagtgttccaaacacatatccaaacctatacactgggcaatgcatctgaattatatgtgaaatttcctgccattatttaagacacaaaaggaacattattttgataatgtatttatttgtgagtggagtgttcagaatgagcacgatgggtataacatttttgtaggtttttaaagttgaaatttagtgtaaatccaaagaatcaatagacaagtctgtgttttacttaacctrtatgtttaaattagcatttttagatactgattttattcctaatttcagaattctcagcgtcttgccgatcaatatcgcaggcacagtttatttggcactggcaaggatcaaacagagagttggtggaaggctttttcccgtcagctgatcactgagggattcttggtagaagtttctcggtataacaaatttatgaagatttgcgcccttacgaaaaaggtaaayrgtgtaggagtctgcctgtttgacttaattttgtttcccactccacattaaaagatcctttttgcttttaatagggtagaaattggcttcataaagctaatacagaatctcagagcctcatccttcaagctaatgaagaattgtgtccaaagaagttkcttctgcctaggttcatttttcagtttttttcttgtaacttctgcattttttgttgctatttatgtgattcaaattataccagtttataggcctctcacaagtaaaatgaattrcctgtttgtttttgtatgcctattttagtcagtytgggggaagggatctgtgaggaaaggataagtcatagagcacttttcttttttaagagacagagtctctctgtgttgctcaagctggagtgcagtggtgcgatcatagcttactgcagcctcgatctcgtgggcccaagtaatcctcagccacctgagtagatgggactacagacatgcactactatgcccagctaatatattttaattttttgtatagagacagggtcttctagtgcttcctaggctggtcttgaactcctgagctcaagtgatcctcctgcctcagcctcccaaactactgggattacaggcatgatccaccgctcccagccagaacattttcttggttgatgggaagtagctgaccatggtatttagaaaacttctttctcatcgattaaagaagcagtactgaaatcaatgcggaggaatccatatatcatatttacttctggtgtgtagaagtggaaagggaatacatttgttgcttacttttttgtacctttacatgtgattgatcacttgtgagttttttctttcaaacatcttaaagcttccagagctttttctrgaaaaaaaaaycagttttaagaatcaccagttctaaaagggtaatatcttattcatctttctgagaatggagtatcatgattcatgaattagatacttgcatcttaacatttgaaataatttaattttattattttttagttygaaaactgtatcttcgggcaccaaagagcattgttataatcaagtaccagttgaattaagtacagagaagaaggtttgttttaaagaaattgttctgayttatttcattctttattgattcaaattctgtttaaaattttatattttaattcctttccaattaaagagaaaatggcatatataacaaagcataaaattcggccagggaagtgatgtgaacagactaaaatttattgtatataatttctggggctaataaagaattggaggtatttgagaaaggaattaatttgggttcttttaaacctatctgctaactcatttggcttagagtagtcacatgttataatacttatagttgatcaaaaaattgattcctaagtgttcttattaaagacacacaccacacacacacacacacacacacmttctctctctctctctctctcacacacacacacatgcacacacacttatgtactttcttgctttttttgacctaagatcttagataactattacagattaaatactaatccactggcagacttcagctaattagaacactggaataataggcaagcatagtgaattacattttctggtgaactttttctgctttattgaagtatgcagaatgtaaatgaattgtttttataactttggcacttgctgtatcttagaacattcttttgatgatttattttctgtagttttgggagagataagacattggaatgcgtttctaactacctttagaactttagaaactgataatttaggaggttattttcaggtgattaatttgacagcttgattaggcaaagaaaaaattgtgattttgagatttttgtttcttattttcttcacatttaaaagttttttgaaactttttttaatggacctttatatgtttaaatgcagtctaacttggagaagttatattcttataaaccatgtgataagatttcttctgggagtaacatttctaaaaaaaggtacagagttccatatttctatgttctatacttgctttatgagtacttttttttctaaagagaaagaactgtcagatgttgggctatttcattggcaaaaggaagttaaatttaaaacataagcttttcagtattagaatgatcaaagtgagctataaaagaataatgttaatttaatagctaacacttcttggatattactgtttgtcaggcattatgttaaatgctaagaactttatatgtgatatctcatttaattcttacaagagtctaacagctgttactatttatcgccattttatagttgaagataccaagggttaagaagttgacaaacttgttcaagagcatacagctaatggccgagctggctttcaagtctatatttgtctacctctagcatcaagacactatttatttttctttgtatgaaatatatacaggcatactttgttttattgtgcctggctttattgtgacttgcagatattgcatttcttataaattgaaggtttgtggcaaccctgcgtcaaacaggtcatattagccccattttccaatagcatgttctgttgtcatgtctttgtgttatattttggtagttcttgactggccattcaccatttctctccctctcctcgggtctccctgttccctgagatacaacaaaattgaaattaggccaattaataactctataatagtctctaagtgtgttttttttttttttcgagactgagtctcactctgttgttcaggctggagtgcagtagcacaatctcggctcactgcaatcttcgcctcccgggttcaagcgattctcctgtcttagcctcctgagtagctgggactacaggcgccccccgatcatgtctggctaatttttgtatttttagtagagatgggtttttgccgtgttggtcaggtggatcttgaactcctgaactcaggtgatccgcctgccttggcctcccaaagtgctgggattacaggtgtgagccgctgtgcctggcccatctctaagtgtttaagagaaaggaagattcacatgtctctcaatttaaatcaaaagctaaaagtgattaggcttagtgaggaagccatgtcgaaagctgagataggccaaaagctaggccccttgcaccaaacagttagtttgcaaaggcaaaagttcctgaaggaaattaaaaatgctaccccagtgaataaaacaatgataagaaagcaaagcaggctttttgctgatatggagaaagttttagtggtctttataggagattaaaccagccacaacattcccttgagccaaagcctaatccagagcaaagccctaactctcttcaattctctgaaagctgagagaggtgaggaagctgcagaataaaagtttgaggccagcagaggttggttcatgaggtttaaggaaagaagccatctccataacataaaagtgcaaagtgaaacagcaagtgctggtatagaagctgtagcaagttatccagaagatctagctaagatcatcgatgaaggtgcctgcactaacagactttgaatgtagaccaaatgctttctaccagaagaagaagctgtctagtactttcatagctagagagaagtcaatgcctggcttcaaagcttcaaaggacaagctgactctcttgttagaagctgatgcagctggtgactttaagttgaagccagtgctcaattagcattctgaaaatcctagggcccttaagaattatgctatatctactctgcctttgctacatacatgtaacaacaaagtcttgatgatacctgtttacagcatggtttcctgaatactttaagcccattgttgaaacctgcttagacaaaagattcctttcaaaatgttattgctcattgacaacacttagtcaccaagagccgtaatggagacatacaaggagactaacgttgttttcatgcctgctygcttaacatccattctgtagctcatggatcaagaagtaaattaaccttttaagtattattatttaagaaatacagtttgtaatgctttagcttctgtagatagtgattatcagagatgggtttttaagaggttttccagaaaaccttctggaaaatattcactattctagaagtcatgaagaatatttgtgattcaggagagtaggtcagaatatcaatattaataggaatttggaagaagtcgattcttattaaaatcaagagtttagtgatagacatactgagtttgggatacctgtggagtagtccagaagttaatttaaatatatgggcttagtgtacagaagtgagcagggtgcttatatatgaataaatattattttaagatatatttaaattttccttaaaataatacctatacttgatataaaaagttaattggaaattagtggcttatgacaagcataccagcccacactcttcccaaacccactttgctcttattcatagaagctgtcatcttcaaatcttccagctgatttccctggcgtgtgccttcttatttctgaatgacacgcttagagtactatttttttgacttagcaattttagaaattttctactcatctcctattatggtagatttcccctccttcattcctcctccaatataattatatttcgtcatattaataatttgtttatatatatttttaatataatatgataatattgtatttatattattaaaactacacaaatattatatacacactactaacccaaccgtgttattatggccaccactacctttatttttttccttgtgttagtgattgtctttgttttattttcttggttttgagtattccttttactaattttcttttttcctatttcaatctctcattatttgtttactcatttggagtgttccttgacttttatcccctcttacctagtgacattttaattttagttatcaaatttttaatttctaagaatgcttcttgttctcttcttgtttcttcttccccaccagccaaaaatctatgatgttatagcaaggatcatacattgtttcccagtaggttaagaaaccttggttaaaacctgttgtatcccagtaagttaaaagacgttaacgtgtcatcttcagtatggatgaaagaatattttctttcaaaagcagttggttgaggaagagaatgggacaaatgctctttttaaaacaccaattttgtgatgaactcaaattgcaattttaactttaccattataatgaatgtatttgatccaaaatgtttaaaatctaggctgttgtcatttaaataacaaattaccttactggtatcatgaagaataaatgtttgtactgatttggaaagacattctcatttaggggatgaaatagaaagtcaatgaggagaaagaaaagcttttattatttattttcttttaaatatttyagtatcatggtacagtcaccagaaaaagcttacagttcctcacagcctgttatttcggcacaagagcaggagactcaggtaaggcttttgtaaaaaggtaattagtttatgataggatagttatgattctatgtatgcttaaaattctgtattttgccagcattttaaaaattgttcttaagctaagagtctgagtttatatttcagtttatattcattctaaggaaaaatgtggtatctgaagctctaaaaataaaggactagatcttttaagtacactttaaaaagtgttgtttctttgttttttgttcagattgtgttatatggcaaattggtagaagctaggcagaaacatgccaataaaatggatgttcccccagctattctggcaacaaacaagatactggtggatatggccaaaatgaggtaaactatcttttgcatgtgttctcatttatttccttctaacaaaatagatttggaaaatatatctaagttgataatatgaccatagcttccactgtcacatctgggaggtgactcagattccccctgctgcgatgcttatctctttgccaagctttagtaccgtgtttctgtatgaataaaaaccagttacgttttcagcaatcatattcaatatttataaaatctaactcattatttacccaccctgcattttatccaaatgccgaaactcctctttttggattctttatttttgattatcttaccatcacatttgtagtcagaggttcctaatgcttaaaacctctgatctgaattttctctcctccaatataaaaccccttcgtcttcctcttcttcttcttcatttttttttttttttttgtctgaagacttgtctcactgtgttgcccaggctggagtgtagtggtgcgatcactgctcactgcagccttgaccccctggactcaagctatcctcgcacctcagcctcccgagtagctgggactacagaacatgccaccatgctcagctaatttttgtattttttgtagagacagggttttgccatattgcctaggctggtcttgaactcctaagctcaagcartcttcccgcctcagtctccaaagttctggcactacaggtgtgagccactgtgcctggcctctttttctcatttaaatacttttcataccttttgtaaaacgggttccttgttgcctgtctatgccttcctcctccttcttaatgacaccacgttaattctgactgttttcccttggcctgttgcagaagcctcttaactattaacccttcattctctctctctgtttcatctgatatatgagtaccaaactaaatcttcctttatcatatcttacttctgcttaaatgttttttttctagcttagaattcaaggccctctatttatgaacttaaacttacttttccctctaagttacagaatttgaaatggtttatcttacctggattgtttatcacttgttgaagatccattttcaacttccatatatttatttacagtgttgcttctccttgtagtttccttgattcctcaaaactccttttaagaattcttgaagatctcgctttattactatttctcgctttattactgtaaagactatgagaaggtctttcatgatcttatcagcaaagtaattcctctctcttgaattcatagaggactttcagatgaattctaaagatgcttctgtagcacttaccacacaatgctatattttatttttttgtaattagtggtaaacaagtattattatatcttctagattttaaactccaaataaagatactagctccttacctttttgtgtgtctcctgtagcacctagcacaatgcctcataaacaggaggtgatcattaaatatttagaagaaattatttcccaagaatagttgcttggtaattgtatttgtcttttacttccttttaaaaaattgtttctgtcactaaattgcatccaatagatgttacttgagtgcagaattttctaatgacattacacagtgctacatctgacactaattcttttgttaaaaaataaatattctggccgggcgctgtggctcacgcttgtaaatcccaggactttgggaggccgaggcgggcggatcacgaggttaggagatcgaggccatcctggctaacacggtgaaaccccgtttctactaaaaatacaaaaaattagccgggcgtggtggcgggtgcctgtagtcccagttactctggcggctgaggcaggagaatggcgtgaacccgggaggcggagcttgcagtgagcggagatcgcgccactgcactccagcctgggtgacagagctnnnnnnnnnnnnnnnnnnnnactccgtctcaaaaaaaaataaaaaataaaaataaataaatattctaagaccatactttaatggaggtgttttttgtttttttttgttttttttttttttttttggtgatagagttctcactctgtcacctaggctagagtgcagtggcgcgatcctctggctcactgcaacctccgcctcctgggtgcaagccattatcctgcctcagcctccggaatagctgggactacaggtgcgcgctgccacccccggctaattttttgtattttagtagagatgaggtttcactgtgttgtccaggctggtgttgaactcctgagctcaggcaatccacccgccccggcctcccaaattgttgggattacaggcgtgagccacagtgcctggcccagaggagatatttaatgaaaaataataatcattagataggcagatttttagaaggagggcatcgaatgggttcttggatattggacacaataagaaatattgagctaaaagtctgaaggaattggcagatatactgttacaggtaaacactttgtagaagaaaataatgaatgagactttcttttgagattttcttagcctcttagttgttcccagttaaagcctcatatttttccttttcatgacaataaaaataataataaaatcagtaataaagtgaatatatgagatgttaacctgttcctttatgacaatgtcctgtttaccaattaacagtgtgtttttgtggtgatgggggcaagacaaatctttaaatggtggaaagcaragaaagaaattataaaacatgattagttgtattatacgttgtttttgkttgttggaaaaactatacatttattgagagaatcattaggaagctgaacatcagctatattgctggagtgatactgtttcagtggtttcttgacctttttgttgttgttgttgttgttgttaaacacagaccaactacggttgaaaacgtaaaaaggattgatggtgtttctgaaggcaaagctgccatgttggcccctctgttggaagtcatcaaacatttctgccaaacaaatagtgttcaggtaaaatactgtggtttgcaggagctcttagagaataagcattttttgtaaccatttcaaaagtaccctccagaagcaacatttgctcactttatttgcatttccatactggacacttagaaaatgaattaaaattgtttttacagtcaatctgttgtaaaaacatgtcagttatctacttttaaagatgatactaaaaagtagttgtccaggctgctgatgtctttctatttcattgggaggttttgtttttaaattggaaacattattttaggttgataaattataattttacattcaaatgtggtagttggaatttaaagctggaaagttatccttgctatgagttggtcaggagctcagccactttcttttggtttagcatcttctctaatctccctccccttccagtaatgctgtcttttgatagtaagtggatttcatattattctcttcagttttaatagtgtttccttcatatccttttattattgcttgttctgccctaagtgaccatttccagaaatgtcatttaggattttctctaaactccacgtagcagactctataatgcatactctgcagaaggtgaggcagtgggaggtagaggggagactactagactaggagtcacggaatcaggactttagttcttccttacagttgttcacctggtgaacctgcacatgtcctttaatttccttgggtctccatttcctcagctatacaatggaaatgacacttcctcccccacatccaggaaacaacagatgacattagaaaatagaagacatgggataagtataaaatgttgaaagagttaaacacattcaaggcaatattaagggattattttttacttccaagaagctcctggaagctttgggcaggcacagttggatcctactttagaaaaatctttctctaactataagtagaaaacccttctgctttttgaatgtagcatttccctcttttgatatagagtatctttggcaactttgaattttctttttcatactcttatataagacatcatgtgaaaattcttatttcttactgagtttttggaaatgaaattataatgtcttaatagtttgagaaagaatatcatacctaccagcggtaattgagtaagttccctctctttggacacttgaaagtagtatcttctttcatgaattagtgatattatttaataatgaatgagtgatctctcctaactccccttcagaagaggaaaatgaagtaggggaaaaggtaaattccccaagggataggtatgaaacctttatgaaccttctggatagagaagatgactgctgatttctgtgattagaaattatacttgggttattctgcaaattgaaatgaattatttwaaaaaaaacaactttaatgtttattaagcaagttttgttattcatgagtttcattagcctttwattttttttttaaattttgaagtaaaatttcttgctgtcacaatacacattaaaaattacaaatatgacacatattaaacacattaagatggccgaataggaaaaatatgctaaaatatttttatataaatacattttttgagaattttgagaatttctggaacaaagtaatgatataatccataaatgtacaattaaagagtttaaggatatccaaaatacttggcaaagtaatctgaaataatactcttaggaaggtagggcaagaatgtgattctagtaagcaaaaatgtratcaaatcgtattctagtcccagctactcgggaggctgaggcaggagaatggcgtgaacctgggaggcggagcttggagtaagccgagatcgtgccactgcactccagcctgggcgacagagcgagactccatctcaaaaaaaaaaaaagactatatgaacwtgtatggcataaatatgtacaaatattatttattttaaaaaaattcaggggtagggacagggtagttagaaaatatctaaggatgttcatgaaataatactggctatgaatgacagttgatgaaaccgggtggtgcccatcttattccctcgactcgtgtatatgtttgatatatcccacaataaaccttaaaaaaaaaaagatgagtggtcaattataggaagatataaatagaaaaggcaataaggacaaaagttggcaaagcttacctaagcactcttcagataaaaagacatttttgctaactagatttgaatattatagtttaattgtcaaggaaaatgcctcaacttaatctttgttaagagactacttaaggcactatcagaagttccctcatggcaaggtgcaatccctcatgcctgtaatcccagcactttgggaggccaaggcaggcaggttacctgaggccaggagttagaaaacaacctgggaaacatagtgagacccgacctctacaaaaacaatttcttaaaattagccaggcatggtggtgctagcctgtaatcccagctatttaggatgcttaggcaggaggattgcttgarcccggggatttgaggctgcagtgagccatcattgtgccacaatactccagcctgagtgatagaaaaaaaaaaaaaaagtgtctttgttatattccaaacttgttctcaactttcaggtgagctggcttcctgtataactcttgtataggacagaacatactggttggggcaagtgaaactgtctagttgtatgcctcataaattaatgaatttcctttctaatatatacactgatatttatacacacatacacataaaaccaagctcaatagatgggtagtgcagctctattccccaaaacccaactaccctgtaacaagacacattagacttttgagattgcaaggatgaggactgaaatgctggcctagaccatggtgttgccatagtggggtgaccagtctgaatagccaacaatgcttcctcagtaaatacccattttgtcttggtgggatttctayaaattgcaaaatgcagctattatgaagctgtaaaagagaaacagaaacatgtaacacctgggactgttttattaggcccaccgtatgctcagaacatgaaatctccactgctagggttatttgattgaaattatcttttgtgttgatgtgagagtttagctctgagattcttccacatgtaaaatgtaatcccccaaagtatttggcaagcacattttattgccttggstcagataattgaaacattaggcatcatatatatagcatgtaaaaagtaaaacagaaacatttatgtttctcaccaagcagtaaattagtactcaactaataaatttcttaaactccctaataacagaatatggaaacaaaaaataaatctttccaaaagaagagctcatggacacatttcctcatatatgtatacataatatagtagaacacatgataaataacctataaaaatgataccaatatcattcatcaagagacgaggctcttctttaaattattaatttcatctgttacaggttttattatgactgtagtatgctgttttcatctaccttttatgtgtagttaaaaaaatagttttctatctctttacctttatttcagcctttaaaaagattccattattttttcattaatcttgtttttcagtttttcccattttttcttttaaacatttcttaaggaaccatatttaagattttatagaatacttagatttctagttgggatgtatcatttaaaattagatatgtagagagagtgttatgatatatttccttacgatatattagtggttatagtacctaaatttgaatagtgattctgttcattcattcattcattcattcaatattcacttccaggagattggggacttatttaaagacagagtagttcacattatagttcctttttttagtccttcttattcgttaaagaaaagactaggaaatgtttgttattacaaatattttattaaaattttgtgtgctctagcattattttaccttttaaaatcaatatgttaaaaatccaacttctttttgagctccccataaaaagggaattatttgttgcttatgggtttaacttgtgttatttttttcttaatggctaattatcatacatatattctattattgtattgatattactgatcatttgtgctacattaaaaattctgtagacagacctcttttcaagtacaaaacctcaagaagaacagaagacgagtctggtagcaaaaaataaaatatgcacactttcacagtctatggccatcacatactctttattccaagaaaagaagatgcctttggtaagtgtgactttcatgttacagggaatttttttagtttacttaaacttgtgttttatcagctttttagtattaaagttctgacttgggatcaatttcctccaaccctacaataaatctcagtttatctttaattttaaaagagaatgttgttttctttttctgttaagcctccctgttaagtaatagcagcaagtttagtttggccatgaatatcttctagagattgtatcggggtactgataaacacatttrtagctcagggatactgcatcagccatattttaaaatgggactaacagtttaaaaactataaatattcacagtgttaagaaacaatctcaagatgcattaagaaaaaggaaggtgcaaaacagaaaaacaaacgtaaacgtgtgtgcatatgcatgcttatatagtcacatattcttgtatgtgtacaaaaaatacacactggatctctgcaagcatagccaagcaactggaaatatgtttttaaaaacttgcttttcattctrtctcttctagtactgttttgatgctctttgaaaacaatctaattgctgtaacaaatgaccatacgtaggccgggtgtggtggctcatgcctgtaatcccagcacttcgggaggctgaggcaggcagatcatttgaggccagggatttgagaccagttggacaacatagggagaccctgtctttactaaaaatacaaaaattagctgggcgtagtgacgcatgcctgtaatcccagatacttgggaggcggagacatgggacttgcatgaacccaggaggcagaggttgcagtgagctgagattgcgacactgcattccaacctgggcgaccgagcaagackcggtctccaaaaaaaaaaaaaaaaaagaccatatgtaatgtttcttcattgttctaagataaatctttaaggctgttgaggttttttgtatacaaaatggagagtaagttttaatgggatgggacaaaatgaggcttacagttgagtttaatttgagttcacatcctgttgacattaagttgatttggaacaagtgatatggtccaatgcctgcttttctattgtctgtggttccatccactagtgcctgtgttacacacctcttgttcaggttttatcatttaaaataaataagaataaacagtccatagcttatcttacttactgaataaatgctctratttgacagtcatgtttcttaaagttccttacaaaggccattgcccaagaaaccaaataattccattatactatttttgaaatagaacacataataaatgggaattttaagttcagtttcttatgtaaacaataacttctatgtacatgttaaatatgcctgtatatacctaatttgaccatgtatgtatagtagaaatgaaaacagttactaagaaaatttgttattggctccaaattttctgaattaagtgtattctaatgctcagccataatatggggtttcatgtgttagtttatgtattcatggttaaaaatgtgaagactgttatatcttcatttgtgtcttttggtattatttggttgtattttattgtgtgatatggtggtataattatccttacctcccaggagtttgagagggtcttgccagttaaccgcagaattaaacatgcytaggactaattaatcaggagcaatactacaattarttggaggtaatttgaaacctggtttcaaataaccctgatattatgcacacatggtgcacacttttctagtagacatttaatgaaagtaatttaaaacctacctttgaaggatgaaaaacattgccttaaatgctctattctgtgaaagtatcaacatttatgcaaatacagtctaaattcagactttgaaaatgtattgaaagagaggatcatgaaataagttagagctgagtgacaaagctttctgagtgtttaaaagaatgttttacctaataaatatctgaaatgtatttggagccacatttgtttaaagaactgtataaatatgtagcactgttcatgtgaagttcaatagtaggaaaatgctgacagcccttgtggaactgtggttattattattttatgaatagagccaatttcaaacacctattagagtcttctcaggaacattttatagaatgcatctggagccttatgttatctctaagcattttaggatttgtcttcttggaaattcatgtaaccaaaccaccatgtgttatttcaagtgtatatagtattgggttacagtttactatgttttcagaaggttgtgacaactattagacttacagagaatgacttctctgccactaacggctttctaaagtgaatagagaggggcgaggattgaattcttcggtaaagctgggtgattttgttttattcaatacagtataataagtataaaaagtagaacctatagagagctrtaatgggggtagttttaaagaaattctgaaaatgaaaaacttaagtaaaggtttagttcattgtttatttcacactgagcatttactacctgaatgttttggacattttatttccatgactgragtggacacttttacaactcactgggttctttgctgrtctttctctagaagagcatagctgagagcaggattctgcctctcatgacaattggcatgcacttatcccaagcggtgaaagctggctgcccccttgatttggagcgagcaggcctgactccagaggttcagaagattattgctgatgttatccgaaaccctcccgtcaactcaggtgagaggcatggcctagctctgcacccttaatgacttgatgaagtaaacaagcaatccactatatttttcactgttaacagcattaatcctttatgctattatgaaaaccttacttttgtgattctttttcttgttttaggaaaacaatctttcttcccattatcactcagaggaaagtatactgagaaatttttttgttttgttttgttttttgagacagagtcttgctctcttgtctaggctggagtgcagtggcgtgatcttggctcgctgcaacctctatctcccaggttcaagtgattctcttgcctcagcttcctgagtagctgggactacaggcgtgtgccaccatgcccagctaytttttgtattttttgatagagacagggttttccatgttggctaggcaggtctcgaactcctgacctctgatgatccgcccacctcagcctcccaaagtgctgcgattacaggtgtgagccatggcacctggccaatacactgagaaatttttattttccttttcagcttaaggttacaacttccccaccatccaaaacgtgcactttcattttttttctaatttctatctcatcacttgcaaaaaccatatttttctccacattcattcccagtagcttcctgactcctagttcttccctaaatccttctgagtccttgtcattggtttcgcttgagtagcctttctaatcaacacagtcattggtatcagttactgtgacatggaagggacagaccaagttctgtgggccgctacgtagaaggatttcctgtcactttgctgcagaacctcagctcgcggagagcaagcccctttgcttgccctgtagaaatattttaaattattatcctttttttttttaacagaagtaaataggagatacgttagaggattttctctcctagatgtgtaaatacaaacttggggtcttataactcaataaatctgataaatttcttttgactgttaggatagagcagtggccataccaatagcctcatctccaaagctgcagtgaagatactttttactaccttaaagtctttcccatttgtgaacaacttgtgaacaattccccccaagaatttggaagatcactctctgaaagcacagtcaatactgtacttaaatggatctgagcaaaaataagtcacttagaagacaggattatttctagacttgagtgtgacttgactgaaggtctaaagaacaaacagctccttcacttccattgatcacggtggaagcacagggaaaggacagacacggaggcaagttggagtagtgctcatctaagttccagggatgcgggggagtggccaggggacttcaggtatagtaaataaataacctatttataagttatgtcaatgtcatgtttgaaatagaaaaccaaatactgcatgttcttacttacaagcaggagctaaagttggtgcatatggatataaaaatgagaacaggccgggcgtggtggcttgtgtctgtaatcccagcactttgggagacctagatggaaggattgcttgagctcaggagttcaagaccagcctgagcaacatagtgtgacccccatctctacaaaaaataagaaaattagccagacgtggtggcatatacctatagtctcagctacttgggagtctgagtcaggaggagtgcttgagctcaggagtttggggttataataagctgtgatcatgccactgtgctccagcctgagtgacacccagagtgagaacctgtctcaaaaggagaaaaaaaaaaaagtaacagtagacgctgggractactgaggggagggaaggaacaatggttgaaaaggtgggaagggacagtggttgaaaaactacgtgttgggtactatgctcactatctgggtgatgggatcaattgtacctcaaacctcagcatcctgcaatatactaatgttacaaacctgcccatgtactacctgaatctaaagtaaaagttataatttaaaaaaattataataaaatcagaaaataaaggtctgagatggaaaattaaaagaccaaagccacccataagcacaataaatccctccycccaaaaaattatatctattaaaaaaaggtgttgcgccaggcactgtggctcatgcctataatcctagcactttgggaggccaagacgggcagatgacttgacttgaggtcaggagttcaagaccagcctggccaacatggtgaaaccctgtctctactgaaaatacaaaaattagccagcagtggtggcatgcgcctgtaatcccagctactcaggagactgaggcaggagaatcgcttgaactggggaggcggaggttgcagtgagccgagatcatgccactgcacttcagcctgggtgacagagtgagactctgtctcaaaaaaaaaaaaaaaaaaagaccttgtaccctgacaagttttagtttgtgcaggaatgacacaatctagaatgactcaagattggaaaaatctttaaatgttaattacacaataagggtaaaaggagaaaaattacctaatgtcatctgagcaacaagaagaagaaatgaaaggcattaaaaattgggaaaaatttatatttgacagtatcttaacaacgaattctgcttctatatcacttcctagctttctgatgataacttcccgtgcagatctgtatgtaaggaatggacgtagtagtcatgctaatctgagtatttatctgtgtgatacttacgaattaacgatgtaagttaataagttagcatttcgtgaacctggttaataccatttgctaaggttaaattagccaaatcctgaagtaagctgtaaaacatccaaggtagggtagagaggcatcttatgagaaagctggccaactctcctggtcaccttctaatcttcctaacttcagaaatcaaggcagagagaggaaaatagtaattactttgtaggattagatttatggttgtcgaaacctttgtttctccagtgcagaatgagatagcgttttagggaaagccaaagactcagatgtcttcttcatgctcatcgtgtggaatttttcttcctttagaaatgtattgtctctcagggcttaaagcaatttgcatctttcgatgagacattgagtaataggcaatattctctgaaataatttgtgcaggctgggcacagtggctcacacctgtaatcccagcactttgggaggccgaggcgggcaggtcactgaggtcaggtgttggagacgagcctgaccaacatggtgaaaccccgtctctactaaaaataccaaaattagctgggcttggtggcacacacctgtaatcccagctacttgggaggctgaggcaggagaattgcttgaacccccatggraggtggaggttgtggtgagccaagattgtgtcattgtactacagtctggacaacagagtgagactctgtctcaaaaaaaaaaaaatagaatttgtgcagttccccccacccccttttttttttctgttggcatttttgctatcatttagctgccttctttatatcctgaaacttacaggtggtgttggtctagtcagtaagagcaaaggctttgggaatagatagatctgtatttagaccttggctctagcatctcattgttatgtgacctccatcaagtgacctaatttccctaatattcaatttcctcatctctaagacagggagttaatattgcctctcttatagaattgtgagaaatatagtcatgtgtcgcttgatgatggggatgaattctgagaaatgtgttgttgggcgatttcattttgtgggaacctcacagggtggacttaaacaaacctagatggtatggcctactacacacctaggctgtacggtatagctcctgtcttcaaacctgtacagcatgtgactttactgaacactgtaggcaattataacacagtggtatttgtatatataaacatagtgaaacatagaaaaggcccagtagaaatacagtgtaaaagattttttaaaaaagctgggcatggtggctcacgcctgtaatcccagcactttgggaggccgaggcaggcagatcacttgaggtcaggagttcaagaccagcctggccaacatgatgaaactccgtttctactaaaagtacaaaaattagctgggcgtggtgttgggtgcctgtaatcccagctaytcaggaggctgaggcaggagaattgcttgaacccaggaggtggaggttgcagtgagtcaagattgtgccactgcacttcagcctgggagacagagcgagactctgtctcaaaaaaaaaaaaaaaaaaaagagataaaaaggtacatctgtacagggcacttaccacgaatggagcttgcaccctgggagttgctctgggtaagtcagtgagtgagcggtgagtgaatgtgaagacctaggactgtgcactgctgtagactttataaaccctgtgcacttaggccacactcacccctgtgatacgagtctacctactgtataacgtacctgcatatgtacccttgaaactaaaataaaagttaaaaaatttatcttcttttgccaataataaattaaccttagcttactgtaatgattyttctttatgaattaaaatctttttactcttttgtaataacacttggcttaaaacacaaacatattgtacagctatacaaatatattttctttatatccttcttctctaagattttttctgtttttgattttgttaaatttgtttttactttttacattttttttgttaaaaaccaagacaaaaacccacacatcagcctaggcctacatgggctcaggatcatcagtctcactatcttccacctccacatcttgtcccaccaggtcttcaggggcagtcatatgcatggggctgtcatctcctgtgataacaatgccttcttctggacacctccagaagggcctgcgtgttttacagtgaacttctaaaaaataataaaatgtatagtatagcaaacacataaacatagtaacatagtcatttattatcattttcaagtattatatactgtacataattgtacatgctagacttttacacagctggcagcaaggtgartttgtttacaccattaccaccacaaacacatgggtgatgctttgcattgtgatgttacgatggcatgatgtcactaggtggtaggaacttttcagctccatgataatctaatggatacttgttcctgttggctgcccgtcgttgactgcaacatcattatgtggtgcatgactgtaaattagatactgttcagaaagctttggcacactggtaatagcaaatggtggtggcaaatatgatgatgatgatgatgatgattgaagacatagatggtaaaattttatggtgtcttaaaagtaccctctaaatatgattatttttatagtctgtccttttgaataggcacttaagaatgtatgaacttaataagtatataagaaagaatgttccccaaaatatatcttacagaggcatacaatttaagaattcaaacaggttgtaatggggtgtgtgtgtgtgtgcacacgcgcacgcatgcgtgctcattcacactaaagaattcttgggcatatgttcctgaatgtcctaaatggacattctaacatcacttcattatgggcagagggaaatggtaaagaaaaatttcatattatattattcagccacatattgacagcatctgttttatttgcctatggtaaagaattgaagcactgttaatttgctttttaaatcatgtaggcacaaagttatcgaactttagatttagaaatgaaactggaaatcattacactttccctttcctatccccaccctgttttggagagaaagagtgtgaggcttagagagttataaaactgttttaataccatgtctaagattaataactgaacaagtttctctttttactcgtgttaaagttgtactgccaattaacttaaaagaaagaaatatgcaatttctaatcctgatataggatatgggtatataaactctaacttgatgagtgaaacaaattaacttatttataatcagtttcatatctttatttattgagtgtctttaaataccccttacctttaaagtaagaaatattaaaatcaagcagaatataataatgaaaaattcttaagatatacttactaaaaacttatcsttcggttaatacactgtatgtaggttgtacatacaatatgaaaaagtatatttttgtagcctacttttaaatccagaatagaggaggttaagaaggttgtgataaccatgagctctttttttttttttttgrgacaaggtcttactctgtttcccaggctggagtgccgtggcacaatcatagcttactgcagccttgaactcttgggctcaagcaagccttccacttcagccttccaagtagctgggaccacacctggctaatttttaagtatttttgtagagatgagttctcactacattgcccaggctagtcttgaacccctagccttaagcgatcctcccacctcagcctgcctaagtgctgggattacaggtgtgagccactgagcccagccctcttttatttcttttgatagtacactcataatcattaaactatcatttctggatgtgagattgtgcttttggattcttattttttctttataaaatactttttgttctcttactggagaaaacattgttggattataaatgatataacaaggaatgaggatatacatactataataacgattcagatatgttattttcatattttatttaactgtagccatgccacaataatttagagttttaaagaacaagtttgattgaaatctaaactttgtacaatcctgaattgagaagtttcctgtattttattatgacacaatatttacctaaaaatagrgtaattatgaattgagaaaacatagctattaatttcatactcttatttgttaagtagattttgtctggaaaactgttcatatttaaaggagctttgtacctttgtattctttttgtttttccttgtttatataattttaaactctgtttatggatttgggattctaactatgctaaataataaattaaggcattgaatgaagtacctagacagtattttgattaattttattcccccattcttaatgtgcatgtaactggaaaattaagagtggcttccaagggatctactacaaaagtaaggttaatatgatctcttttaaaacactgaaggcgtgtagccagtgttgtcattaattctgcagtagatattttcagcacttatttacatgggaagttagagcagagtaagatgcacctgtaaagctaaatgccacttatttgcatatatataaaacgcaggatgaatttaccatagaaatataaagggtacttatagaaatgtattagaaaaatatatgaatttttaacttatatctagaagttaactttatacatttaactttaaatcattaatagtggtttaacaccataagcggatgtttatgcatcatcattttatgaacaaaagacattctaattttagaaataaagtgattcaaaagagaataaaatatcttactttttcttttaaaattaatttgtttagcgcattacatgataatagctcaagcttgtgtgatttttccctaaaaaattggtttataaatattacatttatagtatgaagaaattaatcatacatagtttatttatctaatttctaaatacccatggaagaaaatgaatttaatggaatgtagttgtgtattacttggtttcgagtgtgggaaaatttatatggtctttctaaaacagcactgtcagtagaaatacaatgtgagctacatatgcaattttaaattttctagtagccacattttaaaaagtaaatggatgcaatttattttgataatataatttaattagtctactatatttaaaattttatcatttcaacatgtaatcaatatgaaaattattaatgagatattttacatacttttttctgtaataagcctttgtaatcaggtatgtactttatatatacaacaaatcttctgatgctaaattttaactggaaatacttgatctgtgtttagcttttgtaaaatttactgttgaacaacgtggactaatgtgcctaagtggttccaaacatattttaaaatttgaagacaaataaaagggaactcaaagtaaattgggatacatacatacaacagaatactgagccattaaaaaatgatgaaatagtaaaattgggggaattttgatgatactaggatgatataatgaccaagagacaaatacaattttagtttggttgagagatgtgatcatcacgttgctgattttactatgtatagaggttatcttttcctttctaagattttgaaactttaattagttaacccacttacctagtttctattagctgtgtaactttctcttcctgttttttgttttgttttgttttgttttttgctttttaactgcagtattttgaggagtcttggagtagcaagctaatctttggaagaaaggaaaatataaacctgaaaactaayaatttaaagaacgtcttttcaggttrtcatttgaaaaatacttgatttctgatcactgatttgaattgagtgtcaaatatttgatatgttttgtaaattaggtgaagatgagtgagtaggttctaaactgcttgggtttaccgcactctggagcattgcagragaatgtgatgttggaaggaagtgctgaaacataattattggcttgcctataggagggtgctacataattttagaaggtgtcaagaaaktgacacagtctgaattagttctgttgagttgcaaaaaatgtaaagtttcttgattctgaaaataagaaatatgttcccagaaatctcatctagttaatgtgcttttaaaatcattgatgtctcttgttattacaataatagccattgaaagaatcttttttattagaatgttatttacaggtacgattagcttctatttaaataaattatttttatacttgatcttaggcaaaaggccaacaagtgatcagaataaattattttaagagaaaactaattataattgatatttggaattggaagcacaatttcctttagaacaattccacgaatggttgttttgattctcaaggcagcccacaaaagacagtttgaaacacaatttatgcagtgtcaatagtactgacctgactttggatcttggaggcaggggcttcaggtgatacccgagtggagtttttactccatttccattccgtaaggctataggcatttgaaagaggaaacttttctttggcaaccttccaccttyctttctacagaatatttcagtatttctagctcataggttttctaaaatattctctgtaatttattttgaaatggagtttttttatcgtttacagatatgagtaaaattagcctaatcagaatgttagttcctgaaaacattgacacgtaccttatccacatggcaattgagatccttaaacatggtcctgacagyggacttcaaccttcaygtgatgtcaacaaaaggagatgttttcccggttctgaagagatctgttcaagttctaagagaagcaaggaagaagtaggcatcaatactgaggtattaattatatatagaattttcataaagtgtcagtttgttcaatttgcatatcctagtactagaatgctgtatttttttgaactgttatgaattctgatatgattactttctctatgtgctacatttcctttgcttttcataaatatgatctgagaaaagtgattaaaaaaaagacagtaaaagggaggtttagtccatctgtttagcttattatgtagaatgtcagcttaaattttacctgtacctcatattgaccgtatagcctggaaaatctttcggaggtatagttaatggatttaagcatatggcagtttatgtagttaatgaaagtgaaaacaaattgtattataaatacctcccaaactggtttattatcattctatcattcttcatgctctgttagtatgatattgaatatctgaggtaccaggattattgttgcttgtggctctgagcatttcgtagtgcttttgcatgatgagagaaagattacaaatttagtattatgttagatggtacgttttattaaaatcaaatgcttcaaaaataattgctctgtgtatggcatgagataaatagcaatcagatatattrtttaataatatgactctattaaatgatggcataaatttgaaaatttgaccttcggtatcttccgggtctaaaattatatgactccattataaatattttggaaatgattaactaaaaaattgtttcaattcttagttggtaaattcaatgtggtagtaggtggtggtgattattttgtattagagaattaggaattacacttagttctaaggtaatctttataggatgtccagcaattaaacccctacttttttgaattgcttaaaaataagggaactgatctttttaaattctgtacttgagttacgtctgtatatatagtcatgtcctagataatctaatggaacttaattagttggaaatctttatattgtttataactgaactagctataagaggaacattaaagaaaacatattttgagtggaggtaatgaaatttagcttctaatgctcagccttttatttctgtaatctataccagatacctaagaccctcttattgtttcccagcttcaacctgtcagtatagaaaacggtgtaacttactattttttctcaatattgaagcacatttgtagtgaaatattattttaactatatattgccatttttgctttttccctatttcagtaacatttttcgctatttcagtaacattacatgtcaacaagagaatggtgggtattttggggggggttgggtgggragaaattttactaagcttgctagattctaaaaggtataccttatttggccccttttccccatttaggggaacaagggtgttggggctgggaagtagataagaggtgagtaagtcatccaaagcatatgtcttcattagcctccctgtatgaaaagctgatttctgtagagtgttggaggcctactttcagaatctgtcatatgttaacattcatcttctctactgacctgatttatatcccttagtctatttcattttataattatgacaaaggataaagtcattagaacaaattctttttattagttgacgtattgttgtgtttatatctcttgtgtttgttattaagatggaagctcaatcatgtccttgtttaacagaaaggtgatgtcttggcattgataattctgattcaatatccataggtacatggtggattctttaaatatttagtattcttttatttctggaaagttttcttaaatgatagtttttttaaaatttcatttctataaagttttcttaaatcatactttttagtgttttattccattacttcatatttcttcttcaggaactcctgctatacatgtatgttggatcttcattacccagcttcaatatttttcacttttcatgcattctttttatttcttcatttctctttaaatttttttcttccttttcaccttctatttctcttttaacataattgtatttatttctgtattccacatagcttagtattcacttattttaaaattattttaaaacgttttttagatttaaaaattctttttttatttatatatacatattttatttttaccaaaggagcaacactattaactgaagacttctataatttttttcttttatttctgattctttcttcggttttccccctcagttttgaacttttctaattttgatttgtgatgtccttttgtattttagataattttcctaatgttttccagctcatttggaaaggctacagttttattctgtacctaagcaagtctttctggtgtcaaagatttgaccttgatacttttcttttgctcattttcgtatgagattagttttcctgtactttcaaaagaaggcgtggttcaagatggctttcccaatttcacatctgtctctaatgtttttgtgtaatgtctaaaatatggaaacttggtttatgagatctactctgccatttttatctgggctttctcttccttttgtctctgttgtacctgtcctgcttggttytgatttaaccccagtggtttctcctgaatgtggagccttctcctagaaggcagcctcggctagtcccagggttcagagtagccagctgctctcttcacctaagagaccactgtggattccttgtactcacttgctattggcttggacaaaagccctcccattttcagatgctattatcagattaatctctcattaatctgtctttccagtgtatgcctgtgggctatcttggggttctcttgttatcagacacctccctgctggcctctgctttctcccgtacagatgtcagtactgtgcaggtcttaattgctgttggtggtttgcccctacattcttacagttttagtttcccaaggatacctttaaacttggttttattgtaaatgtcgacaatggattttgggttttactatctagttctgtcttaattctggaattcagaaagattaaaagctctgttgttgcagctgctgccacctcttcccagtaccctctcctcctatgtcatttttttcttcttatttttcttgactgtataagagagaatgtatgacatttcctgcttgaccgctgagtttgattataaattaaawtacacaatattttatacaaattgttttgtagaagatttatttacagatgctcattcacaggtaaaattgacttatgaaaatagttttcatgacaaatgtatcaggctcggtaactaaatatatggattgatcttgtttataaatgaaattaaatgtgaatgtaacttacatatttctgtatttgcttacatccgtatgtacacatataatcagcaaatgagttgatgtttcctattcgtaacttaatggtaatagcttggtaacagagttgggagtattaaaaagatgtaaagagccccttaaaattttgttgctgggaattttagtgttctactgatgaaggaaatagacactggaaggygttgtttctattaggtaacttagatatcatactgaagacttcaaatacttattgttgacactcaaaagacacacttagtgtaagtaagcatttccccgcttttcccaatgaaataagatcattattataattccattataaatgctgatgatcatatttatagaaatatagaagataagacttgaaatgatattcgctaccaattaatgagtttgaagaagaaatcaggatgtgttttgctattttacatttattcttatttaactccaaagaattcagtgatgttatgtactattatttccatttctctgtgaagacgttgaagcttaagtaacacgcataataaggtcatacatttagcaagtggctcaattaaagttcaaacctggttctgcctggtttcaaagtctgtgctactccatggtattaggctacaacatgacttagggtttcttcctctgctctattgctgttcagatgtactcctcttttggcagagtgggagaaaatttttgcaatctatgcatctgacaaaggcccaatatccagaatctacaaggaacctaaacaaatttacaagaaaaaaaaaaaaacattaaaaagtgggcaaaggacttgatcagacacatctcaaaagaagacatttatgtagccaacaaacatatgaagaaaagctcaacatcactgatcattagaaagatgcaaaatgccttttctgtatgccaccttatatccccagtatttattatttctaagtcatagtatcttacagtgtatataagtctcatccgttcttttgattttctcttccctgcttgcaattgggtacctaggaacaaagttgcaatcttagccagttttttctttagcctttgctgatgtgtgaaaagcccttttttctaccctggatttctgtacttaagctggaacagctaagtttttaccttttttaaatataaagtttcagagtcttctgccaaggatcttttgctgttttcctactgttaaatatttcaaagccttttttaaacatagggaatataatcaaacatagcaagcagctgatgaacaatatctagatagtcttcattattgaaatggaataaatggtatttttgtattttaggctaacagacaccttgtaccttagataaggccaaccttctcataaaatccctcagttacttttattaataataaccaaattaactctggattccagggtgtactcatgatggaatgatttctctgtcatgttatcctgaggatctagtactctgagataacataagtgtatgacactttaggcttatgaaacacttagctacttaaattatttaattttttttcatgtgcagatggtattgtacccaaacactacctttgtgtgtgtgtgtgtgtgygcctgtgtgtgtgtttttgagacagggtcttactctgctcaggctggagtgcagtggcgtgattatagctcactacagccttgacctcctgggctccagtgatcctgccaaagtgttgggattgcaggcgtgagccacctcacccagccttaaattatttttttttcaaggatgtttaacctgagggttagaggctctttggcacgtgagctgctgaaatgtgtgtgaaagtgttgtgcacgtgtatgttcctctttttttctgggaagtggatctgtagtgattcttagatgagtctatgagacaagaaacttttatttttttcatttatttagcgaatgtttgttaagcgtactatgccttggccactctacagggtgctgattggaccagtctgtctacctaccgttgtagatgttagaagctatattcttttcacatgcctaatataactctttgtgtatgtatacatgcccaggcatgttccttcctcagaacattaaattcaccattttggtcaactcaaagcaagtacaccatgggacacagatctgaaataatgtccagatttttacttactgaatgaggtgtgttgagtgtataagactacatgatgagatggcaagtaattgcctgaagaaatgatgtagtgattttgtgtgtcttatatttatttactttttgatccagaaataaattatatagataccactattttgtttggatgggggagaaaggatgggtgtgtattcaggaacttatgttacttttttgcaactaataccccttctcagtagtacaaagatttgatttctttttctttctatttcctacagacttcatctgcagagagaaagagacgattacctgtgtggtttgccaaaggaagtgataccagcaagaaattaatggacaaaacgaaaasgggaggtctttttagttaagctggcaattaccagaacaattatgtttcttgctgtattataagaggatagctatattttatttctgaagagtaaggagtagtattttggcttaaaaatcattctaattacaaagttcactgtttattgaagaactggcatcttaaatcagccttccgcaattcatgtagtttctgggtcttctgggagcctacgtgagtacatcacctaacagaatattaaattagacttcctgtaagattgctttaagaaactgttactgtcctgttttctaatctctttattaaaacagtgtatttggaaaatgttatgtgctctgatttgatatagataacagattagtagttacatggtaattatgtgatataaaatattcatatattatcaaaattctgttttgtaaatgtaagaaagcatagttattttacaaattgtttttactgtcttttgaagaagttcttaaatacgttgttaaatggtattagttgaccagggcagtgaaaatgaaaccgcattttgggtgccattaaatagggaaaaaacatgtaaaaaatgtaaaatggagaccaattgcactaggcaagtgtatattttgtattttatatacaatttctattatttttcaagtaataaaacaatgtttttcatactgaatattatatatatattttttagctttcatttacttaattattttaagtacctttatttttccaggatgtcagaatttgattctaatctctcttatgtagcacatgtgacttaatttaaaacctatactgtgacacagagttgggtaaacgatgattatttaactttaagcagttcaccatccatttcaaagcctttgattggcttttttgtaaataaaaataacttgttaagaaacaaatatatctgtcatagaagaactagaaaatccagggaagtgagaaaaatgaaaataaaaatcattcatagttttactagtagctaatcacagtcaacctcttttgtgtatcccaccagacttttttatattcatttgtttttagktaaaatataaaagtctcgtatattcccatttttctgcattgcattachagaaggtagtggcgcctattaaatatgtgatatgttgttgtccagccatggcttctgcatttgcatgcttttgtgtgtgcatctgcaataccctgtgaatatcctgtgtgatggagtggcaagtacgcacagacacgtctgctgcatgcctaggtacgaggctgtctccaggagaagcacttgtttgattatttgagttgccaattgaatttgctgctttttttcatggcttgccattttcactgaaaagaatgactaatgaaaaacgatgattggttattagatttggatgtttggcagacattttctcaaaattgaactaagttggcctcttcacggaaaacaactggtatttgttgtgccaatgataaaattggagatttctagcaaaatgtataattttggaaaagttgtgttcctccactggaagcttgacagctttccttaacataaagacttctctttctcttcgctttcactactactactactaattcttcttctgattcttcttcttctccttcttccttcttccttccttcctcctcctcctccttcttcttcctcttcctcttcttctttctctctttccttccttcccttccctttcccttccttccttccttccttcctgcccgtccgaccgccctgccttccttccttccttcctccctccctccctccctccctcctttctttttctttctctttctttctttctttctctctctctctctctttctttctttttctttctctttttctttctttcaagcagtcctcccgcctcagtcccccaaaatagtgggattataggtgtgagccaccatgcacagccttacataaagccttttctaatgagatggatagtaattaacaaatgtgagtttttgatattatataaagattttttctgtgtttcgaagatccgtataactcagtgaatcagtatgttctggatgactaatatgtgatgttaagaaatcatgactgaggccgggcgcggtggctcacgcctgtaatcccagcactttgggaggccgaggcgggcggatcacgagatcaggagatcgagaccaccctggccaacatggtgaaaccccgtctctactaaaaatacaaaaattagctgggtgtgttggtgcgtgcctataatcccagctactcgggaggctgaggcaggagaatcgcttgaactcaggaggcggagattgcagtgagctgagactgcgccactgcaccccagcctggcgacagagcaagactccgtctcaaaaataaaaaaagaaatcatgactgggtaaaagatctgttcagagtacaagatggaccaatggatttgatatatttgaatataacagagtatgaaaaagtttattgatatagtttcagattacacactgcaactaatctttaagaaactattacttgtccactttttggtaaaatttcagagaacaatgtccaccattatctgaacaggctattaaaatactcttctcttttccaactacgtgcctgtgcaaagtcagatttttttcatatacttcagccaaaacagcatatcaaaatggattgaatgcagaagtagatctgagaatacagccacttttgttaagccagacaatgagatttgcaaaatgtaaacaatgctgctgttctcagtttttaaaaatatgttttttaaaagtatttatgttaatgtgtacttggtttactactgctatttttaaataaaacaagaaacatttttaaatgtctgttttaatttctaaagtggtagtgatagatataacccatattaataaaagctctttggggtcctcagtgatttttttttaagagtatggaagggttctcagacctaagagattgagaaatgctgatgtaatgttttattataaaggtgtaccatgaattatgtaccttacttcatattgttggacattaaagttgctttcagtttttttgttttaaacagcactgctttgaccttttttaaaaaatgagtcagggtcttgctgtgttgcccaggttggagtgcagtggctattcacagacatgatcatagcatgctatagccttgaattcctgggctcatgtgatacttctgcttcagcctcctgagtagctgggactataggcgtgcaccactatgcccagctgctttgaatattcttgaaatgaaatatggtatagtctcataccatatcatagccagagggggagagagagaattttgttgttgttgttatgttatctgtagtggactttatgccttcccagcataaattctctctttccccatttttcgtgacccttgatttttgttggggttcgttccaaggagaataatttccatctggatattggattggcacctgtgacctcttctgagctagaccctagtaacagcgtttggatctggggtaggtgtgtggccaactgagctgctggttcatgcctttcctgaaatgagccctacctctgaatatttcagaaacatgggacattaacttccctttacttacgttaaacccctttgaatgaggagttgtttttcacttccagttgtgttcagttgtcacagaagcacagcgatgtgattggtggaaggacccgtcaacagacccagaagatgtaaagtgtttttaatctcaaaggatgtggaatctcagagatagttacaccgagtagaggatgaagcggctcctggatggaggcagaggcttcctggatcttcaagttctgtatgggttgttgtatgaggttggtgcaaaagtgaggcaggagaatagggtctggaggcaaggaaactaaggccgattcacactgacttcctagaactaaatcaaaaggaaaaccccaattttccagacctaaataacaaaagtaccagatggctcctccctttcaactgcccctcccccacacctttctgcgtgacacatggaaaattgaaagtatctctggttgcttctgcgtaggaatgtaactttgtaaccaatcagacggatcgcaggccaagtcgcctgcatagaaatgtaactttgtaacttcactttagcctctgattggttgctttccacaaccaatcagatgcttgcatagggtgtacctgttgtgacttcacaaagtggtggaagtggtggaagtggtggaagggtggaagggctatttaaatttttattcatcctctgattggttgtttcacttaagcctctaattggttcttgagtcctggagcctgtgaagggtactttattttcagtaaatgcatgctttttttgcttcattctttccttgctttgtgcattttgttcagttcttagttcaagacaccaagagcctggacaccctccactggtaacaaaagtaactggtgtttttgccattagaagtaatggcacagaacaagtacatgagagcgatttcttatggaaaattaaatggcgcataagtcgtgtgctcaggtaagggagctgggaaccggtagaggaaggtctccaacccacacccgtgggatctctgagtctttgaaagtccgtcctcaccctttgtgaagaatgggagcacggctggactcgtcaccgggggttttggggggctgaacttgtcatttgagggtgtagggaggttggatgaatcgcaggggtgcagggagggggcccactggagctccaccaggaccccagcaccctagatccaaacctggtcatgcttcccatgctcagaggcaaatctccctccccttggggggcggagtcagacgagaccccctctccatccttttccaggtccggtgggggcgggactttaaaggtaaaaacagcaattacttttgcaccaacttatcttctaagtttcgctccctaccacctgagtgtgtttggaggctctggctcattgtacctgcctgatcaccaggtgcaagtagctgggccagaaggacctcggcacgttacggaatatttactacaggaacaggtgagctgaaggcgaattccccaggtgtagcctgtgaccatagattcagacaaagccctgactgttgcctggaattcaaaaaagctgtagccctaccagatagaataagaaaagaatataggattcttcctattcaaataggttgcatataattaagagcatgaacgatccaatggaatgaactcaaagtagtttttgagtgtaatagacttgaagtgtcttatggaaaagaattgcaaaaccacagaaacagtgaagaaggttagttatagccttgatggggtagctgacttcagcagtctcagctatctgaaaagttatttaccagattttggttgggaacataatccctaaatcatttgagataatgtacttgtttccttactgggtaaatgtgtttaaaccttgagaaaatgtagacataagtagaatatagaataaattaaacctttggtagttatgttttaggattaaggactaataagtacatatttgatatttaagcatttgtaatgcttgagataatttatcctactcaagtaacagattactcttgtgactccaatgtaaaatatatcattgaaaaattagtatctgcttgtgatttttaagtagaaaccctgccatttgaaaggtatttgcctttattattggagatatttcatatgaatgtttaactttgttattgcatagaagtatttaaacagatttcacttgcaagagaaagatatctaataggttactcttaatcagtactaaattactacaattactatattctattaatatcgattcattaaaacccagagctttaattatgtctcagaaaattaattaaactttagcctcataatcagctttattttctaactcaatgtttaaaaattgacaagtatgtattatacttatttatgtcttcattcagtaaacatttgcatttgtagcatgcaagacaacatgctagacacacgaaagatggaataaatggaagaaaatgcaacacagatctcatgcttaagagggacagatttactctgaagattcaatgaaaaaacatccacaaacaacttttctacaagaaacaaaacattttaaagaaaacatttacttcagccgggcgcggtggcttacgcctgtaatcccagcactttgggagggcgaggtgggtgcatcacgaggtcagaagttcgaaaccagactggccagtatggtgaaactgtgtctctactaaaaatacaaaaattagcctggcgtggtggtgtgtgcctgtgatcccagctactcaggaggctgaggcaggagaatcgcttgaacctgggaggcagaggttgcagtgagctgagatcaggccattgtgctccagcctgggcaacagagcgagactccgactcaaaaaaaaaaaaaagaaaaaaaaaaagaaaacatttacttcacataataagatatgagaaaaaatggactctctgaatgaaaaaaagaggagatcatgtgaaagatttgcgctttttttttttttaaagttatggactgaaacactcctaatcattaacatttgttattttaggggagtggaattggaaaggtggaaagggctatttacatttttataatctccatgtcttttaaatcaatatatattgcatttattcttttagttaaaattttaagaactctataaaaaatagagacagggactccctttgttacccaggctggtctcaaactcctgggattaagtgatcctcccacctcaattagaagggtggaagggccagctgtttaagtttctataatctctgttaaatcaaatgtatattgcatttattattttaaattttaaaaacttttttaaaaatagagatgggatcttcctatgttgtccaggctggttgtgagctcctaggatcaagtgattctcccgccttgacctttcaaagagctgggattacaggcatgagccaccatgcccagcctatttatttgtttatttatttttagaggcagggtctcactctcactagactgaagtgcagtggtgtgatcatagctcactgcagtctcaaactcctggactcaagcaatcaactagcctcagcctctgagtactgagatgacaggcatgtgccttcatacccagctaatatttttgtagagatggggtcttcctgtgttgcccggaagagtctcaaactcttggcctcagcctcccaaagcactgggattgcaggcatgagccacaacacatggccctgcttttaaaaaatatatagtgggccaggctttctgggatgatgggcaaccattacatttgctttctctccattctgaatgtcagcctccatacacctctm

SEQ ID NO: 93292 - DNA, 55719 bp, Homo sapiens
  misc_feature (1)...(55719): n = A,T,C or G
gattgttctcagtgattcagggagggaaggtgagcctgcctcactgggccttttccctcctatatctccctaggcttcctcccaggttcttatcttgctttggcagtcccaacttttagytgatgagagaggcatagaaggacaggaatcaggctgggtgcagtggctcacacctgtaatcctagcactttgggaggccgagagcggaggactgcttaagcccaggagtttgagaccagcctgggaaacaaagtgagaccctgtctctacaaaaaaaaaatcaaaaatttagttgggcatggtggcacatgcctgtggtcccagctacataggaggatcacttgagcctgggaggtcaaggctgcagtgagccgagatcgcgccattgcactccagcctgggcaacagagcaagaccctgtcaataaataaataaataaaaagatggataggaatcaagatgaaataggggtctggtccaggagaagtgaggctgggagggccctaacctcctgatttctcctccttggtgttagagagggtaggatcccagaatcttcacttcctcagcttagaggaccctttttctcagtgtgattgcttcccagaacttccttggcaccttgctcattggtttataatagtgtttggagaaggcaagatatggagaggatcatcttggggcttagagaaacaaggacaagtttagaagcaaggacagtgtcagatatatgaaaccaaatatgagactgaatatttgtaaatactagaatatgtggctaaaacagtatttgtagaatggaagctgagttggaattgttctctgctgcctgctgagtccaggaaggtactggcccatggggtggctacttagttatttgcttccaactgagaattaaatctacaatagctatgagccaaccccctgcttttgcctgtttcaggggcctggtacccttcctaacttctgaccctcagcctctttctttctaggtcctatggtggtctccttttccattcatgactcttcccctttggctagcagacgtttaaacatttcccttaggtctctcctctgcttttgctgaggttctcaggcctctaggaaggcagaaggaggattcaggattggcagagagagcacctccatatctacctttttgtctgtagagcaggaggagtggcatctggaattgattcatggtcttagcaaccaccagctccttaaagggtctcaagttcctagactagcctgtgtgtgtgcatgtccagtgtgcggtggcatgtctccataactcagccttgcaaagaagcctcttgcgaccggcccgtacataggcctttcagcttggcaggcctcatcatcttcattcccacaataatttctacatttccaagtgctttgccagcatatttgatcctccaaacagtcttgtaagataaattgaattggtattatcttcattaggccaaagttaaggactagcaagtttagatgacttgacttgtccaagatcacacaggagtccagacctcttctgaaccactgctctttaaaggccaacatsctgtctttctatgcctccctacattctccgtcagcagagttctgaaagagaccccacccttcctgccgcaccacagactttggtttgaactctgcaatacctatctatgacctcctttgaatcctatgagatggttagaagaggcagcatcctggccttttggggtgggtgaaggattatttgcaaggctgttctaaccttctcatctccagcctgggtcaggtccactgactgcatgtgccctgttccttggggcctggcccagactggataatatcctaaggtgtgacaggagtaagtggggaaggaaggcatggaaaatggtgactcggagcaggctgtaggttctgtgttagcttgagtcccaggaaatacagccagctatgagaaggcagagattttattgaggatgccgcctgtggaatttaagcctatggctgcaccagttcagagccagagcattcaccactggtggggcccaggtattggaaaaccatttgccagacagatgatggtatgatgacatttgtttttgtttcttatctgtttcttccctccctatcacttttccctttcttgtctttctctcttggcccttctttctacctgcttatccttttgcttttcttcctctacaattctactctccttttcctgtctcttttccaatctatcctcattccctcctcctgcctcctctcttatcctatacttatggctgctcaacttctgtctattcctctttcctctctccttcccacctgcctgttcatcctatttctctctcctgccgctctatccccattttcctaccctgtccttgtcttctcgtgttgtccctctctcctcttcgcctttcccctatcacctcatccaatatatgtccctttcttcctctctgccccatgtcttgcagggatttgacccattccgattcggagtcctccctccacatgagtgaccgccagcgtgtggcccccaaacctyctcagatgagccgtgctgcagacgaggctctcaatgccatgacttccaatggcagccaccggctgatcgagggggtccacccagggtctctggtggagaaactgcctgacagccctgccctggccaagaaggcattactggcgctgaaccatgggctggacaaggcccacagcctgatggagctgagcccstcagccccacctggtggctctccacatttggattmttcccgttctcacagccccagctccccagacccagacacaccatctccagttggggacagccgagccctgcaagccagccgaaacacacgcattccccacctggctggcaagaaggctgtggctgaggaggataatggctctattggcgaggaaacagactccagcccaggccggaagaagtttcccctcaaaatctttaagaagcctcttaagaagtaggcaggatggggtggcagtaaagggacagcttgtccttccctgggtgttctgtctctccttccctcccttccttcaagataactggccccaagagtggggcatgggaagggctggtccaggggtctgggcactgtasatacctgccccctcatccttgggtccttcattattrtttattaactgaccaccatggcctgcctgccctgcctccgtcccaaccatgggctgctgctgtcactccctctccacttcagtgcatgtcttagttgctgttccctcagctcccagctccacctctggggttcagcttctgtctctgctgtcccagttttgaggtttggtttcttgtttctgtctcttgctttcrggctcctccctcccaccactccccaacttcccctagcagttgcagggaagataggacgagtagcttctgacatgkgtgcctcagatctgttccaccccactcacagtggttctgtttgctccagactggggctagggcctaatctttgaagtttgttctttggtattgatgtgggtcagaaggagcctcatcctaatctcactcaggcctccagggatccatgggggagtgaaaccaattctcagagaacaacccaccagagacttttaaagagaggccaggcttgggaatgggttgggagaggcatctgttcattggagcatgagtggatgccagaactgtaggttataaggcagtcactttttctctctactcccacccacacctgcctccctcttacccctgctcccccacactgcaggaggatttgtctctaagaggtgctgccccaaagctccccaagcatcaatactcctagggctcaggacaagtggctcccctggccaggagagccacagccatgatacagggctcttatggagccctggagttgttgggcaaggatgctgtcattttttgaaccaaaagacaaacaggttaaaaggaaaaaaagtaatctgaatttcccaagtgcctacgctgcatattccccttgttagatcccattttcatgttactttgtagccttggcyagaggctcaaaaaggacacaaccagtttggggaaggggtggctaaggaagatggtataggtgaaggcggctgtgtgaccactttcccccacccttcccacyctctagacaactctctcccttacctgtttttgctatggctgtaaaggtatttttcctctgccccactccctgccatacctttatcctgggatcctattttgggcctggggtgggtatacctggggctggtcttaggagggtgctaggctgcagactgccttgtactccctggacaccctcaaatggggttttctgtgttatttcataaaattctttgaagtccaataaagcatgtaggagattttaaccactgctggctttgactctcattgtgttctctgtgctgtggcatgatgggataaagagacaatctttcctttgcccagggaaaatgaaacttgaatgcacatacccagaagctctgtgggcagggttaccagataaatgcaggatgaccagttaaatgtgaatttcagataaacagtttttaaagtataattttctctcatgcagtatctgggacacatttttatttgctaaattgggaaaccctatgtctgggtaaacttgaccctatctatcctataacttcacttacgacttttaaaaaacatatctatttaatttttctttctttttttttgttttttttgagacggcgtctcactctcttgcctaggctagggtgcaatggcgcgatcttggctcactgcaacctctgcctccagcgttcaagcgattcttctgcctcagcctcctgagtagctgggattacaggcgcgtgctaccatgcctggctactttttgtatttttagcagcgggggggtttcaccacgttggttaggctggtctcgaactcctgacctcgtgatctgcccgccttggcctcccatagtgctgggattacaggagtgaagcaccgcgctggcctamtttttctattttttgtagaaatggggtctcactatgttgcccaggcttatctcaacacctggcctcacatgatgctcccgccttagcctcccaaaatgctgcaattacaggctcacttacgactttccatgatttttgaaattacttcacagggagcctgggcagcttctggagggcagtgagaaaccaacgaaaaggcttcagggaaaagatgccacagatgaaatttcataaagatcgctttgggtagcccaaatcagaagcttctacaccagccttacatattacggttctcatctattcttattctccactctaagtcaccaagtccatcctacctccacaaggcaaataccctgtctctgccaccatccactgaagaaccctaaaagcaaatgggtactgaccctgccctgcttaaaattctctcagggctctgatttgcgtcaggataaaatccaaacgccatcggccttgcgcggttttcttccagttccagagtgtcagtcctctggccgatctaaaagccctggggctccaagctgcccacggctgtggagcctgggctggagcccacagcggacggcagtgttaggattattataataaatgtcagagcaagaaaaacgttcccgccggttaggttttgttatttcaaaaataaattaaccgcctttcctccggcggagacgcgcaggtgagagggcggcgcctgacccagcgggctctaggtgctacgccagggccccgagggtcccgaactcggcttgcccacacaaaacatggtagcaggagagcagcatttccgccgggcatgtccatatccaatggggcccatgggagaggcgtagtcttctgggtcttgcccagactcaacatggcggctacacgtcgcctgtcagtctgtgaagcctaccccgggcgtgggccgcagcgtcgagtaacgtcattcgaaccccgtcgcgcccctttgtgcgtcacgggtggcgggcgcgggaaggggatttggattgttgcgcctctgctctgaagaaagtgctgtctggctccaactccagttctttcccctgagcarcgcctggaacctaacccttcccactctgtcaccttctcgatcccgccggcgctttagagcsgcagtccagtcttggatccttcagagcctcagccactagctgcgatgcatgtgatcaagcraggtragggggggacraggtgggcgagaaggaaggtkargggatgcgggctgccgccgccggagctgatgcccagmccgcccgcccgccttcgctgcttcccgcctttcccgcatttcccgccgcggccttccgccctgtcagcccgctcggccttctgtcttcagtcagcctgccccgaacctccttcgggccttcaggctgcgccccctcggctttgtcatcctgccgcctttcaaaaggataacacttaccccgtatcgagtagtgactgcgtacgccgagcacttgccaggcactattttattcctccctgcaagcctctgagagatgattagcttattacagatgaggaaactgacgctcagagcgaggtgtcgccgactgacccaaagtcacccataggtgacaatacagtttgatttgaaaaccgtggggttggtgagctgtcttaggcacagggtcggggggcagctaggaaagaaggagggggcctctctaccctccgtaggcacttgtcagtttactgatctcttttgtggggtgaggataggagtgtggcgtggaaaaaacagatcccagacagacagcaccctcgagttcctttcccttcatgggaagagatgctgaatcagagaagggtggctgagacatcttctgacaagatggggactgggaagagtcaggaactcgtattctttctcaacagttctttttcattagacttgccaagtgcccgctttgtgcccagccctttgcttggctttgtgagattgtaggaggagacagtccctgccttgggaacaggcttcatcgggttggaaaaacaagagcaacatacttttaacaaccgcatgagatacgtatgaacaagttttgagttgaacctacttgccyttgttaaagcaatacaatgatttcaaaattgtaggcacttagtaaatactggttaatcgactggttgtttctattttgtcctctaggctgtgaacatttcaaagatggagacttgtttgagacagagtcttgctctgtcacccaggatggaatgcagtggtgtaatcatagcttactgtaaccttgaagycctgggctcaagcgatgctcttgcctcagcctctcaagtagctgggactataggcatgcaccaccatgagtggctaatttttaaaaatttctggtagtaaaggagtcttgctgtgtttcccagtctggccttgaattcctggcctcaaaccatcctcccttccttggcttcccaaagtgctgggaatacaagcaagatggagacttttctgttcacgtttagcacaggacctgacatgaacagattcttaaagaatgaatgaaaatagttgtatcaaaatgtaggacacgatgaatgctgtgaataagcaggtagttgatttggtttaactacagccaatgtccagattggtttaactacagasaagagttggaaaggtggacagtagtggcctttcttgtttttggtatcttgagaacatcattctgtgaattttcctagctcacattttagctgaccaaagagcaaaataacatagtgcacttttattgatccattcataagagtgagagctgagcatctatttttgtatttttatttttttacattattatttatttgtatttttttagagaaggagtctcgctatgttgcccaggcttgtcttgaactcctgggctcaagcattcttcccacttcagcctcccaaagtgcttggattacagtgctgggagccaccgcacctggcttgagcatctattttttaaatctttagatatgggagagatgtttaggatggtctatgataagtcagtaacaaagatgaattgaaaatgtatggacttagatgaccagaatgggtaaaattcaaccctgtgttgaattttgaacttttagagtctacttctaaatactttcgtttaaaaagtgctaccttggcctggcgtggcagggcatggtggctcacgcctgtaatcccagcactttgggaggctgaggtgggtggatcatttgaggtgtggagtttgagaccagctgggccaacatggtggaaccccgtctctactaaaaacacaaaagttagccggacggtagtggtttgcacctgtaatcccagctactyaggaggctgaggcaggagaatcgcttgagcctgggaggcagaggttgctgaaatcgtgccattgcactccagtctaggcgacagagtgacactctgtctcaaaaaaaaaaaaaaaaaaaaaaaccacaaagtgctagctataactagctctaaaaagcagagcttattttctcattccttcatagagcacaatttgatccaratggttcatgctgtarattctgccattgtagcattcagcaagacttaatatacaacatgtacttagatttgtttgtttctttttttttttatatttctatgtttctatattttaatgttttttaatatgcatagggtttttggttttctggactttttttgtacccccttatttttggcatgtcagtggaatagcagactaactcctacagtttttgttaattttctttgaratggggtcttgctctgtcatccaggctggagtgcagtggtgtgatctcagctcactgcagtgtctgcctcctgggttcaagagattctcctgcctcagcctcctcagtagctgggactacagatgtgtgccaccacgcctggctagtttttgttatttttaataacaagggcaactggaagttgactttgaagtmcctactgaatatgctaatgtcttgctaaacactgtgagggcagtaatggagaaggcagctctatcttcaaagaacttaaaattgttagggatttaggaacaatccatatgaaaattattagatagaagagaatagtagatgagtttttttcatctgctatcttgagctatttttcctaatgggagagtatcattcctcaaggagattatggttaaaaaaataaacattgagaaccattgcagtaaatgacaaagtagctaactgagttgtaaactgttttggaatttagtgtagtattttcaaaactttggattgtaactcacagtaaaaaacaaaacattttacagacatgtgtatatatgtggatacacataaaatgatacaaaagtttacgaaataatgtctttgaaagcatccatttgcactctaatctttcttttattccagattctttccctatccctgcctccctccctcccttccttcctccctttcttcctccctcccttccttccctccctccttgcttccttccttcctttctccctcccttctttcctgccctcmtccmtccctcccctccctctccccctccctccgtcccttcctccttccttccttccttccttcctattccattcacagcctgctatattattttacaactctgtggataccgtgctgttcaccgggattgcagtgatgagtaggcagacatggttccagcttccaaagatcctacaatcaattgagaaagatagacaaataaagaagtaatatgataaaatatgataaatactctgataggtaaagtataggcagtagaggccattcattcagttattcataaagcatttattcagcacctctttgtgctaggaaccgttgtaggcattagagattctgcagtgaacaaagctaaattacatttctcattgagttgacwtcttggtgtgggtgggagtggtaagtgtatataagaaataagaagtaaacataataatcagttaatttcagatactgattaatgagatgatagtaaaacaggatcatgtgataaagatgaatgagaaaataaccttggattgggtagccaggaaaggcttctctgagaagccaacatttgagctgaaccctaaatagtattaagagctagtaatgtgagatctgtggcctgaacattctcggcagagggaattagaaagtttgtatcctgtggaaaaggcacgcatccttggtcttacaggattagggaagtcttcctgaagagagaagaatgaaagacagtttatagccaagaggaaatcacactagtatgctagaggattttttaattttattttttattttttgagacggagtcttgytmtgttgcccaggctggagtgcagtggtgtgatcttggcttactgcaacctctgcttcccaggttcaggcaattctgcctcagcctcccgagtagctgggattacagcatacccagctaatttttttttttttttttktgtatttttagtagagatggggtttcaccatattggctagactggtctcgaactcctgacctcaggtgatccgcctgctttggcctcccaaagtgctaggaatacaggctgagccaccatgccctgctggctagaggattttaaaagaggaaaaggtcagtgtgagttaaaagtggttgaggcaggttttatggaggtgtgagatttggagggtgagtaggagttagatgtatggaaaggtggaagaggaayctttaggcagagtaaggtataagcaatgatgtggatatgggaatgggaagcccycttgggacttatatttcacagggaacagttgaagagatctggggccaaactaagaaaggctttgcttgagagaagaggataatgtaggcagtgagaagcagggattagtgatgtgataaaatcaacatctggcttgaaaaactaaccaagtggaatgacagaatagagaactgtgtgtcattggacctttagatctttagtctgcctcctattttcaagtgtgagttaagataattaccaatgcacttttttttttttgtcagtttcctgattgacttcagaacttctggcagttgtagaattttctttttgctaagttgctttcccccccccactgcatgtataattgcagaacgctaatgttgctttgcagttacctgcctgcttagttatccaattgctagagcactgaggtttcagtcccagtgccagccagttaatttaccccatttcagagttaaatgctgcagatgtgagcctgatgagaaaattatcacaatggtgatcagaaagagaggggctaacatatcagtgtagaagaaaaagcaacttgttctagtgataatgggttaatagtgatgtcttattgttcatttattcttcatcaaatgtttgagaacttgccttgttctaggcactaaatttgagaatacagatgtgaatcagagggccaaataaatgtaaacatatttagcatgtttcttattggttacttcaggttgagtatcccttattcaaaatgcttgggcccagaagtgtttcggattttggatttgtttcagattttggaatattcgcattatacttactggttgggcatccctaatcagaaaatccaaaatctgaaatggtccaaggaacattttctttgaacattgtgttggcattgaaaaagttttggattttggagtgttttggattttggaattttggattaaggatactcagcctatagttacaatggattgtaggtgcacaaaagagacaaaaactaaatcagtgtgagacactaacatttattgagtgcctattgtgtatcacatactgtgattttttttcccccataggagcagctttattttataacgaggtatagttgtaactatgccaaagttgttacaacaaaagcactttttaccttatctaattttattgtcacagtaaactgattaggcaagtaaaatagatataataattaacccctttctacaaatgaagatctgtgaaatgactgattgtgttttgtggcttgtctaaggttaaggctgtttggtggttggatatattcactattcctggtaagaataaataaaggtcggatgagctactatttgaggttaaactaagagtagtaagacttttttgtctagaaggacaaagatataatctaagtccaaaatcatgaaaaatattaggtaaaatatatagtatgtcagatggggtaagtgcaatggagaaaaagcacagaaggggaagggggataagaagagcaagggtcctatttggggcattgcaatttaaaatggaatcatcagggaaagccacattgagaaggtgatgacattgagcaaaagacctaaaggagatatatagcaagaaggccaagttgtcaaggtacaataggaaggaaggtgggagagttggaggtgaaattgggaagtgggtgcacaggacaagtggtataggattctgtggatttttttttttttttagttggagtttcattcttgttgtccaggctggaatgcaatggcgtgatctcagctcactgcaacctccgcctcctgggttcaaacaattctcctgccttagcctcccgaatagctgggattataggcccctgccaccatgcccagctaattttttgtatttttagtagagacggggtttcaccatattgatcaggctgatctcgaactcctgacctccagtgatccacmcccccmccccgctcccttggcctcccaaagtgctgggattacaggtgtgagccactaggcctggcctgtggattgttatamcaattttgacttttattctggagatcataagccactattaggagttttgaaggaggtaatgatatgattctgagtttaacttttaaagggtaattttggctgccatgtgggatgggggaaaaatttaggaaattatccgtaaacgtctgtctgtatagaattcatactctttgaaggtgacatcagagaagacaatctcttcatgaatcttttgagggggcctcaatcttttctgtgaaatagcacttcwtgttggtcaatttacatgttaattacatttgattctttgacattgtagtcttaataattgctaacatgaatttaataattgctracatgatttgattctttagatggccgccaagaacgagtcatgtttgacaaaattacatctcgaatccagaagctttgttatggactcaatatggattttgttgatcctgtaagtaaatatggtttttatcttgggttccttstttcatgtgtttctttccatttgtctcttatccctggaccttcattcacctgatatactttggtattctggctatgcccttsgatataaaatttgaattcattgcttaaaacatttttttttccttaattttggttctgtcctgtgagttctcacttttcagagaactatgaatgtgagtaaagaggaaaatttgatattaacatttaatatcagatatttccttgagtaaattgttttattcattagtggaaaagcctaggccaggcgccgtggctcacgcctgtaatcccagcactttgggaggctgaggygggcwgatcacctgaggtcaggagttcaagaccagcctggccaacatggtgaaaccccgtctctactaaaaatgcaaaaattagccgggcctggtggtgggcgcctgtaatcccagctacttgggaggcaggagaatcacttgaacctgggaggcagaggttgcagtgagcygagatcgtgccactgcactccagcctgggcgacagagcgagactccctctcaaaaaaaaaaaaaaaagggaagcctagagtaaagcttgttttggaattgtggttatttaggtagggactggtttaaaatttgttttttgttatttatgtaaaaagatttaagtaatataaagtagatttcatggacaatatttaagtcaagaacaaactattcataaaccagttgctctgcttttctccttatcctttataacttctgtattctagactctcatcatcagytatctggactgttttctgtggtctctgcagtgtcctggacttcctctaatcttaccctcttcaaactcgtcttccacctgacttctaaaatgatcttccttaaatgagaatctctaagaactctttttttcaaatccacccatatttccgtctccttatttaggtatcttatccgcactgctaaggtatcttaggtatcttatccgtaaaacctgtgctcatctcatagctttaatcatatagtatggaaattaattatggatctttgtcctcccctagaattgaggatgggctgtgtatcttattcttgtgatatcctcagtgcttgacatgtatctaattagccacttgaccaaagtaagtttggtcaagagaaaatgattttatgtatcttgaaaatatgtttattgtaaattctcttttatattgaggacttaggcaataattagaatagtagaatgttagagttggaatgarcttaagartccatcccatttcatctttggtttatagataagaaagttccaaagagagaggggagtgacttaagttagtgggagtgtagggagaagcacctaggtctcttgactcctacatgttctattgcctcatgcagtagtacattttagagcgcaagaatgttgcagcatcctcaaacttcctagggtagattctgttgaaaaactgtcggtgcacatctgtaatcccagcactttgggagactgaggtaggcagattgcttgggctcaggagtttgagaccagcctgggcaacatggtgaaactgcccaggtgcagtggctcaatcttggcccactgcagcctccacccctggggatcaaatgattcttgtgcctcagcctccctcagctgggattacaggcatgtgccaccacgctatttttttttttttttttttgkatttttagtagagacagggttttgctatgttggccaggctcgtcttgaactcctgacctcaagttatctgtccgccttggcctcccaaagtgctgggattacaggtgtgagccacactgtgcctgccctcaaccctgtttctacaaaaaaaaaaaaaaaaaaaattggttgggtgtggtggcgcataccaktaktcccagctacttggtggtgggaggatcgcttgagccctggaggttgaggttgctgtgagctgagattgtgccactgtactccagcacaggccacagaatgagaccctgtctcaaaaagaaaaaaagaaaaactgtgtgctgttagatctggcacagttagcacacagatggtattttattctgagttctaattgtttgccttattgctctagaaactatttagaagacttcactgctcttatactgaacacaccttatctgctggatctgggaagaaagtgatcaggagcaacttgggcttagctatattataattagaatagattgcagactgttaaaatagttacacacgtatgtgtctttttttgaggggagtatgcattgttcagctgggaaacacatttattttctgttggattaagcggtttcttaaagattcaataaataaaccactcacaacttagaatttgtttttcttaaaaatgtatgctaataccctgtgcattacctgtcttaaaaactggaacttataatgtggccttgraaacagtgaaatgcagtgaggtttaatgggattggggccagaagacttgtataataatataaccttgggcaagtctcagtaacctgagcctcaggttcttcatgtaaaataggtataktaataatcatctcacaaagtgattgtgaaatgtcagagattatcaaagttgataattacttatcaactttggttgagaatcatttgaacctcgggggcggaggttgcactttgtaattkgtgaagtgctaaagaaagttgtcattaaattatcataattcagccccagacctaatttatacttctgtctcctttaattggcctgattaaagtttgattcatttgcttttctgtacttaccttatgtggaatttgggaaaagtaagtatggagctggagccctgatcacttagggagaatctgaatgaaaaatggggaaacccttatatagaatcagtctgttgggagaatttgaatgaaaaatagggaaatatagaatcattagtatgttttcagctatttccctgtgagactaatcgatttaaaggctatacttagattttttttaatgacactttcattttatatgtagtatacattttctgatagttctgctggattatgcattctcattactaagtttcccactgcccaccattctgaaagataarttttcagagaagtaagttgtcttgttctttgtttgagacagggtctcattgtgtcgcccaggctggagtgcagtgccatgatcatagatagctcagtgcagtcttgacttcctcagcacaagcaatcctcccacctcagcttaccctgtagctgcaaccacagtcacttaccaccatgactggctaatttttttatttttagtagggatggggtctcattatattgctcaggtttgtcccaaactcctgggctcaagcgagcctcctaccttggcgtcccaaagtgttgggattacaggtgtgagccactgtgcccaacctgtcgtttttattgtgatgtgaatttgattgttttcttttttctttccttttttttttttttttttttgagacagggtctcactctgccacccaggctggagtgcagtggcataatcacagctcattgcagcctcagcttcccgagtagctgggatcacaggtgtgtaccaccacacccagctaattttttttattatctgtggagattgggggcggggcagggtggtcttcctagcttgcccaggctggtctcgaactcctggactcaagccattctcccacattggcttcccaaagtgctgtgattatgggtgtgagccacaacgcctggcttttttttttaatagtgtcgtgaactgctaagcttaagtgatctcctcacctcagccactgagtagctgggactataggcatgtactaccacacctggccatgatggttttcttaattactcttttaaggaagctattgtttcttgggaaagctcaagtaattcttggttttatttttgtaggctcagatcaccatgaaagtaatccaaggcttgtacagtggggtcaccacagtggaactagatactttggctgctgaaacagctgcaaccttgactactaagcaccctgactatgctatcctggcagccaggatcgctgtctctaacttgcacaaagaaacaaagaaagtgttcagtggtaagtctggggtgaaaaagtaaaaatttagtactctcagaaaagtaataagggtactagaaataaatcttgactgtttaaagaagcaaatatggctagatggggtggcttacacctcgaatcccagcaatttgggaggccaaggcaggcaaatcgcttgagtccaggagtttgagaccagcctgggcaatgtggsgaaaccccatctctacgttttaagaaaaatctaaaattataaaatagactaggtgcagtggctcacgcctgtaatcccagtgctttgggaggctgaggcaggtggatcgctgaggtcaggagtttgagaccagcctggccaacatggcgaaaccctttctctactaaaaatacaaaaaattagctgggcgtggtggtgggggcctgtaatcccagctactggggaggctgaggcaggagaattgcttgaacccgggaggcggaggttgcagtgagctgagactgtgccactgcactcctgcctgggcaacagagtgagactccgtctcataaataaataaataaataaataaatagcaaatatgtaaattagtgggaaagagcagactacaatttcgtatttctccatgctgcctatctgctgcataaaaaggttgatggatctttgttctttttttcattttctctttttaaaatttttttattttttttgagataaagttttgctcttatcgcctaggctggagtgcaatggtgtgatttcggctcactgcaacctccgcctcccgggttcaagtgattctcctgcctcagcctcccgagtagttgggactacaggctcccatcaccacgcccggctaattttttgtatttttagtagagacgggtttcaccgtgttagccaggatggtctcaatctcctgacctcgtgatccacccgcctcggcctcccaaagtcctgggattacaggcgtgagccaccgcgcccggcccaggaatctattttaaactacaagaacttataatcactttaactctagaagattgtttccttaartgaggcattacatatttcttcaacatatatgtgtttattgagcactttatatgctaggcattgaggtgggttgagatgacaaaaagggttgagaaccactgttttcaactattacctaaagattgaattagctgttaagtggtcttgatatattttcattttttgttgtattttttagatgtgatggaagacctctataactacataaatccacataatggcaaacactctcccatggtggccaagtcaacattggatattgttctggccaataaagatgtatgtataacacttatctggtggaaattttttgagagtcttttttaataatgcacacattttagaaaatttaaacactrcaaaagatacaggtaaatactaattctgtttcctaccctgattcctgattttcctctctagaaacaactttatcattttaaaatgtatttttccagagctattttgtacatacgtgtgtgcatacatgtgtatgtgtgtacatacatatttttcttctcagtggtactgtactgtgcatacagttttcattgatactttcttcacttgtaagtatatcttgtttgttctatatcagcctttatgaatttacccttttttataacagttgtataaygttccattttgtagatatattgtcattgtatgtatgtgtaagaattcctttagtgatcaatatttgtttttcatcttttcactgcagtgaatattcttgtatggtaggtgttttgctcatagatgaatatatctgtaagataaatcccttcagtagaattgctgagccaatgtgtatatgaattcaaaattttgataggcattgccaaactgactcccaaaaaggttgctcaggtaaaattttacaagctcatgctcagcaacttaaaaattatccacttgtgtttgaacctgtttcttaactagatgccagaggacagaagggaaaagatgtagcctagccagcccttttacacacaggatttatttaccgtgtatatctggacagattagagaccagttttaactttaggtaatataatgattaggccgggcgcggtagctcacgcctgtaatcccagcactttgagaggctgaggcgggtggatcacggggtcaggagatccagaccatcctggctaacacggtgaaaccccgtctctactaaaaatacaaaaaattagccaggtgtgggagctggtgcctgtagtcccagctactcaggargctgaggctagagaatggygtgaacccgggaggcggagcttgcagtgagccgagattgggccactgcactccagcctgggcaayagagtgagactcagtctcaaaaaaaaaaaaaaaaaaaaagaatgattaattgactatctctctaaacatgtatctgatgttaaagagactaggagaaaactgagttgtttgtgtgttgttaatttgtgtaatctcgaagacaagttgaagacaaaaatacagcagcagcaacagcaaaacctgtgtctaaaaatatacctattgatagtcaagtatttcagttctctaatattcacactgggcccatacctgcctttggcaacaaagatgaccttaaaattttaagagaaaaggaaagcaagctttcgtataggtttttctagtccttagatatggatcattatgtagaaacactgtcagtattttgaaaacctggctccttttttttctctccaaaatgattatttgtacgttattgcttttattttcctctgaatgactttgtagcctacaaaaactctgtaacaaggaccagttatgctctaaaatcttactgttacaatagttctttgttggaaacttgttaaaggactatagattttgaagagcctcagaattaacataagcctgcttcctgtcattgtttattatatatactgttatatacagtttgaagtaggctagcttttaaaataaatatatatatatattagtaaatatgtggtaccaatacttttggattaatagccaatctaaaaacatgtttaaggatgataatatagtcccatttatgstcatgttttttccctctttcaaaacatactataaacataatagtaaaagtttggaaaatcacatttaatctcacaacatatatttatgtattatcttctagtgttttcatatacatgtttttaaacctaattaggatacttaatttatatgtattgtttcttttttttagaatgttagatggacttctattctacagtaataatgcttagtgttatctcattgtatcctgtgttgattttagttctggagtcagggccgagagataagagattttgtgaaaataagtaattattttaatttaattatgggttctttttcacccctatcagcgcctgaattctgctattatctatgaccgagatttctcttacaattacttcggctttaaggtaaataatgggtttcaagtatgtgggaatttatacttaaatcatgaaataaaggattttgtttatgttttggtgacagttatcaaggccataagttgtttggagttgagatggacctggggaattagtggggttaaggtagcagtggtggtttgaattaaggcaaaggtagcttatctatttgcagtttttgaattttccacatattacttctggattacctgaggagttatgcagataaattaccataagtatttcataacattctaagtatttttgcgttgataggcagtatagtatagtgtagtgactgagaacatgaatgtcagtgtccacctgaattccagtctctgctctatttcttattagcaagttatttaatctctctgtgcttgtttcctccattttagaatggggagaatataaaatttcaacaacaaatttaattaaaaaaaaattttttttttgagtctgtgtctcactgtgttgactaggctggagtgcagtggcgcgatcttggctcacttcaacctctgtctcccgcgtataagcagttctcctgcctcagcctcctgagtgactgggactacaggcacacaccaccatgcccagctaatgtttgtattttagtagagacggagtttcacnnnnnnnnnnnnnnnnnnnnctccagcctgggtgacagagtgagactctgtctcaaaaaaaaaaaaaaaaaaaagtgcctgtaacagaccaggcactgctctaaacaacatatacactcatttaatccgctgaggaatccctgatgtatatgttgctcatttaatccccatgaggagtcttcaggggattaaatgagtgtaacgagtgtatatgttgcttagatccgtgcctagtctgttacaggcgctttttaagtgttagctgttgtgaagttgatgatgatgatgaatactacaacttctgttaatgtgtgtagagctggctttttccagaaattttcatgcagtctctgccgaaacaaaagtgccagtgaggaggctgagatgggaggattccttgagcttaggagtttgacaccagcctgggcaacacagggagaccatgtctctacaaaacgttttaaaaagttttttttaaaaaaagtgccaatgataattctggctaacatgacgaaaccctgtctctactaaaaatagaaaaaaaaaattagctgggcctggtggtgggcgcctgtagtcccagctactcggtagcctgaggcaggagaatggcatgaacccgggaggcrgagcttgcagtgagctgagattgcgccactgcaccccagcctgggcgacagagcgagactctgtctcaaaaaaaaaaaaaaaagtgccaatgataatgttccagatgaagctaggaagagtaaatgtgctattcttttcatttgaaattttatagaaacggcgaagatttaaagagattgccttattgtggatgatatatccactgcgtctttaaaaacggtgctctgaaaattttttgttgtttctctctttctagacgctagagcggtcttatttgttgaagatcaatggaaaaggtgagaaatgaacatgtttgtctgttacattttctactcattatattgaatgtatagctttgagctataagtcttaatattcttgcttagactctagataacattttggactttaggtttagtttgtggataattgtcctgtttattagtataaagtttttctagtttccttttggtgtccttttctgaaattcaaatacgtatctcaacctactttttctgacgtctcatcatgtgaaaactcctcttttgtctatagtggctgaaagaccacaacatatgttgatgagagtatctgttgggatccacaaagaagacattgatgcagcaattgaaacatataatcttctttctgagaggtggtttactcatgcttcgcccactctcttcaatgctggtaccaaccgcccacaactttctaggtaggtgttttgagtagggaaatamgccttgacctgaagaaactgggcagttagttcatcacataaaaaataatttaatgaccttttagtagctgcctgctctgattaaatgagatttagattctggaaagatctctgactgtaatgtggtaaatgaattggagaaaaggcaaatgcttataacaaaaatgttctaaaattgattggattgtggtgatggttacacaagtctatgagtatattaaaagccattgagtagtacactttaaatggggaattatattatttgtgaaytatattcctttttttytttgttgttgagacaaagtctcastctgtcacccaggctggagcgcagtgttgcgatcttggctcactgcaacctgtgcctccttggtacaagcaattctcttgcctcagcctcctgagtagctgggattacaggtgcccgccaccacacccagccaatttttgtatttttagtagagatggggtttcaccatgttggtcaggctggtcttaaactcctgacctcaggtgatccacccgccttggcctcccaaagtgctgggattrtaggcatgagccaccacgcttggtgtgaattatatttcaataaggttgttttaaaaagaaggtaagtgccaagaactagttaggggactcttatagcagtttatataagaaattgtggtagtctagattagggaggtgaaagtagaaattgacagaagcagatagatcaaargatatttagggccaggcatggtggctcacatctgtaattccaacactttggaaggctgaggtgggaagatcacttgaggtcagaagttcaaggctgccgtgagccatgattatgccactgcactgtagcctgggcaacacagtgataccttgattaagataaaaatatatataaaagatatttaggctgtcaaattgacagaatatgggtcaagaatggttcttgcatttatggatacagtaagtaacaggattaatgatgatgccatttgttgagaaaaggaacactaacggtctggtaatacattaaaaaaaaaaatatgccattatcaagttggtttgtttcaggaattcaagaacatggtaacatcaaaaaatacattaatgtaattcattgcattaacattttatgcagtttaatgctctttcataataaacactttagcaaaattgatatagaaaataacttccttaatttggcaaaagatacccaataaaaacctagatgtatcgtctcttttttcagcatggtagtggaggcctgagccagcattgtaaaataagaaaaagaaaagattggaaatcagggaacaaaactgtaatgatttgaagaaatgatttttacataggaaactcaagagcatctgcagacacattattagaaataaaagatttcagcaaaatatctggatataggttcaatatacatcaatcagttatgtttctgtactttagctgttagaaaattaagtcttaacctacagccatgcattacttaacgatggggatatattctgagaaatgtgttgtaaggtgatttccttgtgcaaacattatacagtatacttaggtaagcctagattgtatagcctactacacacataggatatatggcatggcctgttgctgctcataggttacaaacctgtgtagcatgttactgtactgaatactgtaggcctttgtattaccatggtaagtatttgtgtatccaaacatatcacagtaaaagtaccctataaaagataaaaaatgggccaggcgtggtggctcacgcctgtaatcctagcatgttgggaggccgaggcgggcggattgcctgagctcaggagttcgaaaccagcctgggcaacatggtgaaaccctgtctgtactaaaaatatagatataaaaaaactagccaggcatagcagtgtgcacctgtagtcccagcgactcaggaggctgagacaggagaattgcttgaacctgggaggcagaggttgcagtgagccaagatcgcgccactgcactccagcctgggcaacagarcgagactccgtctccaaaaaagaaagaaaagataaaaaaaaagatacaaaatgatacatctgtataggacagttatcatgaatagagcttgtaggactgaaaattgctatgggtgagttagtgagtgagtggtgaatgaatatgaaggcctggctgggcgtggtgggtcatgcctgtaatctcagcactttgggaggctgaggcaggtggatcacgaggtcaggagttcaagaccaacagggccaacatggtgaaaccctgtctctactaaaaatacaaaaattagctgggtatggtggcaggcgcctgtaatccactacttgggaggctgaggcaggagaattgcttgaacctggaaggcggaggttgcagtgagccaacatcgcaccactacactccagcctgggcaacaggagcgaaactctatcttaaaaaaaaaaaaaaaaggaatatgaaggcctagtacattactgacgactgtagactgtacaaacattgtgcacactaaatttattttaaaaatattttcttcaataataaattaaccttcgattactggatgaccactgtcgtatgtgtagtccatcgttgactttttttgtttgtttttaagacagagtctcactcttttgcccaggctggagtgcagtggcatgatcttggcttactgcagcctgcacctcccaggtccaagtgattctcctgcctcagctttacaaatagttgggattacaggcgtgcaccaccacacccagctaatttttgtatttttaatacagacggggtttcaccatgttggccaggctgatctcaaactcctgaccttgagtgatccgtcttccttggcctcccgaagtgctgggattacaggcatgagctaccatgcccggttttttaagttttttagaaatttctctaaaacatgattaaaggacattaaataataaataaatggaatagattcaattttataaaaatgtcagtttttcccaagttaaaatatagattcaaagtaattctaggcaaaatctcaacatactgattctaaaattcatgtgaaagagcaaaagactgcccaaaaatgtcaggtcgaaattcctggaacctgtaaatgttacctgataaggaaagtggtctttgtagagatgataaggattttgacatggagagattatcttgaattatgtgggtgggcccttaatccaatcaaaagtatccttgtaagagagaggctgagggagataacgactcacagaaggggagaaagtgatgtaaagatggagggagaaattggagtcatgtggccacaaaggagagcaattagccactaaaagctggacaaagcaaggaacagattctccctcaaaacctctggagggagcactccaaaaaaaaaaaaaaaagtgagttgcagacattgtgactcttgatacctccacttacctttttttttgagatggagtttcgctcttgtcacygaggctggagtgcagtggcacgattttggcttactgcaacctctgcctcccgggttcaagcaattctcctgcctcagcctcctgagtagctgggattacaggcacgcgccaccacacccagctaatttttgtatttttagtacagrtggggtttgtccatgttggccaggctggtctcgaactcctgacctcaggtgatccacctgcctgggcctcccaaagtgctgggattagaggtgtgagccactgcgcctggccctacttccacttatatctcgataggagaatatataatatgacctcagagcaaaacaccatagagcaaaacattggaaaaattgactacaattaaaaacttctgtgtgaaaggcaatggaagggcaccgtggatcaataaggccragaggcgagacaaagagggcaaaaatcttctttattgagctctcgggcgaggttcactggtccgcagggggagggccagggaagtctcgctgtgccaaaggtgcagcgygcttttatggatgctgggtgaggagtggtcagggtaggggcagggtcggttgagtttcacgcttctgagtgtgacacgccctagtgggcatgtgcgttagtcggggtggcaggaacaggaaaggtgaacccggaaatgctgagtcagggtgtccgaggtggcgatcgccatcttggagtcttcaccggagtccaatcactgtgaaccaaaaacgaagtcaaataacaagtttcacactttgggaggccaaggtgggtggattacctgaggtcaggagttcgagaccagcctggccaacatggcgaaaccctgtctttactaaaaatacaactattagccaggcgtggtggcgtatgcccataatcccagctactcaggaagctgaggcatgagaatcatttgaacctgggagacggagcttgcagtgagccaagatcatgccactgtactgcagcctgggcaaaagagtgagactctgtctcaaaaacaacaacaacaaaaacacccaaaaaaacaagtttcagactgggagaagatatttgcaacatgttaactattgagagattataagaaaaacaaggccaggtgcagtggcttctgcctgtaattccaacactctgggaggccaaagcaaaggctggcttgagggcagaatttgaaaccagcctgggcaacataatgagagcctgtctctacaaaagtagaaaattagccaggcgtggtggtgcacacctgtagatttagctacttgaaaggctgaggtgggaggatcgctcgagcccaggaggtcaaagctgctgtgagctatgatcatgccactgcactccagcctgggtaacagagttaaaccctgtctcaaaaaaaaaraaaagaaaagaaaagaaaaacagaaagccaaatagaaacatgggcaagggctataaacaaataatgcatggaagaagaaacttgattggctaataaaygtctgagatgttaaactgtgcaataggaaaatgaaaattatgtatatatatatttgataaaaatgaaaaggctgacaattccaagcactgataagaatgtggagcacaaggaaatctcatacattgctagaaatagatttgtccatccactttggagaatctttagtaaagtgaaacgtgtatatcttttgacccagcagttcctctcctaggttcatattctacagaaatgcttagagataaacacaaggtgttgtgttcaagaatttttatagcagcattgtttggaattgcaaatgaattggaaataatccagatgttcatcaacaggcacatgggacaaatgttttggtatatttatacaatagaataccttatagcaatgraaataaagtttgtttacatatatcaaaaggattaatttctgtaaagcaatattgaattaaaacaagttgcagaatgataaacagatatgcaaccagaaaaattctaagtgtataacatgtaaaaatgtcataaaggaaatgcttgaaaatgttagaggattgcaatgagggtatatttgtggtgtctaattttttgaggtaggtggcaagtacagagtatttgttacatcattctctatatttttctgaatgtctgaatatttatataaacacctagtcaatagatagaatccatttgcatgattgaatattcaaggcagtgaagagattattgatagagtaaggttcctgaggtggggagcaggatgagatccaaagtgaggtaaaggggttgtctttaaaaagactgtaaaggagctatgattttggtagacrtatcaaagaattggttgacaattggagagattattttcataaatgtktgtytttcttggcttactaacaacctgaaaagacggtgatgtatgtttatgaatatgcatgagaaaatgtgaaaatagcacgtttgcagtctggtgaaaatgtaagccaatattttagacttatctataagacttcctactaggcttatttacttactatctaggggaggcagcaagatgattttaaaatgatatttcgatatgttttattgtgtcatgtacagtaaagtgggttttcttctttgaaaatcatttaggaactttctaaacttcaactcttttttttttttttgccttagtgtctttgtgttgagtaatcatttttgtgactctgcttcatttccttgctctaagttgagacattttttcccccgtagctgttttcttctgagtatgaaagatgacagcattgaaggcatttatgacactctaaagcaatgtgcattgatttctaagtctgctggaggaattggtgttgctgtgagttgtattcgggctactggcagctacattgctggggtaggtttctgccatttgacttttaaagggggattcaagtctaaaagcaaacagattcatggttgagagggcatatgctattttttgggagtcctgggtctctgttaaattactaaatggctatgtgacttggagtgagtcattttacttctggcttcattttcatctatgatattagatatttagatttgactagataatctctagaatcctttttagctcaggttttagaattctggcttattttagcagtaataagagcagttatcattgattgattgcttacygtatgttaagtttgttataaatgttttacatgaggtactcatttgacccttactacaacgctatgaggtaactatgattatagactcatgccaggaattttattccttaaaataaccttgtgaataaaggtaccattgtctaattttacaagtgaggaaattgagacttagaaagttgttactttctgagatcaatcacttaatatgtggtagagccaggattcaagatttatgcattgacactttatgaygtaaactttagccctttgttagtttactgttcaatgggagtcaagataatagttttggatttaaatcctagctccactacttaactagtaatgtggcctagagttagttattttgtgtctgagtttgtttccttttctgtaaggtgaagaaaatatctaactctgtagaataaagttccagaaggaaattattccattatgttgtgttttggaggtgctgtgatatatacagcactttacacagtggtagagtgagctattgctcacttatctttctagactgtttaaaggcttgtgttgggatcagaagggttaaagaatttgatgaagtatcttctagtcgtaggagtctctattttcttaacatcattctagagtccacttattgctgagaatctccttttaccttatttattgccctgatatagctatcgcatataattcttattgtaaattgccttgatttcttttgggaaaaaggcattgtagtagtgtttatattcttttttactctacccaaagtgtatctttatataacgacctttagaagatgtagagtttaaatttagctaccttgattttggatccctttggcctgtaattgttacatctcattataaattagaaatgccatgaggtaacttagtacataattgtaatttattcaacattttgttgattttatttgggcatttttccaaagcagaagtagagatggagagcaggtaaaacttcatagattgctacctagaaattaggcatcttttttgataaaagaatggggccatttttttcttttctttgctgagtgccctctgtcatttctatcatggtctctctttyagactaatggcaattccaatggccttgtaccgatgctgagagtatataacaacacagctmgatatgtggatcaaggtgggaacaaggtatgctccatgaattgaaagtactggaaatcagaactaaaggtgatttagtcatatacacttaagrtggttcatttatgtgtagtttctaattaccttttttttacttgtaaaatcaatttgaggaggtataattattttaatatgcatatactttaaatgtacagtttgatgggttttgacaaatgtatacacttgtgtaatcaccacattgataaagaggtagaacatttccattaccccaaaatcttttctccctcatatacctttacattcagtcacccctgtcacccctacccacacatactttatccctggctctagacagccactgatctattcagctttcttacatgatagttcgtttgcaaagaatttctcaagttgtaattcatataaatttgttacttgaaatggggttgtaacatgtgctctaggtttttctttcgtttttttttttatctctctcttatcacccaggctggagtgcaatggtgcgatcttggctcaccgtagccttgacctcctggacttaagtgattcttctgcctcagccctcccatgtagctcagactataggcctgtgccaccacacccagctaatttttatattttttgtagaggcgggggtctcactttcttgcctaggctgatctcaaactcctaggctcaagcaatctacctgccttggcctcccaaagtgttgggattatgggtgttagccactgcacctcgcctaggttgttcttaaaacaaaaacaaaaactacctggaataacaaaastctccctaattggctggatgcagtggctcctgccagtaatcccagcactttgggaggctgaggtgggctgatcgtgtaagctcacaagttcaagaccacgagttcaagctcacgagttcaacatgaygcaaccccatctccacaaaaaatacaaaaattaaccgggtgtggtggcgaacgcctgtagtttcagcttctctggaggctgaggtgggaggatggcttgagcycggtaggcaggaggttgcagtgagccgagattataccactgcactccagcctgggcggtagagctagaacttgtctcaaacaaaacagaacaaacaaacaaaaactctccctaattgatagaagaaacagtaaagttgagagaattgggttgtttaccttattttatcaacaggatggtttacaactagagtctgccttttgtgactgtaggcacactaatcgcttgttggtttatgaatttctctctgatggactttggggaccttgataagacagatcaactttttgacctacaataagagcatggcttatactgtcaaagcaacttcctttgggctttatgtacatgtcatgtggtgtaaagagagctgggctgttgctgaagaggaggctccatctgtagttcatcatgtcacttyagaaaagttaatcttgtttcacattttgtttatatcattcgttcgtttttactcatagaattgtaaaatattacttttacaattatatatggaaaacttacacttttataatacttttatttatgttatttaattcattgtagtgaaaatcaaaggagatactataaaagtgctttgggagacatgatgtttctttgtttcatttttattctgaagagaattatgatttatttaccactagcgtcctggggcatttgctatttacctggagccttggcatttagacatctttgaattccttgatttaaagaagaacacaggaaaggaagagcagcgtgccagagatcttttctttgctctttggattccggatctcttcatgaaacgagtggagactaatcaggtgagagataggtacttgttggtaatagcaacttgattcacatgagctttctcttttttagtcatcttaagtcatgcttaggaagagcccatatgtgtgtgatgccacagaaggcattctgaacaagttaagagatgccgtgcttgtcttsttatatttctrttctctaaagtagatgctttgtgacctaaatgcttaaaaggtcrtgtataaacaggcagacctagatgtttgggcctgaacctgaaaatgattatttctacagcaaatttccaagagagcttgtaaaagtcaccttatgcttgcagtgtttctaatggattatggttggctatttgaagtttcttatgagtgattttgtcctttcctttttaggactggtctttgatgtgtccaaatgagtgtcctggtctggatgaggtttggggagaggaatttgagaaactatatgcaaggtatgggaaaaatatgaaagaaaacaataatgttttaatcatggtttctcttatttcaggggtccaaatatcaaaagtacttgtcaagaatcttttgaagcatctaagagaaaaagtgactaataattttggtcagatttgcttcctgactcttcaccaaaattgagttgtgtcttcttctttcttaaaactttggaatgtataaataggttcttgggatttttaattgatccttttaaaawttaagatgactagtagggttattattttkctctgtcatatagtacttttgataagctatgctttatgttgcataaaggaatcatgagtgactaggacacatatgtcagtagtttattaaaattaaataggtcaggtgcagtggctcacatctgtagtctcagcactttgggaagatgaggcaggtggatcattkgaggtcaggagttcaagaccagcctggccaacatggtgaaaccctgtctctagtaaaaatacaaaaattagctgggcgtggtggtgcacacctgtagtcccagmtacttgggaggctgaggtaggagaattgcttgaacctgggaggtggaggttgcagtgagctgagattgtgccactgcactccagcytgggtgatagaacgaaactccgtctcaaaaaaaaaaaaaggaaaaaaatttagcacagtcttaagagatttggcttccttagtttttactcctttttattatgaaagatattattggtttagtgggattgcgatcatctgaaggcacctaaaactgcctcattttcccctatggctttagctagagtaaaataaatatcatattcctttttttctttagcaaaacttagagaaaatttaagagttttcataactttatattttaatgtcttcaagttgtctacaataaagtttttttagggaatatatattaaataatattatctgtgcctttcagttatgagaaacaaggtcgtgtccgcaaagttgtaaaagctcagcagctttggtatgccatcattgagtctcagacggaaacaggcaccccgtatatgctctacaaagattcctgtaatcgaaagagcaaccagcagaacctgggaaccatcaaatgcagcaacctgtgcacagaaatagtggagtacaccagcaaagatgaggtaggtagaaaaaattcttcctagagtactaagaagagaaccttaggcagttattatttgtgaattcctcacttgatttcacttgagataagtgaagggagtttgcatagttgtaagcagaagaacactgttaaaggcagagagcaaaggaaggaaagggtatgatctgtgcctataaatgttttttagtctaagccgtgtgggaaagacacagttttttcttatacacacatcactgtaataacatttactcaagaaaaatagaaatatacagttatgttagtttaggacacacacaaaaatgtgttaggatgtacattcaatttaaactatgtaagccttgagcctggaaagtggaggctgcagtgggctgagattgtgccactgtactccatcctgggcgacaaagtgagaccctgtctcaaaacaaacaaacaaaaaaccaaaaacaacaacaacaaaagtatgtaagcttataaagagagtcctttcagtgaatggtgagatcaaattctaatctcaagtctgtaaagagacttcacagaagaatcaaggctagaaatgggacatggatttggtgttttaaaaaaaagtttgagagaggagctttccatttggaaagagtggtctgtatgatacaccagagacagggctgggttttatgcagtgtggcaagtaagtctgttttgatggtgcaagtagattaattattggaatatggagagatggctatggctgggggaagggagatagaaggtagaagctgacacktcacggataggtagcccttgtaggtttctragaggaaaatagcatcaaaatgttaagatgaaaaggaaggttcttgcttctggttacagagtgtcttgctgtgagaagggattagaggttagcctagggagattgttgtactagttggatgacaggctgctttgatcttggatgtaaactatggaaacgaggaaggagtagatcctcaattctaggaccttaaaaaaaaagacaaatgaaaagtcaggaagtaaatggaaagtgagttaaatrtactgctaaggttacagtttaattcaaaatttattgtgcagtagctatatgtaaaacacaatgttaagtgctctgagaatataaataaatatgctgccctctggaaacttctaatttagttggaagacatcgacatatattgaggtaactattatgcaagacagattatattatagaggctagagtgacatttttaaaataaaaatcagataatgtcatttgtctgcacaaaactactctttggcttgctaacccatgcagaattccttttttttcggggggcgtcaagatttcactctgttgcccaagctgggctgtggctcactgcaacctcaacagagttctttctttttgcaaattgagctataattcactctttttaaaatgtacaattcagtgttttttttcttttcttttcttttytttttagtatatctgcaagtctgtgcaaccattaccactatctaattgtagtatttatttattttatttttttttttttgagacagagtcttgctctgtcaccaggctggagtgtagtggctcgatctcggctcactgcaacctccgcctcctggattcaagcgattctcctgcctcagcctcccgagtagctgggactacaggcgcgtgccaccacacccagctaatttttgtatttttagtagggacgargtttcactatgttggccaggatggtctcaatctcttgacctcgtgatccgcccacctcagcctcccaaagtgttgggattacaggcgtgagccaccgtgaccggsctgtartacatttttatcactgtagataatgaaaccctttatccattagcagtcactccctgttcccttcttccctcagcccttgacaaccactaatatattttctgtctctagatttgtggacattgtggacattccataggaatggagtcatataatatgtggccttttgtgtcaggcttctttcacttaacatgttcttttattcatgttgtagcatgtatcagtacttcattcctttccatccagagttcttacagtgccctacaaggtcctacacaactggataacccacctcatctgcggttactttcccctttgttcactttgctccaaccctattaattttcttgctttttctcaaacatgtcaaccatgctcctacctcaggatttttgctccttcttccctcttgaatgttaaaatgcaccccctcttcccatagccacatgatttgctttctaacctgttcagttctttgttcatatgtaacattttcaatgaggtccttcttgacaattctgtttaaaaattatacccccttcatctttatccccagtacyctctgtcttcttttcctgcctatttttcttcctggcatttattagacttctgtgattcaagctatatttaaaaaaatgggtatttggcaacatgtgtagaatggagtagatgtgaagggcatcaagagttcaactgggaaactttcagtagtccatgtgagagaagttaagactttggcttgggatagtcataatcaaaatggaaaagaaagtgtattcattcaacattatcaagacttactgtgtgccagatgtgttgctagtgctaaacatataaatataaataagatgatccttgtgtgaagaagctcactgcctcgtgtagtggagaaatcactggaagagctttttcagaaatcacaaattgagatccattgttgctaagggcttgtcagaatatcagtgaaggtgaggtggacgtgtgtgttttgaagaactctgcagtgatggaaatgttctgtatctgatggctattgagcacttgaaatatgactagtgcaactgagaaactcaaattttatttcattttaaatagatatatgtagccagtggctaccatattgcagggcactcatctactgamtaatgagataggtatatgtaaaaagctaattataacatagtgtgatatatgtctggtaatagagctgtgtactgtggaacatagggttctctctctctcttacctattttgctgatgcatgttataactaacacatatgactaggtattgaagaaatagaatcagtgggatttagaaatggactgatgaatgatgaagagggagaagtcaaatataaaaatttaaaattttaatgtctgagtattagaggctcacmtggtggtgtmatygacacaggaagtagaaataaaaattgtgtgattcttgaccygtttttygcattccaggttgctgtttgtaatttggcttccctggccctgaatatgtatgtcacatcagaacacacatacgactttaagaagttggctgaagtcactaaagtcgttgtccgaaacttgaataaaattattgatataaactactatcctgtaccagaggtatgaatagatttctctgcttattggtaattattgaaatccwaaytgaaaggaatcaatcatgatcttcaagtcatcatttaaatggttatcaataaaatggtttgagaaaaagargtagtctgtctcatttggtrcagaatgttgcttttcctgttcagtaatgttttctccttttctttaaaatctgttgacacaaaggcatgcctatcaaataaacgccatcgccccattggaattggggtacaaggtctggcagatgcttttatcctgatgagatacccttttgagagtgcagaagcccagttactgaataagcagatctttgaaactatttattatggtgctctggaagccagctgtgaccttgccaaggagcagggcccatacgaaacctatgagggctctccagttagcaaaggagtaagtatatggatggaattgtttttgcctgtgagtacctgtagtgggctgaatggtgaccccacaaaaggatatgtccacatcctaattcctggaacctgtgaatttaatttcatttggttcaaraaaaggtattttgcagatgtaattaagaaccttgagataaggagatttacctggattatccaggtgagccctaaatctaatgacagttgtcctgcaagaggcacagaaggggaagcaacgtgactatggaggcagaaattggagtgttacaaccacaagccttggaatgctgataaccactagaagttataagaggcaaggaacagaatctcttctagtgcctctggagggagtgtggccctcccaacatgttgattttgggcttctggtcttcagaactatgagagaataaatttttgttaagttaccaagtttttagtaatttgttgcaccagycataggaaacttaaatacctttgtcctctggagtaaaaaggatactctgttttaatctcttatttagaactagtcattgctaaaataatgtaagagggatgctgccaatgttagttttctgtgggttaaaacatggcattcgttatctcacagtttccacaggtcaggagtccagacttagcttagctgggccttcttttctgggtctgtgttcaagatgttggtaagggctgtgatctcgtctgagacacagagttctcttccawgcttacctggttgttggcagaatatatttcaaggactcatggcatcttgcttctttaaggccagtgggagagaccatctctcgtttcaaaaggggcacagtctagtctcttttgagggttttcacctgataagttaggtccacataggataatgtcctcaccacccccctgtcccgcttttttttttttttttttgagacagagtctcactttgttacccaggctggagtgtgtggtgtgatcttagatcactgcaacctctgcttctcaggttgaagcagttctgctgcctcaagtctcccgagttagtagagatggggttttgccatgttggccaggctggtcttgaacttgtgacctcaagtgatccgcctgccttggcctcccaaagtgctgggattacaggcatgaatcactgcacctggcgtaatcttccttttatttaactcagaatcggctgatttgcaaccttaattacatctgcagaaacctttcacctttgccataatcgctggagtgacatgcatcctattctcaagtcatgtccatactcaagtggagattataaatagcctgtgcaccaaggtgtgggaatctgggaagctgtcttagaattctgcctttcccactgcctttattatcagtactatgattctttactatataaaatgttaatttcatttctgacattcctgctgatattagaaaatctaatgtgtggttattagaaaataggtgtttttagctaagtaaacagatcaagggacagatgaaggcactgaagaaagtaacatttttagtgttaaaaaaagagaatgtgtcagccacacccttttatgaatgttagagttttctggtttgtagatatgacatgggataatcagttttcttagcctgcttctgatcaatatgactacatggaattttgtccaggaaaatctctggagcttgtattcctcatagaggttgattagaagacagcatttgttgggatgtggggacatggcagctagtcatttgtgggttttttttttttttggtcatagttttaacttgctgtagaataaatttgagttgtgtattccttagattcttcagtatgatatgtggaatgttactcctacagacctatgggactggaaggttctcaaggagaagattgcaaagtaagtgaaaagatgtaaagtagctttgaaggcagaagggtttaggttcaccttctggatcttcagaagttagatatgtcattttaacttcttaaactcatttattacaaatggggctaaaatggcctatctcacaaaactattttgggaaaaaacttcgtaagataatatatatagtaacctggaagttgcttggcacaatgaaagcatttcagtacctggtaggaattactattattagttgatcttattttagggacttaacacacctagattaggtaattttctttctcattaaggcttttttccaactatgatttttttttttaaatgtttttcattcttatttatttcccaatttagttacatcgggcatataaatggcttttgtttgaattgattgtcataggaataatggattttggaagagtttttggagggtaatgtgtttagactatatgaaaaaaaatttttaaattgagtttttrtaggcctttcaaactaataagcataagggattcgaaggcagacagaatgttttgcagagtgaataacaaagcaaattgtttttgttttctatcgtgatgactttgtcatttatgggttaatgcatatgcaaagtgattaatatttggagaatgaagcagtagctttaaaatgctctttaaaaaaaataaccgtttgccttaaaattgttaaattaaaattgttttcctactcaaataatacatgttagaaaatttaggaaaacatagatttggaaagagaaaatgaaaattatactaatactgcctcccccagaaaacctgtgtgcatcttagtgtctgtcatcctttaggttttcttccaagagtacacatacatgtgtatttacatggaaattcaacttttaagaaaatggacctgtactgtatttatatatatatatatatatatatatatatatatattttttttttttttttttcccctcaaaatactatggcttagttttttatatacatgactttttttctaatttcaaaattagtatatgaacacaaatttattattaataaagctcaaatacagaaataaaatagaaagtaaaagcccttcttcatacttctgccaaccatttgtctcaraaaacaaaccaaaaaagtaacttattctttttcccaragataaracttgttaatggtgtgtatttttctaratctttttcagtacatttgcarataggtacacatacacggttttgtcatataaatgtgatcaaacttgatgtattctgggctgggcaccatgactcacgtctgtaatcccagcactttgagaggctgaggtgggtggatcacttgaggtcaggagttcaagaccagcttgggcaacatggcgaaacttagtctctactaaaaatacaaaaattagctgggcgtggtggtgcatgcctgtaatcccagctacttgggaggctgagacatgagaatcacttgaacctaggaggtggagattacagggagccgagatcatgccactgtactccagcctaggtaactgtgactctgtctcaaaaaaaagacttgatgtattctgagacttgttatttagtgatttattttggagctctttctcttttagtacctgtaggtctacctaatgtttttaattattatagacaattccatagtttgaatatatcatatatgtaggacttttcacaacatttacctgtctgtagacagatgatgttgctattttacagatgaggaagtaaagacatgaagatagttggtggtttgcttgatacctcactacaaagtgacagagtaaggtggagaaccaccccccaaaaaaagtaaataaaaaaataataataactaaaaagtarasaacccagttgtattagtcgattctcacacagttataaagaactgcctgagactgggtaatttaaaaaggaaagaggtttaattgactcacagttccgcagggttggggaggcctcaggaaacttacaatcatagcagaaggggaggcaaacaggtccttctttaatacggtggcaagcaaagtgctgagtaaagggagaaaagccccttataaaaccagatcttgtgagaactcactatctcatgagaacagcatgagggtaacctcctctgtgattaaattacctcccgccaggtccctcccgtaacgtggggattatgggaactacagttcaagatgagatttgggtggggacacagccaaactatatccagttgtacagactccgtcaggatatgaggctgtatgctaagcactgtatgaatccataggtatagaatgtaggaaagacaggctctttgtgttttaaaaacttgagactaagaaaacaagtagttaaggtatacggaaaggtacaggtcagagaaaatgtttgcagagtagatatttgtatttgacatttgtatttgtgcctgcctgatgaggaaagatgttttaaaattgctatcaattaggctgagctttgaaggtgagccaggggcagttgggagatttctcagtgtgtcagatagtrtattttctcttattagtcaaaagatgttaaccttcttgcaggaacttataattgaagaatatactttgagcataatttcttcctctttacaggataatggagaattgtggtgatatttctctgattctgaacactttctcatcattatttttccagaaggggcctagcacaatgattttataggcacttggaaaagagtgagggttggatgagtgtaacctaatacaggtggggagcgcttcaacagtgatttgaatatttccctacgcaagatagtgtatcaagtgttatgattcctgagtgccacagtccaagyggcataaatcatggtatgataaggatagccaacaataaaaattgtactaattcagtttaggagtcaggcatttaagaggagagtgggctataatagcacccatactgtggaattgcctccctgtaggagtttaatttgaaagtcaacgtgtgagttcaatgcatgtacgatgttayrtttacatttactacatttatctacatttactacagtgacttaaagtagctgctttcctggcagattgtagctttgggactagtacctgataatctccttttctttaggtatggtataagaaacagtttacttattgccccgatgcctacagcttccactgctcagatcctggggaataatgagtccattgaaccttacaccagcaacatctatactcgcagagtcttgtcaggagaatttcaggtgagcagttcacaaccagccttacagggagatctttcaaaagcctgatgttgggagtaaatgctcactcatgtttaatttgcccattttcttagtttgggtgcaaactttgatagagacagtcatcttcatctctaatattattatttgttattaatatttcagcacaataggcatttaataaataatctgttgaaagaatgagtgaatgagggtcgagtatgaaagtaagttgttgayagttaaacatgatgtttaaccattatgtaatcatagtgatatattctataacttctcccagatgcttaagttaggatactcaaaatgtataaagaagtatcatttaaggcagtggttctcagacttggttaccaattagaatttatggtgggtgagaccagtggttttttctttgtttttaaggttcccaggtaattcttatgtgtagctagggttgagaacctcaatttaaaagactatttgtgaatttccagatatcttgaagtaaagttctgtaaagttcgagaaggatacgtttccaatttttttaacctaagtatttatagatttacccatcttaggcgctattcttttcacttttgcaaacgccatatgtttcttttttaatgaaaatattttttcagctttattaaggyataattgacaataaaaattgtgtataaaaccaaggtatacagtgtaatgattagatatgtgtatatattatataacgattaccacaccacaatgtttttgttgtcgatactgtttttgagaaaatgtctcactttgtcacccaggctggagtgcagtggcatgatcttggctcactgcagcctctgcctcctgggttcaagcaattctcatgcctcagcctcctgagtagctgggattacaggcatgctgcgccaccatgcctggctaattatattgtttcttgaataacagatgtcaagatcttaaaggaatatagctttcgtgtggtggcattgatgtctcgtctttataaaagatagaatttaccaagcaatctagcattaaataactcttaagtgattttagtttaagcttcaaagctgtagtcttttctaagcagtcactgttatttatttcttcatacattttctgcttttccattcagattgtaaatcctcacttattgaaagatcttaccgagcggggcctatggcatgaagagatgaaaaaccagattattgcatgcaatggctctattcaggtatagaatgaaaatgaagtgygctctgcaggggctgagttggacattgtggtacctcctcactcatgctagacaatggagagaatgacttcattgtgttcatctaggttttgcttgtgtagctctgttcacctctgcattgttgtgctaggattgtacacatctttacataacccttaccatcttgtttttatgcaataatataaaaaagtagttctcaatttttctgcatcttagaatcaaytggggagcttttaaaatcctgaagcttaggttgcattccttaccaattaaatgtytaggaacaggaaccagacatcaattttttttttttttttttttttttgagacgaagtctctgtcgcccaggctggagtgcagtggtggaatcatggctcactgcaacctctgcctcctaggttcaagcgattctcctgcctcagcctcccaagtagctgggattacaggtgcctgccaccacgcccggctgttttttgtatttttagtagagacagggtttcaccatattggccaggctcctgacctcaggtgatccgcctgccttggcctcccagggtgctaggattacatgcatgagccaccgtgcctggcctcagacatcaataatttttaaagattcttttggtgattccaaagtatatcaaaatttgggggatcatagatagaaagactgaaattaagagagtcaagcttaattaaaaatcatggttgacgactgatagtccaaaagacagagtcacaaatcgtgtaaatatttgcaactaagagtcaagaggcatttatttgcagatagaggtgtctggctaaatgttggtctgcttagcaacacagatgaagagtcctataacagttccatatttaatgacagaaactgtagcattagccagtctgtgtgttttaatgaaagttaaccctaggcctaagaaaacctgattttggattccaaagggagtttgaaatcctagcttatttaaagggttttatctcattgcttcccttggtccctgtgaattacagcccttattttttgtgttttctgcaaaactcaagggtcatttattgctgcttagctctgacttttcctttctttaagtgcctctagaagaatgaatgtttgggtcataaatcaawtaaaaaattaaaaaattggtttatgaccaacaaaaaagggatgctgaaattactatcaccagattratatttggttggttagatgggggttttgttcaactttctaaatagtcttggtaaacttgataaggatcatatcatatgatactgaatggtaaggtcagatctggcaggaagtaaaatgaagatcaaagcttgtgtcactattctattaatcatacactgctttctttaactggagtaaagtaaacattgggttttccttctttagagcataccagaaattcctgatgacctgaagcaactttataaaactgtgtgggaaatctctcagaaaactgttctcaagatggcagctgagagaggtgctttcattgatcaaagccaatctttgaacatccacattgctgagcctaactatggcaaactcactagtatgcacttctacggctggaagcaggttggtagagaatatcaaggagtacttaattgccagcttgagatattttggcattggaatgattttatgttttagccacctattaaatattatcacctagaagttctttaagttcaaatccagaacgttaaaaccaacccatggtttttgtaccagaacaaggtcttgccttggattttcttgtttctgttaggtttatttccttcttaggtttgaaaccttgtagttacctgtgatgctttccttcctttactgtccgtacaattaccaagttgtgttgattgttcctttgtattatttcttaaatatcttccttccttttctgctgctgttattctaaactgaccttaytgcttctaggatctctgctcccagccattttgtgtgcattaccaccattcctcagataaaactttgcacaygtcaacccgctattcaaaaacatccattgttttctcactttataaagtgaaagccagcttacttagctagtcgttgccagctgtaaagtctggtgattttggattatgttcttattccctgataatgtattgggtatttaagtagaattataaatttgttttttaatttaacatttattgaacatctagtatgtgccaggactgaggatactgaatagaagatgatgatctttatctttgaagtcttatagtctgttgttacacagagacacagtctagctctctaaacagttataacctaaggcagacatattgtcttgggcaaacctggaagtcatatgcataaaaacaaagacaaaagaataaaaatgtttgacctttccaaagagataagcctgttttaggagtgaaaagaacaggatatttctgtctgactcacaaagcatttttgagagtactcctagaggagatagaattccaagtttaaaaaaagtttgatctggttcatgggaatgtattttattttatgtatgtatgtatgtattttgagacagagactcactctgttgccccggctggagtacagcggcgtgatcttggctcactgcaacctctgtcctgggttcaagtgattctcatgtcttagcctcctgagtagctaggatcacaggtgtgtgccaacacacctggctaatttttgtatttttattagagatggggttttgccatgttggccaggctggtctcaaactcctggcctcaagcaattcacctgcctcggcctcccaaagtgctcgaattacaggtgtgagccactgtgcctggccaggaatgtattttattttattttaatattattgttttattttattttatacttttttagacggagtctcgctctgttgcccaggctggagtgcaatgatacagtcttggctcactgcaacctcagcctcctgagtagctgaaatttataggcatgtactacccctcttgggggattacaggcatgagccacagcgcccagccaggaatgtatttttttgtttgtttgtttgtttkttytttytwtttatttatttatttwtttttattgatcrttcttgggtgtttctcacagagggggatttggcagggtcataggacaatagtagagggagggtcagcagataaacaagtgaacaaaggtctctggttttcctatgcagaggaccctgcagccttctgcagtgtttgtgtccctgggtacttgagattagggagtggtgatgactcttaaccagcatgctgccttcaagcatctgtttaacaaagcacatcttgcaccgcccttaatccatttaaccctgagtggacacagcacatgtttcagagagcacagggttgggggtaaggtcactgatcaacaggctcacaaggcagaagaatttttcttagtacagaacaaaatgaaaagtctcccgtgtctacttctttctacacagacacggcaaccatccgatttctcaatcttttccccacctttcccgcccttctattccacaaagccgccattgtcatcttggcccgttctcaatgagctgttgggcacacctcccagacggggtggtggccrggcagaggkgctcctcacwtcccagacggggcggcggggcagaggcgcccctcacctcccagacggggcggctggccaggcggggggctgaccccccacctccctcccggacggggcggctggccgggcggggggctcacacccccacctccctcccggacggggcggctggccgggccgggggctgaaccccccacctccctcccggacggggcggctggccgggcagaggggctcctcacttcccagtaggggcggccgggcagaggggcccctcacctcccggacggggcggctggccgggctgggggctgactccccccacctccctcccggacggggcggctggccgggcggggggctgacccccccacctccctcccrgacggggcggctggccgggcagaggggctcctcacttcccagtaggggcggccgggcagaggcgcccctcacctcccggacggggcggctggccgggctgggggctgactccccaacctccctcccggacggggcggctggccgggctgggggctgactccccaacctccctcccggacggggcggctggccgggcggggggctcacacccccacctccctsccggatggggcagctggccgggcggggggctgacccccccacctccttcccagatggggcggctggccgggcagaggacctcctcacttcccagtaggggcggccgggcagaggcgcccctcacctcccggacggggtggctggccgggcgggggctgacccccccacctccctcctggacggggcggctggacaggaatgtattttaaatattggtgtggaatgtctagtattctcacagagtttctcctaataattgtctttactttccttgtagggtttgaagactgggatgtattatttaaggacragaccagcrgctaatccaatccagttcactctaaataaggagaagctaaaagataaagaaaaggtatcaaaagaggaagaagagaaggagaggaacacagcagccatggygtgctctttggagaatagagatgaatgtctgatgtgtggatcctgaggaaagacttggaagagaccagcatgtcttcagtagccaaactacttcttgagcatagataggtatagtgggtttgcttgaggtggtaaggctttgctggaccctgttgcaggcaaaaggagtaattgatttaaagtactgttaatgatgwtaatgatttttttttaaactcatatattgggattttcaccaaaataatgcttttgaaaaaaagaaaaaaaaaacggatatattgagaatcaaagtagaagttttaggaatgcaaaataagtcatcttgcatacagggagtggttaagtaaggtttcatcacccmtttagcactgcttttctgaagacttcagttttgttaaggagatttagttttactgctttgactggtgggtctctagawgcaaaactgagtgataactcatgagaagtactgataggacctttatctggatatggtcctataggttattctgaaataaagataaacatttytaagtgattgtatgagattaattttgtcatttactttcatataaaagtcaaatttgaaaaacacattttctgttctttgagaattcagggaggaaattatatgcctttttcttttcttttcctttctgtagtaaaatatacctaatatacaatttaccattttacccatgtttaaacataaaattcagtggcttaagcacattcatagtgttatactaccatcaccactatttgtttccagaacttcatcatcccaaacagaaactctgtatcaataagaacattaactccccctttcccctccaagtccctggtaacctctattctactttctgtctctatgaatatgcctcttctaggtacctcgtataaatggaatacatgtctggcttatttcatttagcataatgttttcacagtttatccatgttatagcatgtatccaaatttcattctttatgtataccacacttttttttttttttttttgagacagagtcttgctctgtcacccaggctgtacgatcttggcttggctcaccacaacgtctacctcctgggttcaagtgataagtgattcttgtgtctcagctttccaagtagctgggactataggtgcgcgccaccatgcctggctaatttttgtatttttggtagagaccagatttcaccatgttggccaggctggtctcaaacttgtggcctcaagggatctgtttgcctcggcctcctaaagtgctgggattaaatgcctgagcctccacacctggactaccacactttgttaatccacttatcttttgatggacatttgggttctttcctccttttaaggaattttgactaatgctcttgtgaacattggcttaaaagtatctattgagttcctgctttcaatttgtttgggtatgtatacaggggtgaagttgctggaaattatggtgattctatctttaactttttgaggaactaccaaacttttccacagcagctacattattttacatttccaccagcaatacaatagggtaccattttctccacatcttcatcaacacttatttttcatatttttgttttgttttgttttttgagagacggtcttgctctgttgcccaggctggagtgcagtggtaccatcatagctcactgcagccttgatctcctgggctcaaacaatcctcccatctcagcttctcaaagtcttggggttacaggtgtaagccaccacacccagctcatattttttataatagccatcttaatgacttgacaatttcattataatgtgtcttggtgtgggtctctgagtttatcctacttgggacttmctgggcttattggatttgtagattcacatcttttgttaaatttgggttgtttttggccattatttagataatttttcttcccctttctctttccttatagggacttccatagtgcatctattggttgacttgacggtgttccataggtctgttaggcgttgtttacttttctttattttttctttctattccaagacttgataatttcagtgtcctatcttccagttttctgattctctcttcttcctgctcaaatctattgttgtgctcctctagtgaatttttcatttcagttattcttttcaactccagaatttttattcttctttgtaatttttgtctctgttgatattctgattttgttaatcattgtttttctgatttcctttacttatttgttcatcttttcctttagctctttgagtatatttaatacagttgttttaatgtctttgttgagtaaatccaatgtcttggctttctcagggatggtgtctatcattttttcttgttactttgaatgggccatgttttctttctttccttttttttttttttttgtatgccttgtgatttttgttgttgaaaaatgggcatttgactgttataatgaggtaactccagtaatcagattctcctactccagagcttactgttttttgtttcattgctatgttgaagactgtagtactccatttgagacatttccaaactttttttttttaagacagtgtctcgctgtgtcaccccaggccagaatgcagtggtgtgatcttggctcaccgcatgctctgcctctggattcaggcaattctcatgccttagccccctgagtagctgagattacaggtgtgtgccaccatgcctggctatattttgtggtgttagtagaaatgtggttttgccatgttggccaggctggtgttgaactcctggcctcaactgatccacccacctcagccccccaaagtgctggcattacaagtgtgaaccaccacgtccagcccaaactaatttttcagactattctttgtcacgtatgatygccaaagtctttgttcctttagtgcatgttcagttattgttttgacagagatatatgataccttcaaactttttgtcacactaataagattggctggttgcttttaattgcactggacaaattggagaaagaaaaggatgactttagtgatttgaattctcaacttaagtactagacctgaacatttctgtttctgctttgaaagaaactttacgttctgtagctgcagagttgagatttctgaaaccaaacccagaatctcattttgcaagtgcctgagttacaatgcaaattgaattctgagccttgcagggtgcctttgctattaaagtgaggatattgactaggaatgaatgggatcctgaaaattggaatggtgacatatgggaagatcctgatgaagctggtaatattgaatctctaaattctgatgagtcttcattgccagtagaagcagagttaactgatttacccaaactgattatacctaattgacattaactgctttccctgaggaaactgatgtcttcctctgagataattgccttgcaggacactgctgattgtcctcaggacccaccctgaccacccctctttggttctaaacctataactagattcaagtcccagcaggccccaaaggtgaggtacaaagtgagatctatgaggaggtgtgctacactcaaaaagaactacatgattcttcccatttgagaatatgtgtggaaatggatattaaggatatgtgataatggtggaaggaacataaagttggatcaggctcagtttattgataggggcccacaaagcagagattttggatttaatattgcagcatgggggatcgaaaagtgcctgctctagctggttggttggttggttgaaacatggaccaaaatttgccctaagtgaagttgaaatgccagtcctgccttggtatactatagaggaagtagttcaaaggcttagggagatcgaaatgttagagtggatttatcatttaaaagaccagctctctcaccctgagggaagtctggaggacacttcaccatgactgtgagaagtaaatttgtgagggaaaccccagcatccttaaagacctctgtgattgctcttttctgtaggtctgaaattacactgccactgaattgggaaacctaaattcagtgggagtaattggatcccatagtgccaggtagagacacttaattgccaaaggcagggtgggaatagttactataatggacagcagagttaaagcagcaatcagaatcgtctgacttggccagatgcagtggctcacacctgtaatcccagcactttgggaggccgaggcaggcagatcacttgaggtcaggagtttgaaatcagcctggccaacatggtgaaagcctgtctctaccaaaaatacaaaaattaacctggtgttgtggcgtgcatctgtagtcccagctacttgggaggctgaggcaggagagttgcttgaacccaggcggcagaggctgcagtgagctgagattgtgccactgcactctagcctaggtgacagagcgagattctgtctcaaaaaaaaaaaaagtctgactcacagagatacggtttggctagatgatcatggagttcctcgaggtgaaatacatggggaatctattaaattctaacttgatctatataagcagaagagtttcaggttaagtgaacgagtctaatttgaataataaaaccagaattatggcccctctatcaattcccagatttgaactagtttacagacccagaacccctcaaatgaaagggagaccaagtccccttgaggaaggatcccactgcactatcaaagatatatactgttaaatctttctcccagcctttcccagaaggatctatggccttttactagtaactacattgggaaaaagagataatcaaaccttttgaggattactggacacagactctaaactgacactagttccaggaaactaaaacgtcactgtgatcttccagctggagtaggagcttatggaggtcaggtaatcaatggagttttacctccagtctgtctcacagtggctccagggatccctgaaaccatcctgtggttatttcactatgcagttcgggaatgcrtaattggaatagatacactcagcaactgacacagagaaccaaccatattggttctctgacttgagtgagggctattatagtgggaaagttcaagtggaagccactagaactgcctctgcctaggaaaatgataaaccaaaatcaatattgcattcctggaaggatgccagaaattagtgccaccatcaaggtcttaaagtatgcagaaataatttccaccccatccccattcaactcacctgtttggcctttgcagaaaatacgaattttggagaaagacaatggattatcataagcttaactgggtgattactccaaccagaggcagttctattgcttgagcaagttaacacatatcctcatacctggtatgcagctattgatctggcaaatgcttttttctccataccccttagtaaggaccaccagaaacaagtttgttttcagccggcaaggccagcaatacaccttcaccatcctgcctcatgagtatataaactctccaaccatatatcatagtttagtttacaggattttgatcagctttctgttccacaagataccactctggtccaatacgttggtgacattatatcgattggacctatgagcaagaagtagtgacttctctagactcattggtagaatactggcatgtcagaaggtgggaaatctcactaaaattcagggccaccttctacacaggacaatttctaggcatctagtgtgaggcatgtcgagataccctttctaaggttaaggataaattgttgcatctgackmctcctacaagcaagaaagaggcatgatacttagtgtacctctttgagtcttggaggtaaaaaatcatggtaaccatttccagcttggttatggcaactgagtgcctccacgtgccactctgaaatctaattactcccattgaatttaggtttcatttggagcagcacactggggcatgctactccatcctgtttaccaaaagctgctagttctggggcccagaactacacaaggcactgccacaggtccaggctgccagggaagtttctctgctacttgggccatctgatccatcagatccagtggtgcttgaagtggcagtggcagatagagatgctcattggaggctttggcagacccctgtaagtgaatcacaggacaggcccttaggattttggaccgaagccctgccatcatcccctgtgggtaactactctccttttgagaaatagcttttggtttgccttagtagagactgaacacttaaccatgggccaccaaattaccatgtgacttgagttggctgttgtccgactcaacttgccataaaattgagcatgcacagtagcagtccatcatcaaatggaagtgatatatacaaaatcaggctcaagcaaaccctgaaggcacaagtgaccatgaagaagtgacccaaaatcccgaggtctccagttctgctacactgccttttcttccccagcctgcacctatggcctcatg

SEQ ID NO: 93293 - DNA, 32746 bp, Homo sapiens
  misc_feature (1)...(32746): n = A,T,C or G
taaagggaaacttctgatttcccttcctcctccatcctccaggaactctttccagattgcctttccatccctcttcccacccaagacccagtcactcttccatctctccctgccttagcacttgggaatggcacatacgtgccctgtcagccccatcgagcccagggcccccctgagacctgaagcagtccccttggctctttctgctgcttgctaatctccttaaccaggttcttttggtctattagaccatgtagcagatggacccttttgaggacatatagaatcatctaagaatgttcacgaatctagaaaacacttataggaccccaaaaaacctgagtcacagaggacagcaactccagctgacttccagccctcatttcccctttaaccaagtgggtctcccgaaggccccggggattattgtgtaaggacatcctggcttatttcacccacactgccagtcctgcttcccccatgcacagcttaccacccagataggcgcagttaaaatggctacaggtctgattatagctccagagagtcaccaagctctgggctccatcctgagagaatctggtaaccaaaaagacttcatgggggggaatcagcacctcgcgctccttgggaaagacagagaaggcctgtataggggccccaaagcaagttgttagagagaagagggtggcattaccaaatctgtgggccactgccttatccagggagctggaggcaaactggcccaagcggacagagtcccccagcctcttgggttcaaagcgaaggctgcccacacctcggaacaccacctccccaggtcccctgctgcagcccccactgcctcgcagcagctgcagggcccggatcaggtagaaatgcagggccttgaagggaaagtgcctcatgtagagctcccgggagcctccgcccgtccgcacggcctgattcaactcccagtacaaggtgttcgatgagttggtgtagaccataatggctattccattctgggctttgaagccagggggcaaggtaagccctcgacgcttgtcctcccaggtctcctgggctgcctcccaggattcccgcagcagggcatggtgggccatttcctcctttagcaggggggctgccttctcctccatctcctctgcacaacccacataggtatcgtcaaaggtgtctggagccaggcccaggggcaggatggtgggaacagcctgggcctgtggagcaaaagaggtgccacaccgaaaagagcataagttcagagcactggacatgggtcctgggggcaaacccatccagaaacacagaatctcatttctatccctaaatatcaggtatatgcaatttggcaagggcccaataagaggcttaaataacacaggcactggagtcagtcagacatggactgaaatctttttttttttttttttgatggagtcttgctctgttgcccaggctggagcgcagtggtgagatctcggctgactgcaagcgccacctcccaggttggagtgattctcccacctcagcctcccaactaactgggattacctgtgcatgccaccatgcctggctaatttgtttttgtgtttgtttctttgagacgaagtctcgctctgttgcccaggccggagtacaatggcacgatcttggctcactgcaacctctgcctcccgggttcaagcaattctcctctctcagcctcccaagtagctaggattacaggtgcgcaataccacgcccagctaattttttgtatttttagtagagacagggtttcaccatgttggtcaggctggtctcgaactcctgacctcaagtgatccaccagcctcagcctcccaaagtgctgggattacaggagtgagccaccgcgcgcaggctgaaatcttgactttaccacctattagctgtgaggccttgggcaagtgtcataacttttctggacttgaggatacttccaacctcacagttattatgaagacagcataaagagcattacttctgtacaacctaaaaggggtcatcctgtcattagaaaggttcttgcagtcggtgggaggtgggactagatgactatcaagcgcttttctggctgtaagatctggcaggcaggtgatgtgcaaatattacacacagccagtgtccagctgcctaacccccagccccattctcctcgggctctctttccctctcatccagcaggaagcccttgcaggtaggtgctcagccaccacaccaaatcactgtgagctctgagacgcctgagtcctcccctgctctgtacccacatttggggtaggggtggtggggaggccaagccttggttgggacgggctgccaggactgcagcacacaggtaacccaaggaggctttgccgggctgtgcctgcgctgggagatgagaggtggggaggagaacgttggaggcatccagagagggatggagatgggggttctaggagacagaatgggaacttggggctccctgcagagatggaggttcctgagaggaagagagttaagagtggaatcctagggaagagtccctgggagagggatgtgaggagtcagccccgggtccacttcctcagggtctgtcccttaatgtcccccttgggactaggagatggttcctggagttacctgccaggtgtggaggccgaggctgccgagggcgatcatcaaagccgccagcgccatccctggaggagacgtgagggccaggggtccgggtgagggcgggaccagaggtgctggagtcctggtttcgaggggctcgaggcagatctggaccctgtctccaggcgcgcgggatcccgggtccaggattagggccccggcggggcgtgggcggggcctgggagtttattgcccgccccccgccccaagtctccgcccccgactccccacaccccttcctcagagcctccagtctggggacctttccgagactgtaaaggcggggccgcagtttggctccgcctgagaggggagggccgggggcggaggacccacttgaaggctgcggaagccgccagcgggagggagcgccgagggctctggcgggcgctgcgctgtccccggaggagtccggagtccggctgaaagcaaaggttctcgaggctaactgtagcccccgcgctggtaacccgacacccctttcccagcgccgcacgcggggccgggagcgggcgcgccagggcagggactgaggagcaattccctttctcaaggcctgcggggtctttctgcgggaccctctttggctgtgagtgatggggaggaaacttgtgagactcggcctctccctcaggcgggccctgacccggtcggcccctggtccccggcccaccaggccaggggccccgcgggggtcccgccggccgagaggtcgcccccggagcactgcgatttgcatacagtttgcatttggcccacaccctgggccacgtgctccagcatctgagcagcgcccactccctgcctgctctgggccctctccccattcgccttcagtggggttgggccagagacagagcccttggtcgcagatccacagggtccagtctcgcccctcccccagaccgctctcgtggccgctcagactcaggtgacccatgtttgtaaacactggcctttcccccacctcctctgggcttatctataaataacctggctctgagttttggatgccccgtcagaggtcatgggagaaggggccagcggaggaattggtaactcagggaagagcttcctagcagccagagccaggaggaggtggggttgtcacccctccttcccccagcggccggagggtcgctgaaagctaggatttctgagggttctgaaagctaggatttgagaaatgctgcctgctggggctgaggtgggcacgaaagattagagctacccaaaggaatccatcctggtctggctcattaattttccccatccctgtccccccatcccctcagagtgtcagccaaataaaaagtttcctccacctagaatcctgctatctcccagaatcctttctgtagaccaaacgggaagacatacggtgggtccaggcttggaggagggtggggagggaggtgcttctgagtgcttgttagaaaaacagctccagggcagggcgcagtggctcccgcctgtaatcccagcactttgggaggctgaagtgggaggatcacgaggtcaggagttcgggaccagcctggccaacaaagattagccgggcgtggtggcaggggcctgtaatcccagctacttgggtggctgaggcaggagaatcgcctgaaaccggaaggtggagattgcagtgagctgagatggagccactgcactccagcctgggcaaaagggcgaaactccatctcaaaaaaaaaaaaaaaagaaaaaagaaagaaagaaaaacagctccaggacaagttcttttgcccccttctatgagtctagccatcccaaagccctcccagattctaaaataaggaatcatcctaccgtttcccatcatggtgaaaaacagcatttgcctatatatcctgcctgccccactctctggaggaagttgagtgtttgcagttgcttgaaaagataccacctgaggacagcttggcctgctgggatgacccgagaccagatgtattggaatcactgctttgtccctctccaccctctggctttgggggattgcttctcccatcccaggacctggaacccaaaataaggccccaagagatggattcaaatctagtcattgggggccgggtgcggtggctcacacctgtaatcccagcactttgggaggccgaggcaggcggatcacgaggtcaagagatcgagaccatcctggccaacatggtgaaaccccatctctactaaaaatacaaaaattagctgggcgtggtggcaggcgcctgtagtcccagctattcaggaggctgaggcaggagaatcgcttgaacccgagaggcagaggttacagtgagccaagattgcgccactgcactccagcctggtgacagagcgagactccatctaaaaaaaaaaactagtcattgggcagggatcctaagtatagcattaagaagtcctgcaagatcactggtaagtcagagctggaactgggactcagaatacagcctccttagttcgaatctctcctggcaccttagctaagtctcagtgtttgtgtgaaaggtacaaaatctaaggagacgctctctgaggtcggggtgctgaagcttcctcctctcttcctcctccttggctgaccagagtacaggaccacagccagtgaggaggcagttgtcccagcctggatccccagtgcttcagtccacctcctctctggcttcagggattcccttttttgtgggaaatgtagcaggaagagcctcagacaaaacccctcagatgctgagttaaagaaggaaggggtttattcagctgggagcatcggcaagactcctgtctcaagagctgagctccctgagtgagcaattcctatcccttttaagggctcacaactctaagggggtccgcgtgagagcgtcgtgatcgattgagcaagcagcgggtacgtgactgggggatgcatacaccggtaattagaagggaacagaacaggacagggatcttcacagtgcttttttatacaaataaccgattaggtcaggggtcaatctttaactgccaggcccagggtgtggcgctgggctgtctggctgtctgcttgtggatttcatttctgccttttagtgtttactttggaggcagaaatcggacataagacaatatgaggtatggtttcctcccttagaagaacactgggcaggtcagactgggcagaggctggtgttcctgagccctgaggagacatccagaaatagatgggggcgtgtcacgtttctgagcagctgtgtgggggaggttcaaggggtggggactaacaatatcaaaaagaaacttgtcctcccctctcctggtggccatggtggagatcagcagcagcttccccacccaggacaaggcctaggtaaggagtgcaccactctcctcctgggtgctgggcaggaaaagtggttttgaggtgaaatttgggagatgaacggtggaattttaggagtcatgagaaaaagtttccaggaaactttgatgaagtttgggatacctaggaaggttgggagccatgggaagtttgggattcctgtggggagatttggggtcacattcccaggagggtatgttcagcaagggcctggatgagaaactgatgacagaattgctccgagcaggatgagagggaggacagaagcgcagctcccttgggctagaaaaggaattgctcagcatccccagctccttgggcccatgcccaccccatccctccggttcccaccacatctcccctgacactggtcaccaaggccagccacccacctgctctgcagtggtctacactgttagctgcgctgagaaagttcctcagactctcagcaaacatgctggggcctccccagtccctggccttggcatacatggtccctgccctcaaggaactcactggccagaagaggagccaggcacatataagggcagcacagtgtgataaggacagtgacagaggacagcacagggtgataccagagcccagaggagtcagagggcttcctggaggaggtggccctcgggttaagccttgaagagtaggtatccaggagaagggtgtcccaaggagaggggcgatgtgtgcagagccacagggagggtaaccacggagccgcacctgcgacgttgttctgcactacagaagccaagcaggagtggcaggtgcgagcctgcagagggtgcagagggccaggataaggacgctggcctctgtccttagggtatggagggatgttttgtttgtttgttttgttttttttttctagatgtgtttgtatctcttccctcatgattttcatctctgcatttttactctatattttgagatatttcttccagtcagttttggcacagagggcttttaagcatgtaaggaacatgaccagagtcgcgctttagaaacattgctctccctgggcaggcaggatattggggctgactgtggaggcggggagatcagcgaggaggaaggggcaaacctgagccagggcagggggtgtggatgttgaagggaaggagaatctaggatggacccctatctcacccagcattagttggcaactatgtgaatgtttgacgaatgattgactgaatggacacccaggggaccatcatgggtgactgggtgaataatggggatggtttatcacgtgagacttgccatggcaaattaacaggagccaccctgagctagattaagcctaaagaggattttatcacaaggataccagggtatctcatggaacccaaggaccagatgcaaagagcctctagaaagccaaggaggagtgcggctccacctgacctctggcttcatcaatcaagcagctcaccctctgcctttcagccttctctttcccttgctctggggatctcatctcttccctgatttcaatcacctgtgactctcagatgtctccttgattgtccattctgctacctcttggacatctgcttcagggagttcacatttcccaaagtgaactcaccatttcccctccaaacccgatcattcattcaatacatttttactgagcacctgctttgtactgggactacaataatgagcaagatgagcttttcaagtctactctggtataacattgtgcctatagtaacaataaggcactgtgcacttaaacatgtgtaaagagggtacatctcacattaaatgttcttgctacatgaaaaccaaaaacaaaacaaaacaaaataaaaataaaaacaggccaggcacggtggcttatgcctgtaatcccagcactttaggaggccgaggcgggcagcggatcacctgaggtcaggaatttgagaccagcctgaccaacgtggagaaaccccatttctactaaaaatataaaattagccaggcatgatggcacatgcctgtaatcgcaactactggggaggctgaggcggagaattgcttgaacccgggaggcagaggttgcagtgagtcgakattgcaccattgcactccagcctgggcaacgagcaaaactccgtctcaaaaaaaacaaaacaaaacaaaaaaaaaaacgaggctgggtgcggtggctcaggcctataatcccagcactttgaaaggcctgggcaggtggatcacctgaggtcaggagttccagaacagcttggtcaacatggcaaaaccccttctcaactaaatacaaaaattagctgggcgtgcttgtgggcacctgtagtaccagctacttgggaagttgaggtgggagaatcacttgaacccgggaggtagaggttgaagtgagccgagattgcaccactgcactccagcctgggcgacagagtgagaccctgtctcaaaataaataaataatatataaataaaaataaaaataaaatgaaaacaaagggatacacagaaacttggaagtgatgaacatgtttattcccttgattgtgggaatggtaacatgagtgtatacttatttccaaactcaccaaattgtatatattaattatgtgcagttttttgtataccaattatacttcaatgaggctgaaaaaaaaaaaagtaaagttgcacagggctgtgctggagcaggacactctgcagtcatgtaagaatggtggaagaagatagagggcaataaaagaagatgggcaataaaagaggtgtcaggcctctgagccgaagctaagccatcatatcccctgtgacctgcacaaacacatccagatggccggttcctgccttaactgatgacattgtcttgtgaaattccttctcctggctcatcctggctcaaaagctcccctactgagcaccttgtgacccccactctgcctgccagagaacaacccccctttgactgtaattttcctttacctacccaaatcctataaaacggccccacccttatctcccttcgctgactctcttttcggactcagtccacctgcacccaggtgattaaaagctttattgctcacacaaagcctgtttggtggtctcttcacacggacgcgcatgaaatttggtgccctgactcagatcgggggacctcccttaggagatcaatcccctgtcctcctgctctttgctctgtgagaaagacccacctacaacctcaggtcctcagaccgaccagcgcaagaaatatctcaccaatttcaaatccagtaagcagactctttttactcacttctccaacctccctcactatccctcaacctctttcccctttcaatcttggcgccacacttcaatctctccattctcttaatttcaattcctttcattttctggtagagacaaaggagacacgttttatctgtggacccaaaactccggcgccggtcacggactgggaaggcagccttcccttggtgtttaatcattgcagggacacctctctgattattcacccacgtttcagaggtgtcagatcatgcagggacgcctgccttggtccttcacccttagcggcaagtcccgcttttctggaggaggggtaagtaccccaaccccttttctctgtgtctctaccccttctctgcttttctgggggaggggcaaaaactcctcaaccccttctccttcacccttagcggcaagtcccgcttttctaggaggaaagaacccccaatcccttatttccacaccccaacctcttacctctgtgccccaatcccttatttccacgccccgacctcttatctctgtgccccatcccttatttccgtgccccgacctcttatctctgcgcccaaaccccttatttccacgccctgacccctttcccgcttttctggagggtaagaacccctgaaccccttccctccgtttctctactctctcttttctctgggcttgcctccttcactacgggcaaccttccaccctccgttcctccgtctcccttagcctgtgctctcaagaacttaaaacctcttcaactcacacctgacctaaaacctaaatgccttattttcttctgcaaggctgcttgaccccaatacaaactcgacagtggttccaaatagccagaaaacggcactttcaatttttccatcctgcaagatctaaataattcttgtcgtaaaatggacaaacggtctgaggtgcctgacgtcaaggcattcttttacacatcagtccctccctagtctctgcccaatgcaacttgtcccaaatcttccttctttccctcccgcctgtcccctcagtcccaaccccaagtgtcgctgagtctttctaatcttccttttctacagacccgtctgacgtctcccctcctccccaggctgctcctcgccaggctgagctaggtcccaattcttcctcagcctcagctcctccaccctgtaatctttttatcacctcccctcctcacacnnnnnnnnnnnnnnnnnnnnnnnnnnnnnnnnnnnnnnnnnnnnnnnnnnnnnnnnnnnnnnnnnnnnnnnnnnnnnnnnnnnnnnnnnnnnnnnnnnnnnnnnnnnnnnnnnnnnnnnnnnnnnnnnnnnnnnnnnnnnnnnnnnnnnnnnnnnnnnnnnnnnnnnnnnnnnnnnnnnnnnnnnnnnnnnnnnnnnnnnnnnnnnnnnnnnnnnnnnnnnnnnnnnnnnnnnnnnnnnnnnnnnnnnnnnnnnnnnnnnnnnnnnnnnnnnnnnnnnnnnnnnnnnnnnnnnnnnnnnnnnnnnnnnnnnnnnnnnnnnnnnnnnnnnnnnnnnnnnnnnnnnnnnnnnnnnnnnnnnnnnnnnnnnnnnnnnnnnnnnnnnnnnnnnnnnnnnnnnnnnnnnnnnnnnnnnnnnnnnnnnnnnnnnnnnnnnnnnnnnnnnnnnnnnnnnnnnnnnnnnnnnnnnnnnnnnnnnnnnnnnnnnnnnnnnnnnnnnnnnnnnnnnnnnnnnnnnnnnnnnnnnnnnnnnnnnnnnnnnnnnnnnnnnnnnnnnnnnnnnnnnnnnnnnnnnnnnnnnnnnnnnnnnnnnnnnnnnnnnnnnnnnnnnnnnnnnnnnnnnnnnnnnnnnnnnnnnnnnnnnnnnnnnnnnnnnnnnnnnnnnnnnnnnnnnnnnnnnnnnnnnnnnnnnnnnnnnnnnnnnnnnnnnnnnnnnnnnnnnnnnnnnnnnnnnnnnnnnnnnnnnnnnnnnnnnnnnnnnnnnnnnnnnnnnnnnnnnnnnnnnnnnnnnnnnnnnnnnnnnnnnnnnnnnnnnnnnnnnnnnnnnnnnnnnnnnnnnnnnnnnnnnnnnnnnnnnnnnnnnnnnnnnnnnnnnnnnnnnnnnnnnnnnnnnnnnnnnnnnnnnnnnnnnnnnnnnnnnnnnnnnnnnnnnnnnnnnnnnnnnnnnnnnnnnnnnnnnnnnnnnnnnnnnnnnnnnnnnnnnnnnnnnnnnnnnnnnnnnnnnnnnnnnnnnnnnnnnnnnnnnnnnnnnnnnnnnnnnnnnnnnnnnnnnnnnnnnnnnnnnnnnnnnnnnnnnnnnnnnnnnnnnnnnnnnnnnnnnnnnnnnnnnnnnnnnnnnnnnnnnnnnnnnnnnnnnnnnnnnnnnnnnnnnnnnnnnnnnnnnnnnnnnnnnnnnnnnnnnnnnnnnnnnnnnnnnnnnnnnnnnnnnnnnnnnnnnnnnnnnnnnnnnnnnnnnnnnnnnnnnnnnnnnnnnnnnnnnnnnnnnnnnnnnnnnnnnnnnnnnnnnnnnnnnnnnnnnnnnnnnnnnnnnnnnnnnnnnnnnnnnnnnnnnnnnnnnnnnnnnnnnnnnnnnnnnnnnnnnnnnnnnnnnnnnnnnnnnnnnnnnnnnnnnnnnnnnnnnnnnnnnnnnnnnnnnnnnnnnnnnnnnnnnnnnnnnnnnnnnnnnnnnnnnnnnnnnnnnnnnnnnnnnnnnnnnnnnnnnnnnnnnnnnnnnnnnnnnnnnnnnnnnnnnnnnnnnnnnnnnnnnnnnnnnnnnnnnnnnnnnnnnnnnnnnnnnnnnnnnnnnnnnnnnnnnnnnnnnnnnnnnnnnnnnnnnnnnnnnnnnnnnnnnnnnnnnnnnnnnnnnnnnnnnnnnnnnnnnnnnnnnnnnnnnnnnnnnnnnnnnnnnnnnnnnnnnnnnnnnnnnnnnnnnnnnnnnnnnnnnnnnnnnnnnnnnnnnnnnnnnnnnnnnnnnnnnnnnnnnnnnnnnnnnnnnnnnnnnnnnnnnnnnnnnnnnnnnnnnnnnnnnnnnnnnnnnnnnnnnnnnnnnnnnnnnnnnnnnnnnnnnnnnnnnnnnnnnnnnnnnnnnnnnnnnnnnnnnnnnnnnnnnnnnnnnnnnnnnnnnnnnnnnnnnnnnnnnnnnnnnnnnnnnnnnnnnnnnnnnnnnnnnnnnnnnnnnnnnnnnnnnnnnnnnnnnnnnnnnnnnnnnnnnnnnnnnnnnnnnnnnnnnnnnnnnnnnnnnnnnnnnnnnnnnnnnnnnnnnnnnnnnnnnnnnnnnnnnnnnnnnnnnnnnnnnnnnnnnnnnnnnnnnnnnnnnnnnnnnnnnnnnnnnnnnnnnnnnnnnnnnnnnnnnnnnnnnnnnnnnnnnnnnnnnnnnnnnnnnnnnnnnnnnnnnnnnnnnnnnnnnnnnnnnnnnnnnnnnnnnnnnnnnnnnnnnnnnnnnnnnnnnnnnnnnnnnnnnnnnnnnnnnnnnnnnnnnnnnnnnnnnnnnnnnnnnnnnnnnnnnnnnnnnnnnnnnnnnnnnnnnnnnnnnnnnnnnnnnnnnnnnnnnnnnnnnnnnnnnnnnnnnnnnnnnnnnnnnnnnnnnnnnnnnnnnnnnnnnnnnnnnnnnnnnnnnnnnnnnnnnnnnnnnnnnnnnnnnnnnnnnnnnnnnnnnnnnnnnnnnnnnnnnnnnnnnnnnnnnnnnnnnnnnnnnnnnnnnnnnnnnnnnnnnnnnnnnnnnnnnnnnnnnnnnnnnnnnnnnnnnnnnnnnnnnnnnnnnnnnnnnnnnnnnnnnnnnnnnnnnnnnnnnnnnnnnnnnnnnnnnnnnnnnnnnnnnnnnnnnnnnnnnnnnnnnnnnnnnnnnnnnnnnnnnnnnnnnnnnnnnnnnnnnnnnnnnnnnnnnnnnnnnnnnnnnnnnnnnnnnnnnnnnnnnnnnnnnnnnnnnnnnnnnnnnnnnnnnnnnnnnnnnnnnnnnnnnnnnnnnnnnnnnnnnnnnnnnnnnnnnnnnnnnnnnnnnnnnnnnnnnnnnnnnnnnnnnnnnnnnnnnnnnnnnnnnnnnnnnnnnnnnnnnnnnnnnnnnnnnnnnnnnnnnnnnnnnnnnnnnnnnnnnnnnnnnnnnnnnnnnnnnnnnnnnnnnnnnnnnnnnnnnnnnnnnnnnnnnnnnnnnnnnnnnnnnnnnnnnnnnnnnnnnnnnnnnnnnnnnnnnnnnnnnnnnnnnnnnnnnnnnnnnnnnnnnnnnnnnnnnnnnnnnnnnnnnnnnnnnnnnnnnnnnnnnnnnnnnnnnnnnnnnnnnnnnnnnnnnnnnnnnnnnnnnnnnnnnnnnnnnnnnnnnnnnnnnnnnnnnnnnnnnnnnnnnnnnnnnnnnnnnnnnnnnnnnnnnnnnnnnnnnnnnnnnnnnnnnnnnnnnnnnnnnnnnnnnnnnnnnnnnnnnnnnnnnnnnnnnnnnnnnnnnnnnnnnnnnnnnnnnnnnnnnnnnnnnnnnnnnnnnnnnnnnnnnnnnnnnnnnnnnnnnnnnnnnnnnnnnnnnnnnnnnnnnnnnnnnnnnnnnnnnnnnnnnnnnnnnnnnnnnnnnnnnnnnnnnnnnnnnnnnnnnnnnnnnnnnnnnnnnnnnnnnnnnnnnnnnnnnnnnnnnnnnnnnnnnnnnnnnnnnnnnnnnnnnnnnnnnnnnnnnnnnnnnnnnnnnnnnnnnnnnnnnnnnnnnnnnnnnnnnnnnnnnnnnnnnnnnnnnnnnnnnnnnnnnnnnnnnnnnnnnnnnnnnnnnnnnnnnnnnnnnnnnnnnnnnnnnnnnnnnnnnnnnnnnnnnnnnnnnnnnnnnnnnnnnnnnnnnnnnnnnnnnnnnnnnnnnnnnnnnnnnnnnnnnnnnnnnnnnnnnnnnnnnnnnnnnnnnnnnnnnnnnnnnnnnnnnnnnnnnnnnnnnnnnnnnnnnnnnnnnnnnnnnnnnnnnnnnnnnnnnnnnnnnnnnnnnnnnnnnnnnnnnnnnnnnnnnnnnnnnnnnnnnnnnnnnnnnnnnnnnnnnnnnnnnnnnnnnnnnnnnnnnnnnnnnnnnnnnnnnnnnnnnnnnnnnnnnnnnnnnnnnnnnnnnnnnnnnnnnnnnnnnnnnnnnnnnnnnnnnnnnnnnnnnnnnnnnnnnnnnnnnnnnnnnnnnnnnnnnnnnnnnnnnnnnnnnnnnnnnnnnnnnnnnnnnnnnnnnnnnnnnnnnnnnnnnnnnnnnnnnnnnnnnnnnnnnnnnnnnnnnnnnnnnnnnnnnnnnnnnnnnnnnnnnnnnnnnnnnnnnnnnnnnnnnnnnnnnnnnnnnnnnnnnnnnnnnnnnnnnnnnnnnnnnnnnnnnnnnnnnnnnnnnnnnnnnnnnnnnnnnnnnnnnnnnnnnnnnnnnnnnnnnnnnnnnnnnnnnnnnnnnnnnnnnnnnnnnnnnnnnnnnnnnnnnnnnnnnnnnnnnnnnnnnnnnnnnnnnnnnnnnnnnnnnnnnnnnnnnnnnnnnnnnnnnnnnnnnnnnnnnnnnnnnnnnnnnnnnnnnnnnnnnnnnnnnnnnnnnnnnnnnnnnnnnnnnnnnnnnnnnnnnnnnnnnnnnnnnnnnnnnnnnnnnnnnnnnnnnnnnnnnnnnnnnnnnnnnnnnnnnnnnnnnnnnnnnnnnnnnnnnnnnnnnnnnnnnnnnnnnnnnnnnnnnnnnnnnnnnnnnnnnnnnnnnnnnnnnnnnnnnnnnnnnnnnnnnnnnnnnnnnnnnnnnnnnnnnnnnnnnnnnnnnnnnnnnnnnnnnnnnnnnnnnnnnnnnnnnnnnnnnnnnnnnnnnnnnnnnnnnnnnnnnnnnnnnnnnnnnnnnnnnnnnnnnnnnnnnnnnnnnnnnnnnnnnnnnnnnnnnnnnnnnnnnnnnnnnnnnnnnnnnnnnnnnnnnnnnnnnnnnnnnnnnnnnnnnnnnnnnnnnnnnnnnnnnnnnnnnnnnnnnnnnnnnnnnnnnnnnnnnnnnnnnnnnnnnnnnnnnnnnnnnnnnnnnnnnnnnnnnnnnnnnnnnnnnnnnnnnnnnnnnnnnnnnnnnnnnnnnnnnnnnnnnnnnnnnnnnnnnnnnnnnnnnnnnnnnnnnnnnnnnnnnnnnnnnnnnnnnnnnnnnnnnnnnnnnnnnnnnnnnnnnnnnnnnnnnnnnnnnnnnnnnnnnnnnnnnnnnnnnnnnnnnnnnnnnnnnnnnnnnnnnnnnnnnnnnnnnnnnnnnnnnnnnnnnnnnnnnnnnnnnnnnnnnnnnnnnnnnnnnnnnnnnnnnnnnnnnnnnnnnnnnnnnnnnnnnnnnnnnnnnnnnnnnnnnnnnnnnnnnnnnnnnnnnnnnnnnnnnnnnnnnnnnnnnnnnnnnnnnnnnnnnnnnnnnnnnnnnnnnnnnnnnnnnnnnnnnnnnnnnnnnnnnnnnnnnnnnnnnnnnnnnnnnnnnnnnnnnnnnnnnnnnnnnnnnnnnnnnnnnnnnnnnnnnnnnnnnnnnnnnnnnnnnnnnnnnnnnnnnnnnnnnnnnnnnnnnnnnnnnnnnnnnnnnnnnnnnnnnnnnnnnnnnnnnnnnnnnnnnnnnnnnnnnnnnnnnnnnnnnnnnnnnnnnnnnnnnnnnnnnnnnnnnnnnnnnnnnnnnnnnnnnnnnnnnnnnnnnnnnnnnnnnnnnnnnnnnnnnnnnnnnnnnnnnnnnnnnnnnnnnnnnnnnnnnnnnnnnnnnnnnnnnnnnnnnnnnnnnnnnnnnnnnnnnnnnnnnnnnnnnnnnnnnnnnnnnnnnnnnnnnnnnnnnnnnnnnnnnnnnnnnnnnnnnnnnnnnnnnnnnnnnnnnnnnnnnnnnnnnnnnnnnnnnnnnnnnnnnnnnnnnnnnnnnnnnnnnnnnnnnnnnnnnnnnnnnnnnnnnnnnnnnnnnnnnnnnnnnnnnnnnnnnnnnnnnnnnnnnnnnnnnnnnnnnnnnnnnnnnnnnnnnnnnnnnnnnnnnnnnnnnnnnnnnnnnnnntctgtctatcctcactgccattctcccatcagacatcaagtcttgtaaattccacctcctacctctgtctatcctcactgccattctcccatcagacatcaagtcttgtaaattccacctcctacctctgtctatcctcactgccattctcccatcagacatcaagtcttgtaaattccacctcctacctctgtctgtcctcactgccattctcttactcaggtccactaattccatgtcctcagtctgccttcaagcctytcctcccctcaagcctctgatgtatcttgtttattgtagagcagatgcagacagaaacagagctgtggagacacaatgagagatacagctggcccagtgggcttttgctgcataactattttgccgtgtgccacaaaatctcagtggcaaacaaacatttactcccaggctcatggtctttgggttgacggcaagtggcttatctaaactggacttggttgggcagctctgctcaggccgccggtctggctcagctggggtcttccttgctctgggctgggctcaggtctgttcctcacgtgttcattctgggggtccagactaaagaagaatcttccaaagaaaagactctcagtttccttcccccaaaagcagacccacagacaagtacatgggtgcagtgagcttctttgtaaagtgatcccaagaaatacaagtcagggagcggcaaagtcagacagagaagagaaaagcagccaattaaaagcctgttaccactgtgatcaactagtcccactggggaccctctatgggacaggaagtctgacttccagccctcattggttgaaggctgtccttgagaatattaaatcccttacacttttggcctgccctgtgctcacaaaaaacaggctcccagggtgatggagaatgcttcagagacagaaaaatgtgagccctagaagtgggaggctgacagcctgcatgagaactatccactgtacctgcatgtggactcgaagacagtctccgggaatatgggctgaggaatccacagtgtcaggtacactctcttttaccctgcatccatagatcaactcgcaggaaggcctctgattggccttcttgggtcatgtgcccatccatgagccagtcacaatggtcaaagccttagggcaccagtcctggggcatgtgttcctctcatggggtgcatagaatgagaaaagccccacctgagcccatgactggattctacacaggaaagtgaggaactagtaacagcagctctagcctccttgctggacttcaagagaccacagacaagagctcaagtctttttttttttttttttttttgagacagagtttcactcttgtcgcccaggctagagagcaatggtgcgatctcgggtcactgcaacctccacctcccaggttcaagagattcttctgcctcagcttcccgagtagttgggattacaagcgcacaacaccacgcccagctaattttttgtaattttagtagagatggggtttcaccatgttggccagtctggtttcaaactcctgacctcaggtgatccacccgccttggcctcccagagtgctgggattacaagcgtgagccaccgcgcccggcccagggaagtgggttttcatagctcactgcagactcaacctcctggtctcaagcaatcctcctaccttcagcctgccgagttgttgggactacagatatgcaccaccacacctgtagcctggcttatttatttatttatttatttatttatttattttttaaatttttgagacggagtctcgctctgtcacccaggcttgagtgcaatggcgcaatcttggctcactgcaacctccgcttcctgggttcaagctattctcctgcctcagcctcccgagtagctgggattataggcacctgccatcatgcccagctaatttttgtatttttgtggagatggggtttcaccacgttggccaggctggtcttgaactcctgacttcaggtgatccgcccacctcagcctcccggagttgtccggatgtatttttttatttttagtagcaatggtgtctcacaatgttgcccaggctcgtttcaaactcctgggctcaagtaatcctcccgcctcagtctcccaaagtgcttgggattacaggctggagccaccatggctggctgttgttcataattttatccttaatgcctgacatgctacagatgctaaacaacaataacaaaaaaaattgttgaataaatgagtaagcagcttttgagggggagaagataatgagctccattttggacatgtggaatttggtaaaaactactgctaaccccattgtccagagaagctcatacttcacatttaaattgtgtattggcaattataggatcttagatttgaagattaatgaaattatagacacatagaatcccagtgtcttagagtcactgaactatccaaacttaggtctccccagagccagaggagatgataaagcagcgacgcttaacctaaatgagattgggggcagaggcataaccaccttgatatttatgtaacatttgtgtgaaggcgcatatattcattttctgaagggargtttcagcttttatcagattccaaaacataaagacccattgactatattaccatttgtgtacagaaagaaaacagaggctgggagctgtggctcacgcctgtaatcccagcactttgggaggccaaggtgggtagaatgcttgagcccaggaattcgagatcagcctgggcaacacggcaaaaccccacctctacaaaaaatataaaaataagccaggcatcgtgatgtgtgcctgtactcccagctactcgggaggctgaggcaggaggatcgattgagctcaggaggtcaaggctgcagtgagctatgattgtgccactgcactccagcctgggcaacagagcaagaccctgcctcaaacaaacaaacaaagtagataccatttttcctaccagttaaatggaaattaaaaagagatcaatcatattcagcactggcaaagatgtggaataaagggcactctcatccattgttggtggggtggcagtttctgtcaaaataaaaaatattcatattctttaaatctcattttacttctcaaaatctttcctataaaaacatgcacacacatagagaaggatttatatacctaaatattcactgtagtattatgtataatattttaaaattagggaagaaacctaagtgttcataagtatgaaatggttaattatggtttataccatgagataaaccaagctgccattatgtgagcagggagatatttatgtactgacatggaaggaagttaatattttttttctgaggaaaaaaggtaataaaatgtgtatgtgtaagcatgtttcctttcagttcttaaaaaaatgacaataaggccggcatggtggctcacacctgtaatcccaacattttgggaggctgaggcgggcggatcacctgaggtcaggagttcgagaccatcctggccagcatggtgaaaccccgtctttactaaaaatacaaaaattagctgggtgtggaggcgggcacctctagtcccagctactccggaggctgaggcaaaagaatcacttgaactcaggaggtggaggatgcagtgcgccgagatcacgccactgcactccagcctgggcaacagagtgagacttggtctcggaaaaaaaaaaaaaaagagagagaaagaaaaaaaaggaaactgcctgctccaatccagacccaatgcctggacaccctcttcctggaaccacttygggcactccgcctgtcccccagcaaagagggtgtggaaggcttgtggttcctgctgcttctcttagggaaactggtatcctctgtcttctcctgctcttctgatcccctcttcccccagcacccggggtttatatctgtccctccctggaagyaccgaaggctcattccacaagaggactgcagggagtgggggcaactggtggaccaagccctgctctaagtctgtccctggagatcctgctaaggccccaccagctgaacactcctggatctgcccctgtcccaaaacccacaacccctgcgaggtgaagcccaggtctctcactgtggctgtcaagtcctttcatgactggcccatcttcccaacgttcctaccccgcaagctctgccagcctagatracatgtctttctctctttacatcctcagttccyacctccaatacctttgctttttccattcctgctgcacaaaagtcctttcccacccaaacaccagtcttttctctcccagtctccacttgctgacatcttagtctcctgttcatcctacaagacctgttcacgtcactcctccaggaagtcactcatgttcctttcagcaagaagggtcctctctcttctgagcctccatgtctgtcttatgactctcagtgccaagcactaggaatggcacagactaagtgtcgattcatgtttattaaactatacagattaacactgcaattttccagatgaggaaactgagacccaaaaagagacagcaactggcccagggtcaccagcatgcagatgcctgctatgatgtctctgcttcttgtgtctgtgggcctcatggaagcacttcaggtatgggcatcccccactgttcccaccccagcagggaactgagccatcggcttcttctgaaccctggagggagaaagagagagaggaaagaatgcccgacgcttcccctggggatcactcagcccaaggggacagctccagatgctagtcttggggaaattacagccagaggttcccaatccccttccccaccaggtgtgtttggggcccttcctgcctttctcagtggaggggagagctggatggcaggggactcattctcccaggggcctatcctctcagtccctgctactcctgtcccctcaggcccagagccaccccatcacacgacgagacctcttctctcaagagattcagctggacatggccctrgcctcctttgatgaccagtacgctggctgtgctgctgccatgacagctgctctcccggatctcaaccacacggagttccaggccaaccaggtgtatgcagacagctggacactggcaagcagccaatggcaggagcgtcaggccaggtggccagagtggagtctcagccccasccrtccatcccygccacccctgggcttccgcgatgagcatggggtggccctcctggcctacacrgccaacagccscctgcacaaggagttcaatgcagccgtgcgtgaggcgggccgctcccgggcccactacctccaccacttctccttcaagacactccatttcctgctgactgaggccctgcagctcctgggcagcggccagcgtccaccccggtgccaccaggtgttccgaggtgtgcacggcctgcgcttccggccagcagggccccgggccaccgtgaggctggggggctttgcttctgcctccctgaagcatgttgcagcccagcagtttggtgaggacaccttcttcggcatctggacctgccttggggcccctatcaagggctactccttcttccctggagaggaagaggtgctgatccccccctttgagaccttccaagtgatcaatgccagcagacyggcccagggccccgcccgcatctacctccgagccctgggcaagcacagcacctacaactgcgagtacatcaaaggtaggagggcaagcgctggtcrgcacctgtgcrgaaggtggaccttccacatccaccagggactttggcaaaccgaagcccctatctcctgtgtcccagggatacataaatacaagtcatatccaccagctcccaaccccttccatctaaggggagacataaccttctgaggggtgcacttactgcccctgaagggatctaagccatagttcgccacttgcctgctgggaggctgaagaggtttcctggccaacgcrgcggtctctggccatttgagtgggcaagcagacccggtcgggcttttctcctggtcagaggctggaagggaattattttccagccagattattgacacctagatagctgttgccagaaatgagtaggagtcccaccctcagtttctgagaacagtgcatttatgagatggaagaggaattatgtgctgaagggtgtgctgggtggggtggtgggggcaaggagacagcagttgggtgctgtgcccctaaggtccagctcaggctgtggtcaggaagtggtggatgctcctcctgttcatgtccccagcacaggccagaagaagaaccatgaggatgggcccaggttcttaatttctgaagggctatgggctttacttcctatcttggacaacatcaggagcatgcatgagttgacagaaggtaaggagggcatgcaaagaaaacaaaccaggctggggcgaggcatggaagagggagaggtgagtgtggcagggaggcaaagttataggcccagggagcaggagtgccccagagtagaccctggctctgatggcccactcccttctggccctgctgctcatgggtcgaggcaaacctagtcaagggaggttccaccatgaaagagcagaattagggggaaatgcaccaacttctcctagaacaagtcagggatggactaccagggctctgaggtccctttccatcctgacagctcctgagcctttcattctttactgtttcttttctatagacaagaagtgcaagtctgggccttgccatctggataattcaggtaagggctgcaggcacctgtgggactcagttcagggatgagcaggctgctctggggttggccccatcacctcgatctttttttttttttttttttttgagacagagtttcactcttgttgcccaggctggagtgcaatggcacaatctcggctcactgcaacctccacttcccgggttcaagccattctcctgcctcagcctcttgattacagctgggattacaggcgcatgccaccaagcccggctaattttttgtatttttagtagagatggggtttcaccatgttggccaggctggtcttgaactcctgacctcaggtgatccatccacctcggcctcccaaagtgctgggattacaggygtcagccaccgtgcccggcccacctgaatcttttataaggaaacaactgcattaataataaaaaaaagtgcactagctgaagtggcaccttgggggttgccagccttagccaggagatgastgtgtgggagagcagatggttgagggagcagggacacctgctctccagcctggatctgcctatcccttgcaggaaaaggccactgatcaggcccctgagagattcaggctgcactgaggtgagggacagaagggctgctccccacaaagtcctcctttggtccttctctgcctcccagtgcagaacccactgtctctgttactgccctcagggctccctcaaacccacctttgaaggccatgaggccaggcttttggtgctggaggcctgggctctagtccaggctctgctctaactttctctacgaccaacccattctttctctgtgcctcagtttctctgtgtgtataataagcaaattggaccagatgatccccagctatgactcttctcttccctcggacacttggtgtgccaaggcctacccaggccaccatgtttctaggtgggaatgggccatttccagggaagaaacagcagctcctccccaagccttcagaactcctttgtccttcagaactctgtgagtgggcaggaaggaccccccagcttcctctgatccactccaggcacatcatgccattcatcctcaccacaccccagtggtactgtcatcacctctgttctgcagatgaaagtaccaaagcacaaaggggcaaagagaggccgggtgtggtggctcacgcctgtaatcccagcactttgggaggccaagatgggcagatcacctgaggtcaggagttcgagaccagcctgaccaacatggagaaaccccgtctctactaaaaatacaaaattagccrggcgtggtggcgcatgcctgtaatcccagctactcgggagactgaggcaggagaatctcttgaacctgggaggcggaggttgctgtgagccatgattgtgccattgcactccagcctgggcaacaagagcgaaactctgtctcaaaacaaaacaaaacaaaaacaaaaaaaatcaaaggtgcagaggagaagcaactggccctgtgccacccagctactaagaagtggagtccagagagcctggctcaagagccaaactctgaaccaccacaccaggatagttcccacccctccccagacatcatctcayctcatcatctcatctcathtcatcatctcatctcatctcatctcatctcatctcatctcatctcatyatctcatctcatyatctcatctcatctcatctyatctcatctyatctcatctcatctcatctcatctcatcatcatctcatctcatctttactgcacagtaatctatgggaaggaggcagaacaggaggcattaccccccttatatggtcaagtgagacccagagacaaattatttgctcaaggtgacaatgagtttatggcagagccaggacaagaagccaggtttccagcttccaacccaggcatctttgagttctgattatgtaattccagatactggaaaagtttaggatttctccttctagtccactccacacctctcctaccagggtttgggtaraggagccaagttcagccacagcagatcccactctgatcttaaatccatgtttcatcccactctgcagcaccttatttgtggcaatagaaggcagttaagttagacccaatgacctctggaagagaaactgggactctaattggtctcatctctgtctaccttcctaaattctttattaaaaaaawttttttttgagacgtggtctcagtctgtcacccaggttggagtgcagtggcaccaccacagctcactgtagcctcaaactcttgggctcaagcgatcctcccacctcagcctcccaagtagcttggactacagatatatgccactacgcctggctactttttgtattttttgtagagaagggttctccctatgttgcccaggttgcctaaaattttttaagccagtcaaatttagcagtggggggactgtacatcaactttagtgacactggtgttaataagttctgataacccattaccattggaccagctcctccctaaacttgatcttcatctctgttgcccgtggcagttttgtgtatcagtctgtccagctcactctgccaatctctccaccttgtatctgcatgtccccacttttgctcctgtgctcctaaatacctctttttttctctctctctcccccaacctytctgcctgttttccctgcagccatgggtcagagccccctctctgcagtctggtctttgctgctgctgctctggttcctygtggtgagggcctttccagatggtccaggcctcctttgatgcatgagacacgggacagcctcrcctgctgcctctgcccatcctgaggatgttggccatgtgtgctttcagtgtaaccaagattcctgtcaatcccatctgcagggaactctgggaccttctctggtagctgccagaccggctggtggagaaacaggagacaatctggggactgaaccttacccagggctgtaggagtgagactctgaataaagggttgggccggcggtgtggcrggtacttcaagacaggcagcaactaacctggcgatagaagggcttcagctgatttgggggatgactggagaggaaagcgcttggccgtcatacctgctagtgttactcagatgcctcacgtgtccatctggaaagcttctgttcactcctccaggaagccttctgtgacctctcccacctggctggggtagtgaccctgtctctacgctcccacagagacctggatgcttccctataccaccacatgtccatgtctgtctgccacatcagaccatgagcttcctgagggaagggactgggtcggaggcacagagatggtgccaggaaacgtgtgaaactcagaaaggaacaaatacctgtgaatggctggtccctgcactgcccctgccttggacactgtcaagctctcattgtccgtgtgtgggaatggggtggacggtgcctaactccagcacacagagagaaggagagacgggagagagagcgctagtcctccatcggcacctcggtcaaattccattctcttgtcagcacagatgtaacttctgctctaatccatgagtccygaggctcctctcatcacrgctcactgtagcctcaaactcctggtttcaagagatcctcccacctcagcctcccaagtagctgggactacagatatgtgccaccacacctgactaatttttgtgttttttgtagagacagggtctccctaggttgcctaagttctttttttttttaagctagtcaaatttagcagtggggggttatataccaactttagtgacagtgacattaataagttctgataacccaccaccatggacaccagcaatacccagacagctgggaaagcattatttctggatgtgtctgtgagggtttgcagcaggagattggcgtgtgagttggtggactcagtggcaagttccactctcaatgtgggagggcatggagaggacaaaaaaataagggaaaggcaaattcacactctttcctggagctgggacatccttctcttaccattggacattagaacttcaggttctcaggctttgaacttggacttgcgccagcggccatgagacctgaagtagacagacctggacccccagcttccactaccacagacctcatgggtaacacagggcatcgaggaggtgctaggtacacgcttactttattgagtcagggatttggggccaaatgtctgtagggcctcctgctctggaaactcgactgagaatccccgacccttttccctgagcccctcagcagggaaaggtaacagccaaagccctgcaaagcagccacctaggaaggaagacaggaaatgcagcagtacagttcagtttctcattataacccatgtgctccccactgagagctccaatacccagcacaaacaattctgtccctccaagactgtactctgtgatcttggcctttgtagagttcctcttttttttggaattaggggagtggcaggctctggacttcctttagttagggtgtgtagacaatgagtgctcccttgtggattgtgaagtcaagtgtctcaggatcttaggagcagtggggagagactggctggcccaaagaccagcaaccacttggccgtggctgtccctttctggaggagctgtggctgcagcagatccctgtgacttagtcccagccctcacagggcctgcaccagcaccaggaggctcatgaccagggccatggagaagaagatggccaggaagaagcggtccatcacacgggccaggcrcttccagtcctcatggcagcgctgggcagctcggtggctgcggaaggtattggcaatggtggctacgtggtgcagtagggcttcctggcggcacagacatcgtggctcgtggcaagggcccgctggggggccagcccctccttcaggcgactgggggctaggagataactcaggtggcctggactgcccacagggckcccctctttcccgcacgcacaggcyccgtgccaggtgtcccagcaggagggccctagcccaggctggcactgggcggacactgggaccacagtaatgcaggttcatgataaggatggtgagtgctgytgagaatgtgaccatggtcatagtggccatgtagtacttccctgcaagagagagagaaagccaattgactcaaaacaaaagcctgtggttcctgagcttcccagccacctctgcacaaatggaaataagcccaccatgaagctctccagaccctccaagccccatggatggaagcaggaaggaggtaagggccgagttctccccatccttcattcctacacgtgggtcatcagaagctactgctctctaattgctcccgtcactgctggaggctgcactcatacacaatccaggacagtcccgctctcaaataacgacgggcatgagctggggcaagatacgaatcctttttgtacaaatgggatacccagaggacctacttcctaggtttgtggtgatgcttacctgagttaataaaggtcaagtgcttaggggagtgcctggcacacagcaagcagtcgacagattttgcctgtcattaggatctggggatactgatgttccatcatcaagggccaagtcgtgaggggtgttctccctggaaggagctaatcctttcccctcagtcttaaaatgagggcacgttcccaggacgcccccctctcactttctgcagtggggccgttccgcagacccaggccctgtcgcggccccgccctggggggaccccagcgcatcgtcaggtccccccgcgcccccgctgctcaccgatgagcggcacgctctcggccggtggcatgctctcggccagcagcaactggaagacggtgagcgccagcagcacggtgacgcccagcgacaccttctcgcctgagtcggcaggcaggtggaaggcgagcggcgcaagcagcgagatgagcamgcagggcagcagcaggttgcacacgtaggcggcggcgcggcggcgcagcagcagcgtgaaggtgacgtcggggtagggctcggagcagcagccgtaggtgagcacgcgccgccgcgccggcatgcccagcacgcgccactccacgttctccacgaagtccgccaggctggctgcagcgccgcgyggccgcacatccagttggtgcccgccgtgagtccaggagccgaacgtcaggccgcagtgctgggcgtcgaacgggaaggctgctacatccacgcggcacgagctgcgcgtgatggccggcgcgtcccagcgcacggcgccatcgtggcgcaggaccacgttggtgctggcggaacctggaggctgcgcgtcggctctgggggcaggcggggcagggctcacctaggctgtccagcctgaggagcagccccggaggccgggagcccagggcagacccccaggggctgaaagaaaccaaaacttctccccagaatattgaggctcgttaagttcgagacactcacgacgcaggggagcacctggccccagcgtctgctggcctgatggcaggacatcagcccttccttgctggagtcagcacttgcttatccaaagggcaccagtaggtgccagaggaatctggaaacagattttaccctctttccacgttttcccgccttttaaaggtggctgtcctttgtcttgccactatttataacttactggctctttcttgaatttctatttaagcaaggcccctaagtcactgccttcagagagaaatacttttgaactaaggcctctcccatgatgggtacagcagattaataaacttctgcttgtggctgggtgcggtggctcacgcctgtaatcccagcactttgggaggccgaggtgggcggatcacgaggtcaggagatcgagaccaccctggctaacacggtgaaacctcgtctctactaaaaatacaaaaaactagctgggcgtggtggcgggtgcctgcagtcccagttatttgggaggttgaggcaggagaattgcgtgaacccgggaggcggagcttgcagtgagccgagatagcgccactgcactccagcctgggcgacagagcgagactgtgtctcaaataaataaataaacttgtgcttgtttttttttcgttaatttgattcttgttttcagaacaaagcaacacagagggtggagtgcacctagagagacccgctgcctttcgaggcctggaaggggtggtgcctgaagggcccagaagggacacagacgtagccagaggatgtataaaaaggcctctgcagaacccagaggtagctccgggacacacagtgacttcccttgggggacatctgcaaaacttgtagaagggccccagagaaaatatgcagagctatgtgctggctgggagacacggaactggtcaaggagacataaagcagtgttccagagggctatgtcctggaggaaagagacccttasacaggctcttsggggagccctgagagacttagagctaaaagtgtgccctagagaggcccttgtgattcagacawctgccctggaccacacagtaggttccgaggagacgttcagcctgggctggcctgggatagcctaaagtgggggtgccatggaggggctgagtgcttggcagcttagaagggtcctggggaaaagcttccagggcagcgtggcaaccaggttatgtggtagggagaggggatcactacacccccacagctaagggcaagtctagagaggggtaagagagaggaggggcccagataggcagtacttgttatagagtacgatgtctggccgccacacaagactgctggggatgcggatggcatccaggccaccatargcattggggtcccatcgtaggtaggcatctgtccactcctgccgtatccacagatacaggktcagcacctggttccgttcatcctagtgggggcagggaatggcagagatgtggacatgtatatgcatatcctgccctgtctgtgcacactcccctgcagggctctggtcagcacccacaaacctgacttgtccataccgtccagttcccacccagacctgaccttgccatgtgaccttagtgggctcttctcttttctgcccctgtttcctcagcaggaatatggggtgagaatccctgcttagcagggattcagtaagttcaggtgaacaaaatattgggcacgaggtaggcacccaatactcagtacccaacagtcagtacccaacagtttgtaactgctacctttgttaatattaacatttacagaaaagaaattccatggagaataatcccagtctctcaccccttcatttcttgacactgtgacaggtaagactccacagctgtaccaccaccacaacgcaccatgtcgatgatctgggacagtgtcacctccagggtcacattcagagtctggtctgtgtctgccacaggtctyagggcacttgtgtagttggcaaagaggtcacggaacagcttgagagccagccggccctcagctcccaggcactctggagggwcagtaaggagggttgtccatcccaggccctagtcccagggcctctgctcacaccctccactcccagggctggggccctgtccttatgagtgtcctcctggtgtctgccttctcttgctctagctgtggctctagttcctccctggcctgcctgcagggacacatgaggtaaaggccatggagtgaactggtactatcttctggcgccaggctgacaaatttctcctccaccctccccttttcaaggacctggagtctgcctgcctctccacaaatgctagaggggcccaaataagccacaagagtccagactttcacccagggattctaaatcccactgctctgccccctccagtatctctcaaacctgtttccacttctccatctcgagctggtttcttcaaaacttctgatgcgatggaacactccctcactctgaaaacacacttccccaggctttactgacacaaattttcctcaatccctgacctaaacattgttcccatgaatcctgtccttggctcccatctttttcttcatcccagatttttctcctgagctccagaccccaatagagtacagtccactcctgagtttcccacaggcaccttcaactctgagggtccaaaatatgaactcgcttcctccctccatgctctgaaacctgcttcctatcccatgttccctatctcagcaaatagcatgccctcagcttcaacagtgacctyagttggaaatctgggaattatccctcccttctccctctgctgcctcctcctcggggaatccagttaatctccagatcctgtcagatcattcaaatcctccagattttgcgaaacatcgtcttgagtctaccctctcccctccaggtcagggccctcccttcactgtctccctttccccaaaggctcaccttcttctacccctcccatgccccaggaccacgcttttaagcatgcacatctgaccaggctagtatgctgctgaaacctttcagtgctccccgtcatctgcaggagaaagacctggcctggccggcaggcccttcaacatctggcscctctgattttcccagccctgtctctggaagctccccgctcactgtttccaccctagccaggcaagtctcctctcacgcacttcagcacccctctcctccaca

SEQ ID NO: 93294 - DNA, 84475 bp, Homo sapiens
  misc_feature (1)...(84475): n = A,T,C or G
tcccatctctactgaaaatacaaaaattagccgggcatggtggtgggtgcccgtagtcccatctattcaggaggctgaggcaggagaactgcttgaacccgagagatgggggttgcagtgagccgagattgcaccaccgcactccaccctgggcaacagagcaagattccatctcaataaaaaataataatacattttaattgtggttaaaaaatacataaaatttaccatattaactgtttttaagtgtacactttagtagcattgtttattcatattggtctgaattttttttatcttgcaaaactaaaactctgtacccatcaaacaactgcccaccctgcccccagccctggtaactaccattttgttttctgtttctataaatttgactttaggcatctcacagaaggggaataagacggtattgcacagccaagatcatgccactgcactccagcttggcaacagagcaagactctgtctcaaaagaaaaaaaaaaaaagacagtatttgccttttcgcagctggcttatttcacttggcatagtttcttcaaggttcacccatgttgtagcatgggtcagaatttcattcctttttttttttggagatggagtcttgctctgtcgccaaggctggagtgcagtggcgcgatctcggctcaccgcaagctccgcctcccagttcacaccattctcctgcctcagcctccggagtagctgggactacaggtgcccaccaccacacccggctaattctttgtatttttagtagagatggggtttcaccatgttagccaggatggtctcgatctcctgacctcgtgatccacccacctcggcctcccaaagtgctgggattacaggcatgagacactgtgcctggccttcattcctttttaaggcttaataatatcccatctcacaggccacctggcttgtccattcatctgttgattgacgctatgttgtttctgcctcttggctactgtgaacagtgcagctgtgaacatggtgtgcaagtggctctttagactttgctttcaattctttgggtaaatacgtacaggtgggattcctggatcacatgctaactctgaggaaaacctccatgctgttttcatcacagccatcctaactccatgctgtttttcatcatagccatcctcatgagtatggagtgatcatctcattgtgactgtggttcgcatttctctaatggtcagtgattttgagcatcttttcatgtgcctactggtcatctgtaaatacgactgtcccttggtatctgtgggggactggttccagaacctcccacggaccaaaatctaaggatgttgggagtatttgcctgtaacctatgcacaccctcctgcatcctttaaatcgtcactagattacttataatagctaatgcaaagtaaatgctatgtaaatagttgttacactatattgtttagagaacaatgagaaggaaagtctgtacatgttcagcatgggcacatttttttaataaaaatattttcaatccctggctggttacatccagggatgcaaaacccatcgatagagtgctgactgtatatcctcttcagagaagtgtctgttgaagtcccttgctcatttttaaatgaggtgacttgttttactgttgagtggtggttgtctatatattccagatattaaccccttatcagatatatgatttgcagatattttctcacattccacaggttaccttttccctgcacagaagggaaaggttgattgtgtccttcgatgcacagaagtttctaagcctgatgtcgtcttagttttacttttgttgcccgtgtctttggtgtcatatccaataaatcactgctaaatccaatgtcataaatttttcccgttttcttctagaaattgtatacctttatttcttgtttagtctttaatccactgagttttcacataaggtgtcagataagggtcttgggggccacatgttggcctgtgcaacagttaaagggccccaagcatagtcacatacgtgcagatgatgttcacacacagatacccaggcccaggagatcttggactccccaaggccatattctattcctacaactgctgtccttccccttaacctccttttgttctggccttgctagcacagacccttgcatgctaatcaaatgacacagttgagtttggaggaaacatacatcagtgaggaaaagtgaccacagaatccttccaggtttcaccaaaaccacccgtgacgtagataaaactagaattctggggactgggattcctccttttcccctgagccactacgtaaaggtgactgcattacagtcccatacctcttatctgtggccccagtatccattttttttaagacagggtctcgctctgttgctcagactggaggacagtggtgcaatcacagctcactgcagccttgacctcctaggctcaatggatcctcccacctcagcctcctgagtagctgggactccagacaggtgcacaccaccacactcagctaattttttgtagaaatgaggtctcactatgttgcccaggttggtcttgaactcccgggctcaagtgatccacctgtctcagcctctcaaagtgctgggattacaggcatgagtcacagtgcctggcccaaattcatagtcctaaacatggaaagttttgtgtacttcatttggcggaaagtctaacctgatttggcacgagacgacccatgatccttttcgtcctgcttgtattttgctgcaggaatatcagtttgatgagggtgttgccccaggccccaagtggaatatgcacacgtcactttcctaaaatcagaacaattcagagttctgaaacacacgaaacacagctgtttctaagattcttgactaagaggttgtggcttatgctatttttcctgactgtggcctcactttcttcccaataaatgtttcaatctgttgatactaatgttttttctcatgatacttgtaagataactgattttaacaaaaggtggcacacctattaaagacatggttaagtttcattggctgtatagcatctctaattggaagactacatggcatctatccaggttggagttgtaatcacctagggatgtctacatctgtctacctagatcagtctgtcagttccatcgaggtctgtatttcaaagtccatacataacacacggttcttcccattttacagaattattttttcaaaccaaagttcacatactgctggtgggaacaggttcaaatagggaatgctgatacatatcaacaacctttgagacaaacctgttcacacagtgagtgtggagcccttggcccccctactttctctctcgcaggccccgacatcaccctgggcttgcgctgttggtagtgttcaaaggaaaactttagaaacattaaattttacagagtttaattgagcaaagaatgattcaggaatcagggaacccctcaaaccagaataggctcagagagactccagtgccactgtgtggccaaagacttacggacagaaaagggagtgaggcacagaaggcagaggtgaggcctgcaaacagcagggtggctacagctcgtgtctggcttattgaaacagagtttgaagtgctgctgcctgtgactgattcaagagtaggttacagtgtccacacatccaattagatgactgttcactacgtatggagaaacctataggctaaacttacagtatgtaaggaggcggcttcaggctacagctgagtagtgtgtccttacagttggaaccaggagttcatgggaattcttcatcatccagtggtctgtaaatgttgcccatgctgagtagtctgtccttacagtgtgaaccaggggttcatgggaattcttcaccatccagtagtctgtaaatgttgcccatgctgagtagtgtgtccttacagtgtgaaccaggggttcatgggaattcttcaccatccagtggtctgtaaatgttgcccatgctttagttttgttacctggttgctctgtttttatgggattgtgagaaactgaaaaactgtgactgctggagccattttcccacaatccccattttttaaaaatcccataaaggctctctcgtgagcaccgcacgttttcccttgtagtcacgagggtaggggctggagaaagcagcagagatagtcaaaaacccacagctacaaaaaatgcactcctaagagcaagtaatggcgagggctaaaaggcactgtgccccttctgggccattctaattaccacatttaaatggttttgagaaaagagaatttttatctgaggaacgcgagttcttttaattatcaggccgagagagacattcaaatgaggcgacaatcgcgccctactaccccttgacctgtgttcacctctttaaactgctactggtggcaacagcgccacaaacagctataaattaacctaatgacgccacaatggacactatacccacactcaatagctgaacaacatatagtcagtcactaatcaatgttatttctgtaaaccagtgagaattcctcacaaacaagttcctattagtccactccctggcccccttttttgcctttaaaatccactgttaactgctaatcggagtacacattcagggcgccttgaatttgtgctcaagtgtggcccaaataaactctctacttagagaaactgtgtctccgctcgttttcaggccgacagtttccaaaatgttagtattcagcctaacatgagaaaagtcaccatataaaagtgaggggggaaaagcaaatacaggataatctcaattgtatataaaatttatatacgtaaggacaaagatacatagtaaaaaaaaaattctggcaggtattaaggctgaaaaaattaaaacagtccagagcggtctggctcaggccagcctgggcctgccgagtagctgggacctcagccaccgcgcctggctaagtattaatgaatctgttttagagatagggtcttgctacgttgcgcaggctggtctccaactcccaggctcaggtgatccgcccgccacagcctcccgaagtgctgagcctcccraagtgctgagactacaggcctggccgcccgcccgccagcttaattcacgtaaattccagacaaacgtagaaagtggctcctttagtaagccacttgcggctgctgctcatcagggttcgcctggggccactgagaccacgcgccggtgcccgccctcccgctgcggtccgattttctgaaccaaccaggcgcttccgggcgccttgccccagacgggcccaccgcctgcgcgggccgagggcggcgcacctgcccctgcgcttccgcatcgaaggtgaggtcggaggaagagaagaccgcaacccccaagctcccgcggcgtggggtccggggggggacacgaggcggggccaccaggacgccgacagcctcacgtctctgggcccgcggcgcgcaaggcatgccgggacccgtagtcccgcgacgttgcgactcacagtgcgcgatgggagtggaggagagcggctcgcggtgcatgccggaactcgtagtctcgggatgctgggtctcagcgcgtgatggggtaatggcacgcaggcctgcgttgaacgctgggactcgtagtcccgccatgcyctgtccgcggtgcacgccgggatacgtagttccgagcgcgccaagaccgtcactgggactgggcgacagcggcccgcgttgcatgccgctgctccacggtgccggcgctccgaggaaaagtaggtagggctcaggaacgcagttcttcacggccggcacgcagggttggtcccaggacggagccggctccggccccgcgcggcgctcgtatttacacgcgcacgtacgcacgtacgcggcgcccttgcgtgacgtcacgcgccctccaggaagtcggcgcgggctaggcgacgggtggaagccggtaccgagaggaactacagcgtcgccgcctgggttgtgtcgccgcggtaggcgctgcgctctgagcgcagcgcaggccccgtaccgaccgcccgcccgccctctgtccgcgatggaggtgccggccgcgggtcgcgttcctgccgagggcgccccgacggcggctgtggccgaggtgcgctgcccggggcccgcgccgctgcgcctgctggagtggagggtggcggcgggcgcggccgtgcgcatcggctcggtgctggccgtgttcgaggccgccgcctccgcgcagtcctccggggcctctcagtcccgtgtagcctccgggggctgcgtgcgccccgcgcggccggaacgcaggctgaggtcggagcgcgcgggcgtggtgcgggagctgtgcgcgcagccgggccaggtggtcgccccagggtgagtgtgctgagccgggcggggccgagggcgggcggctccggggagggatcctggaggacccccgggctgctgcgtccgcggtgggcaggggcgcccctggtgagggagcgataaagcgggacgcaggcactgcgcttctcccctaaaactggatagtcaccacctgtggttttaccaacggggagcattttgagataaaaggaaagggtcctgcgtagcgacacgaagttactgtttggaaaagctatgtttgtttctttctttctgcagtgatagtccccgccccttcctttagctccacctttgtgacttaggaaaactcatgggtggctgtgagcacaagagtcatcaggcaggctccagacctgttattgaaatataaactgttgggtgtgtgcacatctttaaatttttgtaaactttgtgaaacgcagttgtaaaacctggtgcagttctgtttcgtggctaaggaacgggcggaacccaggcctgcagcgaaggcagtagccccgtggttgaccacagtgggcattgtcgcaggctgcttcagggtgacgtgggcgttgtgacagactccacagctctcagtagctgtgctctgaccccagaaggggatatgtttccgtagcaccgaagtgtccagccatgtttgaatctacccttgtgttctgggatgggcgggcaagtggacacgcgtgtgcgcctggctctggtagttttgattgtgagaacagaaactccagggagaggtggacactccagcccgcagtgggccgggcgtgagctccctctgggaaaggtgccgctccttctggggatgccactctcttccctcctcggcagccgcggctcctcgtccctttggcttgccctgaccctgtgtttgttgaggatcttctctgcatctggttccgcaagagtgaggactgggacaggagtcttcccgtcacagccccagaacgtcctggctccgcttcctttggagacagagcctgggtccttgaccctcggcacgggcactcactcctgccccctgcgtgctggtgggtggggctgggaggttcagggccttgcctcccagaaaatgcctkcacggcttcctcagtgggcactggccgtacctgggaggattgtggaggcagatcccaatgctggtgtattccctggacagaaaaccmcaggatggaagatccctactgaggtttcattctgttcctctgattgtacagaaagggctgctttggcctagacaggtgagtaacttggttatgtggcaagttagtattgaaattccatgttcagtcagtctagtgaataaaaccaacccagtgcatcagtcagtcagccagccaggtcatgagcttgatgacgggttcccagcagtcagtagtgtttacagggaggtgctgtttgagatcttggggtacctcacagggccctttgagacactgatgtgatatcatttctcctcagatggagcgtctgtgtggcaccaggtgtccctctggttccaggaggctcatctctctgcctccagtccatgggcggcaggtaaatscttgccttagagaaagccacagacggtgctgcctggaatttgaggtggcttcttccccgtttctgtgtactcctgtgggtttgtgtacatgggttttatgagcgttctggggagtgtggtggtggtggtgtgacgtcagcatttccggaggtgttcctgcccgtgcagtgggcgtgggtgccatagatccaggaaggagcgactggaagggctttagtctaaagccctgtgtgcatgtgccctggcagttctggtcgtctgtttggaatcaggttcctgcctcgyagttgcattagccagctgaattcgggaggtgcatttgcagcaggagtccatgctgctgacggtcggctccgtgtggtccagatgacactgccctggctctggggggctgccgttgggagccggtatgtgttggcctccccaaaatgcctgctgcacctttgtggaacacagttgaaaattactagattcagtcacttgttgacagattttgtgaacagggtgggttacaagtgcgtttctctggcagcacccctgtgatgggagtagcgccctgcagtgtggacttgtggtggctttgctgacgtctctccatagagagttgcaggtagaaatctccgcagcttttgcttaaagccaacagtgatggatttctccaggacgttgagttccagctcagcagctctttatacacaatttacagctaaccctcgaacaacttgctttggtctgcgagggccacctttatgtagatgttkttcagtaaatcgtctgctgttcgcatccatgggttccamgcccaacactgtttgctgggtgtggagcccagcctgtttatacagagcgctgactttctggatcagtgggttctccaggttgactgcgggacctgagtatctgtggatgtggaatttggtatctgaaggagtcctgcagcccgtcccccgtgagaatgagggactgattaaatatggaagtctttccataatagattgtgccgctttgtgatgaagtagagaatattgggcataattccatcctgatgttggaaggtgataggtgtgagtttagttctcatccctgcgacgcctctgggacgtcggttggtgaagagcatctgccttcctctagagagcctgagtcactttcacttaaaaggtttttcctctgtttttctttttttctctgattgctggtgtggtcatttccagcaacagctcygcggttctcttctgcggtgtcccaccacttggaggctggaaggtgangacatcagggaagaggaactgccttcaaccgtcattgactctgctcaccagcccaggtgtttgatttttactaagcaagttcccagaattgcacgtgggctgttttataattgacttatcttgaccacctctaaaagttctcttgaagttacagattcctgagatctttatctgggagagcaagcatttggttgaagtttgctttaaatgtttatagactgattatcgtgtattgatccttagagtacccctttcagattatgcaaataacacgcacttgtatagacaagcatgggcagaatccacaactgcttttgtggaggctccaaccctggcttcagctcatctgcgtgtgagggcaggggaggtgcagaatctgctcctgggcttgtgctgaaaggaggtcccttttaacagggacctcccagcaccaatggaaccccgtggctcttggtgagagagagcaggtcctgcccagctgatggatcagaaactcaggtgtcagaaacggggtttcagggcggctgcctgaggaatgcgcaggcgatctgacgttggaattctggcttgggcgaagcccttgatgtggccacacagttttggtccctcaagggcttactggttgcctgcgtgccctggtggctccttggtgaggggcctttggagaaagtcttgggaaatcagatttcccgagggtgttgttgaggacattgctgacgaggtgtgggatttayggggaggacagcctgtctcttgaggcttggtcgctgtgttcaccctgcaggtgttatgaattagcttctggcccaggacggttttgggaccggggggtgcctacccaytgttgttcctttatcttgatcctttcacagggcttataaaaatacttatttttcaggaataacgggaagtatctttgaaaacatagcattaaatctgctgaactggagcttgcagagagcagacagcggcagcagcctgagtgtgctaagctcaagcgtcgcttgtgtgccatcaccttagtgaaggtggctcttgaccccactggccgccggctgcttgacagtaacttgtttagctgagactgtgtttgagaaactgagaggtgtggatgttgcttgtacatgtgcagccagcatgctcacagtgccgaggagcagastacgcgctgctccagagcgtagattagaacgtcagtctaaacagttctttatagcatggaattttaacaaagaaagaagaatcccacgtgggtatgtgtgagtgagccttgtgtagcttagtgtcggttactgaggcggagcactgcggagagaggtaatggaacctgtggccctgtgaaacctccctctataaatagcaggtgtgagtgaacctgtgaaaagcaccagcaccagccaggcagggtgggtccgtgccctcgttgcctgcattgttgtcaccaggcaaggtgggtccctgctcttgttaccttcattgttgtcaccaggcaaggtgggtccgtgccctcgttgcctgcgttgttgtcaccaggcaaggtgggtccgtgccctcgttgcctgcattgttgttaccagcaacatttatcctaaccacatcagtggttatttttagacaaagaaccattctgggaacttaaaaacactgcatttgggtgaagttacaatagtcactagattgtcgttttgatctttaataagattgtatgtttttgtcgggcttcatcctatctggcagaagtaagaacctcctcactccattggaaagaaactgaggttccaagaagtttggacctgccctgccccttacagggtgtgaggtcctggtgaggaggacggtgcagggacctcgtggtctctactcccggtttctcygcggtgctccttacggggtgtgaggtcctggtgaggaggacggtgcagggacctcgtggtctctactcccagtttctctgcggtgcyccttacrgggtgtgaggtcctggtgaggaggacggtgcagggagatgcctcgtggtgtgctcaggcccttgagagagcctctgtccttggttctctgcgtgctgctctctgtagaccaggtttcagccctggagattcctagtgtggggggagtagctagaacaatagtgtttgtctgcttttataatatttatgtggagtacaattattttaatagaaaatattctgacaggtcaccatctttcagaaactaagtcttttttttcctgcagatttctttgctttggctttttcccagtcactcacagggaggtatttaaatcgccacagaaaggggaaggtacctaaaatgatctgggagcctgcrgtgactggtgagaactaacaggcggaggccgtgtgcgagggttgatgacgtctgacagactgtacctgtgcctttagcgtgtccacaggaagggcatctgcattcaccagcgcagggtgtgagagtgccacagagaagcagaaaaacattgctgaataaaatgaagatcattccaacagcaacggtattgctgtctttattgctttgtagattttggaatgagaatctctgagaaatagtaatacagttagaataggctgcaacctaagattagtccccgaatttattgttctgtgatgagggagtagaagcctctgaaattctaaatgtgcttcagtcagtgcacgaacgtcgtcacctaagggtccggtcctggaaataaggacatttcgttttcatcctggtaccaagaatcttgatgaattggtaattcttttagaatagttttattattaacaattctaataattatttagaatacttttattcttccctgttgacgcctgcactatttaaaggatgatactttaaaaaagatatttgtgcctaaaatttggggggctgtcactttgtcagcccattaaacgtgggtaagttgcacttcaaacgttttgctttgtttttcccacttttcacctaacagaaaaccactgggccttgttacttgcttggttttgttcgtctgtgatttacctttgtcatgggtttttaggtatctccgatctaatcttttagataaaggactttgaagcacgtctgcctggaaatggtttgtaggtttcagaaattttgtgtgcattatcagatttgtctccattttcatggtttctttaaagttagttttaaagtgggttatgtgaaatcatctagtatctgggtacagaggaatggatgaattctcagttttatgtgtgttttaaaagtgcacaaatacaaaacggaaaacaagcgatgtaagttgtctcagaaaaaagtgctttttatattttcaggagaaagagaatgtagagagaatggaactgatgagtwtgaagagattcaggtgatatttcttaaaggataaatgcacattttaaaggttatgaagagatggtcttggtaggtttttaaatatacatctagcatcatatgtgcaaaattccttacaatgttaagaggaacttgagctaaaacttaactcatttaatatttgtaacatttttgaagtagcgtttaaaagacagtaatttccctacggtgctttaaatggtgaagaatgctggtgtcgtacgattttgatgcattttttgtgctgactatagactggcgggaatgatgcagttagcgagttgatacccagcatcatgttggcttctccagttcactggtgggcctgcaccacagcagttggcttctccagttcactggtgggcctgcaccgcagcagttggcttcgycagttcactggtgggcctgcaccgcagcagttggcttcgccagttcactggtgggcctgcaccgcagcagttggcttctccagttcactggtgggcctgcaccgcagcagttggcttcgtcagttcactggtgggcctgcaccgcagcagttggcttctccagttcactggtgggcatgcaccgcagcagttggcttcgtcagttcactggtgggcctgcaccagagcagttggcttctccagttcactggtgggcctgcaccgcagcagttggcttcgccagttcactggtgggcctgcaccgcagcagttggcttcgtcagttcactggtgggcctgcaccggagcagttggcttctccagttcactggtgggcctgcaccgcagcagttggcttcgccagttcactggtgggcctgcaccgcagcagttggcttcgtcagttcactggtgggcctgcaccggagcagttggcttctccagttcactggtgggcctgcaccgcagcagttggcttctccagttcactggtgggcctgcaccgcagcagttggcttctccagttcactggtgggcctgcaccgcagcagttggcttcgccagttcactggtgggcctgcaccgcagcagttgacttctccagttcactggtgggcatgcaccggagcagttggttggttgtcctgagcataccaccagggggttaaagtgttttcaggctggaagcatttgacaccatggctccctggggtctgtggaggttctgaggcaaggactttccttgcaggtctgtttacccagcagagagggcagtagggtctgaatggtgtggtgcacgtggtgccacgtggttttgagacgtgctgggaactggttttgttggatgactcgctctagaccacagtggcagtgttgaagctttccagccacggctctgtggatgtgtgcagtgttgggaatcaggctgggctgcccttgttccttcttyacattcctcagacgttgtgctttacagccacagtttcagtaaccgctgccagagccccacctgtgcgtgttctccaggatggctgcgtctgggctctgggcgactgaaccaggtgcagagcgtcagccacagctgacgactgcactgcactggactccagcctggggctcccacccctgtggctgcacaggagacaaaacaacaacacttgttcctttgaagctgtttgttttttgttttgagatgaagtttcactgttgtcacccaggctggagtgcagcggtgcaatctcagttcactgcaacctccacctcctgggttcaagcgattctcctgcctcggcctcctgagtagctgggattacaggtgcccaccaccatgcccagctaattattgtatttttagtagagacagggtttcaccatgttggccaggctggtctcgaactcctgacctcaggtgatccacctgcctcggcctcctgaagtgttgggattacaggcgtgagccaccgygcccaactaatttttgtatttttagtagaggcagggttttaccatgttggccaggctcatctcgaactcctgacctcaggtgacccacctgccttggcttcccaaagtgctgggattacaggcgtgagccatcactcccagccacacccggctaatttttgtatttttagtagagacgatttcaccacgttggccaggctggtctggaacttctgacctcaggtgatcctgcctcagcctcgctaagtgctgggattacrggcgtgagccaccrcacccagccactctggctcttttgggacataatttttgaccttaaagttgcaagaacagtgcacagaattctcacaccagcttcaccccagattccgcaaatgttaatgctttgctgagtttgcttatctttccccatgcacacgcacatttttctggagttggagagttagttgcaggtgtgatgtcacttcacccctaaatacttgagtttcctgaaaacaaagacgtgctcttacatagcrctaatagtcctaataaagtcctttgtaacaaaagcaagccctggaccccacgtggcatcrctggttgaaccctcaagagtcagctccttcgtctttctttctttctgtatcattgcctggtttagtaggacatccctcagttagatcgcagctgtgcactctggtgagactgtcccagagcctgcgtttagtgaaggtggtgtctgttgtaaaaagttacaacttttcctgttgtaattcagtatcttgaaagagatactttgttaccayataaatacatttgcaccaagctgacccacattttgggtatctgtcagtgattcctgcttgaatcgcttcatttctaggatgatagtccagtggtggtgttctcaattccagcatttcttctccactttttggttgactttctgccrtaagaacaaataaggccaggcgtagtggctcacgcctgtaatcccagcactttgggaggccaaggtgaacagatcacctgaggtcaggaattcgagaccagcctggccaatatggtgaaaccccatctctactaaaaatacaaaaataggcgtgatggtgcgcacctgcagtcccagctactcgggaggctgaggcaagagaatcacttgaaccccagaggcagagattgcagtgagctaagatcacaccactgcactgcaaactaggtgacggagcgagactccgtcacaaataagtaacatgtctatttagcagtgtaggctcatggtttcttatttaatggcttataatctgttattgttattatttgccttgacacaaaacttatcccagctgtggccggcgggatccccgtggtgctggttcccggcggctgagtcttgaggcattgccgccttgtctgcataacggattctaggctgctgctctcctggccacagtcctggaatcagccattctccaacaaatcctgctgcttcttggtggagaatgacatttagaaacccaaggtctaggtgcaaaaaatacactcttccctctaaatacatttctacactcagaatgttggaacttagggaagaccctggagccctcctgatctgtagaaggaagggagaaggttggacccacctggaggcgatgctcagaggtgatggcgtccatggtccaggcccagcccgtagccctctctgatgtacccatgccctcggacctcccctgagagagctgagaggccagaaccccacagagtttggtacttactatacttgtgtattttgaggcaaataacttgtttagaagttgcatgtcatggctttctcatggattttctttaggacaaaccagaaaacatttattggtgactgattggacgtttttgggctgagctctttggttgggtgtttttacgtttgtgtatccgcattcaagaatccacaacgtgtcacacccctttttaaggtgtggagacgtttctctgcctggagcgtggaggctggaatgagagcgttcagggcttttcacccctgttttctgtcagcatctgcaaagacgaagtgtagaaatgtctcgtattaagaaaagacrttgctctctgctccctgtctgcacgcgggtttcccagcctttgcacacacagacattctgagccagatggcctggctgggagcatcctgcatgctgtgggttgctgagcagcttccctgcctccaggtgtgatatccaggagtgtctccagccactacaggagtcctggggtggggggtggagcagagcctgcactagaataagacagtcagaacctttcaaccgcagtacagaaaattacgtgactccgacgtggccagtatgcgagtgattttctrcgaaggcctgtgtttggtcacgttgctggaagcctgcggagtgctgcctgcgtgcactgggcgcaggtgcccttggcgtcaggagccggccttgtctctgccaccgggaccttgcgtggttgccatttccagccctcacctgcttcctactcgtctgtcaagacccagctgttacagctgctgtgacactgttctagaagcttccttcctcgtgtagaactaggcatctgctgtagtcatctgccggtggcacctccgtcttgcagtcgctctcgtctgactcgtattacactgttggtgacagcaggcagtgcgcacccgactcagcttatagtcaactttcttcagacctcaggctgcgctggtggcccaagggaggctgtttgtgggaagcagggccagcttacactcgctcttagacctgtgctggggaaggcaggtggcacctgggcttgctaccagcccttccttggagcaggaggcccccrtcctttgtggcagcctagtgtcaatgtgygacgggtcacacagcttcccaggcaggactcgggctggggaacagtggacagctcccagggtggactcggggtggggaggagtggacggctcccagggtggactcggggtgggggaggagtggacggctcccagggtggactcggggtgggggaggagtggacggctcccagggtggactcggggtggggaggagtggacggctcccagggtggactcggggtgggggaggagtggacggctcccagggtggactcggggtgggggaggagtggacggctcccagggtggactcggggtggggaggagtggacggctcccagggtggactcggggtggggaggagtggacggctcccagggtggactcggggtgggagaagagtggacggctcccagggtggactcggggtggggaggagtggacggctcccagggtggactccgggtggggaacagtggagaaaacctttgcagaacacactctgcaggcgtttgtcagccgttgatccatttgtgtgaagccccactggctggaaggtgccccccgcccgccatggagttttctgggcaccttggtgggtcgtctgtcggtcatacctttgagtctttctggactcctctgttccatgcgtttatgttgtatgcctgataagttctgaagtcasgtagtaaaagttctctgttatttttgaaaattgagattctaggttttctgaacttccatataaatttcagaagcaacttgtcaatttctacaaaaaaacacctgtttattggttaaactagagccaccccagatccttcttcatgttaacatgtttaggagagattggcaaaatcctcctagttcatatttgaggattcctttccctctcttccccttgcagrgggtagagcaaggaggagcccgcggtgagctggtgtcttgcatggggcagggggtagagcgaggagcccgccgtgagctggtgtcctgcgtggggcagagggtagagcaaggaacccgccgtgagctggtgtcctgtgtggggcagggggtagaatgaggagcctgccatgagctggtgtcctgtgtggggcaggagctgtgcagagtttccttgcagaaggctgattgcaaaatgatgtcagctggagaccagggaagcctgttagaggggctggggctcccaagtggggttgctgccaggactgggggagcagtgcccagggaaaggacgtggggccattgggaggactgggtttgggtgttggcggtggggccgcagagccctgtggatggacgaaaacagctcagccggggagttgggggctgccaggcatcggakaggagcctggatgtggaggccccgagtgcgatggcggtagggacacagactcctgggcggggatggcccctgtggcctcagcaagcagggagcaggtgtccctgaggcctgtgaagcctggcagtgtctttgagcaggtgtggtgaccgggagggaggatggtccagtgtggggtttgtgcgttttttttgtttttgtttttgttttttttcagagattgggtttttaggttaagtctctgctcattggggcattttagggcagaactctaakcattcattgtaaagtattttgataaaattaaggaaatcatacttgtcaccttagaaagtttaacacactttttcaaacaaggtgtcactattttgttgtctggtttaagaaaaaaacctgatacaggttgagtctcccatatccaaactgcttggaaacagaagtgttttggatttctggrtttttttggattttggaatatttgcacgtatacatgacgagatgtcttggggatgggacgtgagtaaacgcggaatccatttgtgttgcacatgcactgtgtacgcacaggcccaggacccggaggagctcagattcttgatagtcaccggcagcccactccatccccgagggctcggagccccgcaccgtgtgtcctcagcaccgttcctcctccagggtgatccgcacacgcccatcctcctccccaggaagaactcccctccactcccctccaggctacagacccgcccctcccattctccctgcaggatgctggctacagacccgcccctccgagtctccctgaaggatgcaggctacagacccgcccctccgctcccctgcaggatgcaggctgcagacccgcccctcccagtctcccagcacagcctgccatggcacagtgggcatggaggatgtggctccgccttgtttccgcctgtggcctgatccttgcgccctctcgatgacatggctgggggtcttggtgggccatggggcatcccgcctggaaaggtcccattgacagatgcagcttgggtggctgtctcatgtccgcgggtcagggtggtcggagcagcccggctgggacrggagtgtgggggctgtgagcacctaggggcgggtgctgagtgctgggcggcctcatgtctgcagggcagggtggtcggagcagcccggctgggatgggagtgtgggggctacaggcacctaggggtgggcgctgagtgctgggcggtctcatgtccacggggtggggtggtcggagcagcccagctgggacgggagtgtgggggttgcgagctcctagggacactgagtgccgggcagcctcgtgtccgcggggcgcggtggtcggagcagcccggctgggatgggagtgtgggggctacaggcacctaggggtgggcgctgagtgctgggcggtctcatgtccacggggtggggtggtcggagcagcccggctggggtgggagtgtgggggctgcggacacctagggtcaggcgctgagtgctgggtggtctcatgttcgcagggtggggcggtcggagcagcccggctggggtgggagtgtgggggctgagggcacctaggggcgggcgctgagtgccaggcggcctctggtctcatagccttcagatttcagcacttcttccatggcttctgccagaagaccactgtttggacaaataaaacagtttgtgtttatataaaacgaacattacagtcattttgtcaggaaaatgtagttgcatcagcctctgtctagactggraatgatatgaaagttttagattttataaattctctaacggaaatgtcagaggatcacatataaatagtgtrttttgagacaactttatgttatccccaagtctcctctttggaccagacatccttagttttttcagctgttccacrggtggcacgggggtggtgasgtgtggtggcgtgtcatttttcatgagagacacctgtaggtggaaagtcctttcattttatagacaaagaaatgccctcaaggggtgatgtcacctgcctacaaagttatgcaagrgttagtgtagaattggtacaaaaacctagattttaaaattcttacttgggggctcttttgataaaccaagagattttaaagtgttgttccccttgtgtttttttgtagagyggttctggtgaggttggaaggatgcagccacccggttgtcatgaaaggcctgtgtgctgaatgtggccaagacctcacccagtaagtatccggaagagtgagatcgctgcctgctggggctcgaggtggtggcctccggggagtccgagaagctgtgctgggaacacagtgaggcccttggtttcccagcggcagatgcagacgcctcccttgggccccatacgagtcacactcaatgggtttccctggaggcagtccttcctgctctgtgaccccagcctcatgccattctcaggtgtggtgggggggcatgctggagggccgagacctgttttctcctgactgaagaygcagatcgctgagtgcctggagcagcccctccctctgggccgctgagcgccccatgctgggggctgctttacctctaatgccaagtgggaggtgcggcagctactttttctgygttttcatggttgagggcctgtttctgcttctgtgtgactttgcagtttgttttcatgaaggactatggctctgtgtgttcatgagtgtggccacgagctcagtgtttccaccagttttcctgtctgtggagaatgtttccacgtttgccgacagaatcaagtctgtgctaagatagcagygtgtgtccgttaaaacatcagctagaatcctgtcacttagagcccagtgtgcatctgtgcgcagagactcagctgaaagccctgaacctgtccttgcacttgcaggttgcagagtaagaacgggaagcagcaggtgccgctgtccacggcgaccgtgtccatggtgcacagcgtgccggagttgatggtgagctccgaggtgagcykggcatcagtggcggcgtgttggggaagcgtggtgctctgaggagggcggctgcaggaggagggtggctgcagaagcacggacrtgtggttgtcrtcgtcgttactgaaacaacccctcatcacacggatgacttatgggactgcggccttcctgaagcagggacggttgcccttggttctccacagacaagtctgcctgcaaaagcgactcagggccccgaggctgtgtgacctgcgtgtcgggaacaccaggtgctgccgccgcagctgtgaacagccaggctcagcctgggttcccttgagccaagtcctaactggggagggatgtgacagctgctcatggagctcaggaggtggccgcrctgccgaggcatgtgctggatgacccgggagggcaaagcgyatattggggcagataatggcgaggagtcggtggccgggggtaggggcggggggacgyggttggtagcaccttgttggctacaggagcggctgctgctggyaccattgggaagctggctcgggagagtgggcacatgcaggggcgggttgggggtcccaggagtgtttgccttgtagccgacaggagagcccatggggggtacgcagggtggagaggacgggcaggtgttcacgtgcccagttaagagtgagatgggtttttatcttcgagtgctacgcctcgtttatgtatttcaggagttgctggggcactgtgggtcagcggctccgggcacctcctgtgcttgaggcagacaccgtctccccgacctcgcttcaccccgtgggtgaaaatgctctgggagctgagaaaaactagtttgtgatcttacagactttcagggctgcacagttttgtaaataggtaaaacactttccagtgttacgattttagtaaattcgtgcttttaaatgatggacaccaatttcagtctatctttttatgggaaaagcaaaatgccagatacaggattctgggttttctgaattaccaaactttaaacaaatgtaaaatgtgtatgcgtaaaccaaagctggcaagtttgagggtgaagggaggaggaagtaccccccatctttctggcacctgccagcccttccgtgcgtttcccttcggggatgggcacgggaggaggtcccccctgagcgggaccaggattttgttgtgaagagtgagggccagttacagtgagaaaggcagcgtggtgcgtcacatcccgtgtcccatgccgggctcctgatgccrgggtgaccgggcccttgttaggagctccactctgggccccgcgtggagggacaccccgatgcgctgttgccaggcccccgggtctcttcgaggcacaagaataggctgagcgtggaaggttctgagcgcgggagattctgagcgcattgcccttaccagtctctgctgcccagcttgggccacccagcgtctcccagccggccgacttggtttcttcattaattttgcagttcacttttattgagcactccatactgttgaatccagcttttatagaaacaaccagtttcccttccccctccgttttcattggctcatgtatttaactgaattataaaattgtggtcacaagcgaggttgccgtgaccaggttggtgacccagccctgcctctcggcctgtacggcgcagtccatggagcgtggggggctggaggggaacacattgatayagttttgtgtttctcgatgaaatggagttttaccttggatgcaaacatactgactttgtcatttcttgtttctttttaattgtagcaagctgaacagctgggaagagaagaccagcagcgactgcaccgaaaccggaagctggtgctcatggtggacttggaccagacgttgattcacacaaccgagcagcactgtcagcagatgtcgaataaagtgagtgcagtcagcayctacggacagtttcccaggaaccgcgggtccyagaattttgattcagaagtgtgttctcttgttttttagatgatttcccgtaggtcagcctgggtttggaaagcagacttgctagttctgggcgtgggccgtgtgtctgctgggctgttggggagcatccgcggctcccgggcagacatcccgacgcccactgtgtctcacgcttccttccgtgtgtgtgggaaccctttgtgtgcctgcccggcacgatgtcggagaaggcagaaacgtcccgagcctgtgaggatggtgtggtggatggtgcgaggcgtgtcctgagaggggcagtcttggtggggaggacgttggtgttggatgcctttatgttgctaggatgtcaagggcaggtggacgcctgggtttgtgcttgggagaactgggctggaggaaaagcctgggtgggaggtgaccagcgtacattctccaggggaaacacggggaaatgcagggtgagggcagaaccctgtttaatgcacacgaaacccttcctgtgcctcagctgtgtcctcaggatggaaccagagaagctgaatttctagaccgaaggctttgaatgtctgtgcccagaggcttgcgcagaggcttgtgtcggcctagayggtggccatcagggaggccctcaccaacactgagttgttttttaagtgtttgctattgaacagtatgtggactctggcgttagatttgggatttcagaggcccatcagttctgaccttaccagttctaaaggttcctggggatcctgcaggtcccaatagcagacacccagcaggctggaggatgcaccacggagccgggcatcctccgctgctgaatgccggggcgtggtaccaacagctgggacagattgatgacagttacacataagtcaaatttgtgacaagcttcatctggaagaagtttggttaagtttggccttgtaagtcagtcaggtggtcagggtgagctgcacagaccccccaggtggcacaaactctcgcgttttatgctgtttgcagaatggagagaatcgagtaactgccgtgctgcacaggagtttgtttagggccggaattcaggtctaacccacaaaacagcttctatttctggctgtgttagtcatttgtgtgtctcgtggcatcttacacagcagtctattcttctgtgcagtataaactgtgactagatattttcagattgcttcgttcatacccgctactctactcactaaggttttttgtttgtttgtttttgagacagagcctcactctgtcacccaggctggagtgcagtggcaggatcttggctcactgcaagctctacctcccgagttcacgccattctcctccctcagactcccaagtagctgggactacaggtgccygccaccacrcctggctaattttttgtattttttttagtagagacggggtttcaccgtgttagccaggatggtctcaatctcctgactttgtgatccgcctgcctcggcctcccaaagtgctgggattacaggcatgagccaccgcgcccgcccaaggttttttttttaatgcctattttctgacaaactaggtattttgaaggatgtaaggactttatgaaaatacattctgcacacatataccttcatgagttgctgtggctgtttcctgcttttattgtgcctttgaagttgggcattgagtgagttttacaggcacacctcattttatggtgcttcactgatactgtgttcacagggaggaggctcggagcaacctggcgagcacgtctgcaggtgccattttccagcagcatgtgcccccaggtgttgtgccacgctctggaaatttcccgtgtacttcagcctcctcgttagtgctctgctgttacagggagctgtagtcagtgatctttgaggtcactgttgtcatagttgcttcatcagtgttctgtcagctatagggatttgtggtcagtgatctttgaggtcactgttgtcattgttttggggtgccacgaaccacacccacataagacggcaaacgtaatgggtagatgtgtgtgtcctgactgctccaccaactggccattccctgtctctgtcccggtgctcaggcctccctattccctgagacataacagtattgaaattaggccagcgtagtaaccctacagtgacctctgagtgttcaagtgggaggaaggctcaccagtctctcactttaaatcaaaaggtagacgtgattatgcttagtgaggaatgcacgccagaagccaggaaaggctgcaagctggtcctcttgcactaaacagccaaggtgtgaatgcaaaggaaaagttcttgaagcaaactaaaaatactacttcagtgaacacacagatgatgagacagtgaaacagccttattgctgagaaagagaaagttttagtggtctgagtagaagatcaaaccagtcacaacattcccttaagccaaagcctaatccagagcaaggccccaactgtcttcaattctgtgaaggttgagaggggtgaggaagctgcagaagaaaagctggaaaccagcacaggttggttcatgagggtgaaggaagaagccgtctccgtaacacaaaagtgaaggtgaagcagcaggtgctgttggagaaactgcggcaagttcccctggagataggctgagatcactgatgaaactaaacacgctaaacaacagattttcagtgcagacaaaacagccttctgttggaagaagatgccgtctaggactttcatagctggagaggagaagtcagtgtctggcttcaaaggacaggctgactctctcgttggagactaactaatgcagctggtgactttaagttgaagccagtgctcatttgccattctgaaaatcccagggcccttaagaatgatgctaaatctcctctgcctgtgctccatccatggaacaacaaaggctggatgacagcacctctgttcacagcatggtttactgaccattctaagcccgctcttgagacctgttactcagaaagagagattcttctaagaaatattcctgctcattgaccatgcacctggtcacccaagagctctgatggagacgtacaggagaggaatgttgttttcatgctgctgacaccacatccaccctgcagcccagggctcaagaaatgatttccagcttcaagtcttattatttaagaactacatctcctggccaggcgcggtggctcacacctataattccagcactttgggaggacaaggcgggtggatcacgaggtcaggagatcaagaccatcctggctaatgcggtgaaaccctgtctctactaaaaatacaaaaaattagccgggtgtggtggcgggtgcctgtagtcccagctactcgggaggctgaggcaggagaatggcgtgaacccgggaggcggagcttgcagtgagccacgatcgcaccactgcactccagcctgggtgacagagcaagactccatctcaaaaaaaataataaataaattaaataaataaataaataaataaataaataaataaataaataaaagagctacatctcctaaggctggagctgccttagagagcaattctgatgaatctgggaaaatcaaacagaaaatccttctggaaaggattcaccattgtgacattgcaagtgccaccaggaacatttgtgattcatgggaagaggtcagagtatctgcatcaaccaggagttgggaagatgtcgattccaaccctcagttcggaagatgttgattctgaccttcatggatgacttccagggcttcgagaccccagcggaggaaggagctgcaggtgtggtggaaatagcgagagaattaggagtggagcctgaagatgactgaactgcggcaacttcaggatgaaactcgaacagatgaggagttgcttcttacggatgagcaaagaaagtagtttcttgaaatggaatctgctcctggagaagatgctgcgaatgttgttgaaatgaccaaaaaggatttggaagattccatcaacttagttggtaaaccagcggcagggtctacgaggattgctcctagttttgaaagcagttcttctgtgggtaaaacgctgtcaaacagcattgcatgctacagagaaaccttttgtgaaaggaagagttgattgatgggacaaacttcattgtcatcttatttcaagaaatcatcacagccacccccagccttcagtaaacacccctctgatcagtcagcagccatcagcatcaaggtgagaccctgcgccgacagaaagactatgacttgctgaaggttcagatggttgttagcattttttaatcataaaattattttttattttttattttttaattttttgagacggagtcttgctgggttgcccaggctggagtgcagtgacacgatctctctatcctgcaacctccacctcccgggttcaagccattcttgtgcctcagcctcccgagtagctgggactacaggcgtgtaccaccacacccagttaatttttatatttttagtagagacggggttgtgccatattggccaggctggtctcgaactcctgacctcaagtgatcctcccgcctcggcctcccaaagtgttgggattataggcattgagccaccacgcccggtgatttttaataataaagtatttttaaattaagttaggtacattgttcttttagatataatgctattgaatgtttaataagctgcagtagagtgtcagcatggattatattcactgggaaaccaaaaawttcatgtgattctcagtatctccaggataggcctgctgaagacagtggagtctagttataatgtggctgtttctcagttgtgtggtctggaaggtgacagtgtcctgatgtagtggggaggggggtctaagcatgaacggtctgtcctctgcctcctcagtagcagtagtgtgccccacttgacatccagaggagaccctgaggctggtgcctggccctactgctggcccctctgaaagcaatttcagggatcagaagtggtgctggccacagctcccgaagcctggacagctgctggactttttactgttgagtaatgggaaagttgttactagaacttctcactcctaaatatttgacagagtagcttcttsatgacggtcgtgactaacttagagctagaaaaatgtaactgggaaagttgttactagaacttctcactcctaaaccttgaacagagtagcttcttcatgagggtcgtaactaacttagaactagaaaaatgtaactgagcttaagtcatctacctttttttaaagccattaagagtaaatattttactgagaaaataacaggatttaaaggatcgaagtttagcttcctaaggaaagcagactcatttgcatgtcgatcatatgtaagcgagtcggtgttgctcatttcactgtctactaaatatgacttagaatactttcagcttttatgttgtatatgtagatgaaagaaactgtctgaaaatcacccatgcgttataccaggttacccgggaatgttgatttcctttattcagtagctcaggaaaacactgtcagcacgtgatgttggtggaggtctgttccgagcagctgcggtggccttgctgtgtaacacrtatcagcgaggaaacaaaggcagaagtgacatcagtggttagctcatagttagtgtaggttgttactgttggcgtggttatcaggggtggttatgtcctaggcggtcgttgcaggtaggtagttaccaggagtagttagtgtagctatcatcggtggttatgtagttatcataggtggtgactgttggcgtggttattggggatggttatcgtgtagttatcacaggctgttactcttggctggttatcgggggtggttatcctaggcgggtcgttgcaggcaggtagctattgtgagtagttagtgtagctgtcatcggtggttatcatgtagttaccgtaggctgttactgttaacrtggtacccagggtggttatcttgaacagttgttgcaggtaggtggttatcctagttaccacgggcagtcagtattcacactcactgagggcattcccgcagcagagaaggccgcactcactcactcgtaccgcgtgcayggaaactacttacacagtgggttttaaatgccacgggtagccccttgcaccagttagggtcacgtccttatttggagggtcaggcggacatgcgtcctctgtcccacgtggagaggtgtgtgcacactcctatcccctgtcccatgtggaggggcgggtgcaaacgcatcctctgtcccacgtggagtggtgtgtccacacgcatgtcctctgtcccatgcccacgtggaggggcrtgtacacacgcatgtcctctgtcccgtgtggaggggcgtgtacacgcacacgtgtcctctgtcccgtgtggaggggcgtgtacatgctcacatgtgtcctctgtcccgtgtggaggggcgtgtacatgcaaacgtgtatcctctgtcccatgtggagggatgggcacatgtgtgtcttcaggacgcctgtctcaggcacccgtgtgtcttcaggacgcctgtcgggcacacgcgtgtcttcagaacgcttgtctggggcacacgtgtgttctcaggatgcctgtctcgggcacacaggttgcgggggyrgccggggctcctcaggccttttctcccgactgttgctactattctttttagggcatctttcacttccagctgggccggggtgagcccatgctgcacacgcgcctgcgtccacactgcaaggacttcctggagaagatcgccaagctgtacgagctgcaygtcttcaccttcggcagccggctgtacgcacacaccatcgcaggtcagtcaagccgcagccgaagaggccgtgtgaacagtgggtttctttcctgttttcggtgatggtttcttaaagatgaagaaagaaaagaagctctcctgcaactcagttgtrgtcttagggttggccgttgtgcagggggttgtgagaggtaagggaattctgccaccagggctgttgggtggggccgcggctgctctggccgggtgcggtactgggtgggccgctttgggagtttgtcaggaccacatgggcacgtggaaacttctgcgagcgtcctccgacagataccttcttaaatcagttcacagggactttgggccgggctgcttgtgtgtgctcttgctgggtgctgtcactgcacacagcatgattgtcccctrcctacacatgggtacccttagggtttagcgtttgcttctgtctccctgggtgatagcgtgaatgccaggctacggtgccctctgggaggcagcaccagcaggacgaatcgaggggacagtgccacgggacggtgactgtcccatgtggatgcagtgaggggacgccacaggatggtgaccgtctgtccttcatggacaaagcgaggggacaaagtgggacagcgaccgtctgttccacgtggacgaagcaacgtctgtcccacgtggacgaagcaaggggacagtgcgggacggcgaccgtctgtcccacgtggacaaagcgagggggctgccacgggacggcgaccgtctgtcccacatggatgtaggcgccgagtggcagtgtaggcaagctcctccgtactggctccagaggttgttagactgagcattttaaaattcaaaggtctttctagattggtcttagtcttttgttgttgttggggaaatgaattttgaatcctcctttaatatttagtgcctttataggaaattgtgatcatgacctttaattcctcttgtaattgaaatttgaaatattcacctgtaacattatggctgctgctgcatagctgcctgagacagatgatgtgaagacgagtaattatgcacaagggtgatattgctcacttcctcgggccagtgaagaaataatgcctgctatgatctgagggttttacagcccccaagtccatgtgttaaaacccagtcccagggcgagggtgttaggaggggcgtgggaggtggtgaggtcmtgtggactccatcctcgtgaatggaatcagggcccttacccaggtgggccctgggagctgcgggaaatgcagcaagccggcgcccactgacctgcagccaagttgctggcgccgtggtcggacgccggcctccagaactgtgaggaagggacgtgtgttcctgagtcacccacactatggagtttctttagagcagcccaggccgactaagctgcccactgtgtggaaatagacccccaaatccccatgtgttccagccccagattgtgccgttgcagccagtgccaggcacctcccagaggacaacccataagtcacacaaaccgcagggacagtgacgcccactcaaaccagacaactgagcggggcatcactctcacaataacaaatgtcagggaaagactaaaaaccagaaaattattcctcacgctcatcatatccatggctgtcccctattctctggttttttttttgtatgtataattttgcctagtttgtcttaatatatgtacaagtttacataccgttcttttcacataagatttcatcactaagaatttatccatcacgttgttataaatcttcatcattttatgtaagatttttttccctcctctgtggactggatcctctgggtgagttcctaaaaccaggattgttcggtgagggagtggttcctgacccccaggactgtgaggactgcacgccgcatggcctgctccctgggagggtgacgggtttgcctcccgcctcccacacaaggcgcacaccagcgggcacagcccggtgacctgcacgtctgagtccaggatgccagtgatgtttcttctcctcctgtcccgtcttccatacgttgatctggtgcccgtgcaagtgtttctcatttcggatttccttctccaggtctctctctgaagctgggcttctttaggttcgctgtttcacaygtcttgcttatcctttcctgaggtgcatcgatgtttgctggtcagagcacacaagccccagtgaggaggagcatgtggaaggctcggatctgtttaaatgcttggctggaggggtttgggctaaaagcagagggtcccaggttttagccrggctacacccttgccacccgtcacaccagcaggcagggtatgggtcaccacagtctgattccacgttcatgaggcctcgtgtggtgagagatgaagcaggtgacgagaacgccatgtttctttatcagcctgaaagctggagggagcctgggagctgctcgcagattcagcagagcatccatgcagacatccgcaggcckctgagccgcttagacagcagagcagggagcctgctggtgggcgcttggctgcggagagcctcgagcgcgggtcctcctgcagtgagaccagctaggtttgttgagcgtcaccgggccgtctggtgccttctccgtttcaagctctgctttctatgctaaagttccagcattccaacgtgtccaagggatgtcggccaaaaccagacgaagacatcacaagaaaactgcagaccagtatccctttgaacatggatgcagaaattctcaacagaacatgggccctcgagcccagcaacgcaggaggargactgtgtccaggctgtggttcaggaaggccgagctttgcttcattgtggctggcgggatctgtagagatgacctgggtcagcttttctacaagtgagaaagtgaggtccggamtgaagcctgaggtggtcgccgagcatctgcttttgatgcttttcattttgaaagtgaccgtgttgatagcatgcgtgctttcagtatgactaggacagagatgttaagagtttgcgatgcgtgtcttttatctgatagtagagacgctaataattctattaacagactttagatctagcgacttcatggcctcagtgatcatctggaatttacgcatagtgagaaacaatcgcatttatttctcctttaagcccaagtatcttttggttaatgaaatactaacaaaccagtggtatcagggaacggaaagctcctggcagtactgcatttgaaacgtctggaggtggtgatgcttcagccaggaagcaggttcatcttcccagaagatcttacggatcccacagtgcattgtgcatagtgccgtggggctgcagggtaactgaggtggtgcacagagcagctcttctgttttaattgtaatgtgtatgttttaacctgtatcaaaaacagcaaatgtgtttctcgcatttgtgatctcagaggtggtggtgcagaggttgagcccagtagggatgggtgcagggagtagttgattaaaagccagcgtgaaaacaatagtgattatgtggagtgcagtcagggcacgttcagatccggaagtggaccccgtgtgccacgtggggacgtggagccaggcgttccggggtgcattcggatccggaagtggaccccgtgtgccatgcagaggcgtggagccaggcgttccagtgagacttaagtcttgagagaatgtgggctgcgtggttggactttgggttcacagtgcttttgagatgtctcatctacctcctttgcttcatgcataactaacggttatgcaggggacctgcgtgccatgacaagaccacagtcccagctcccgactctggaccggctcactcttgtgcaatccagtccccgttttgttccacggcacctgcacgtgtcaggccagatagaggttgtgtgttaatgtgttcaattttcttacaatttcagcctcttgggagagtaataattatgttgtattcattcccgcaccttatattcctagcaaaattccaagtaatgttaaactcagtaaatgttaaatgatcraatacccttaaacacgttatgtgggtgccatggaatacctatctcttgaggtatgtgcagatttatggcttcagccacttgtatgatgagtagctgaaacatttctttttgaggcttcataattaaccgtagctttttctctccagaatgttttaaatggctggtgaaattaaattgacattgaacttgatgcctccaacatattttaccaatggaataaattacctgaaaggttgttttgtttttgtttagtacccctacttctacaaactgaaatatgtttcctatatactctgtggttcttgtaaactaacaagagataacttatttttaaattatctttatttaaaaatatgagcactttactgtaaattgaagactttgcaaacttaggaagataacacagtaggcttaaagttcagaagataaatttatagatcaagaaacccagagcrgaggtgatcccaagaaacctctgcctgatttgttgattttcacagtggtgcttcctgaagtgtagaagggatgtttgcagatagcttggttttactatctttaaggagtcgaagctgagcatcaagcatgtgaagctctttagaaaattactgttaaaaagttaaactagacttgtaattaacggatgtcatgtgaagtgcaagtgtcaaatgtagcctaagcggattcttcgctgtggaagcaccttctgcactagctggtcaaggtggtgtcccggatgtccttccttcccagtctcctctgtcaggsaggcttcctcgatgttgcctaaattaccattattaaaacgtgtataatagttagaaataaccggcctttctgtgtatttctacaacacagagtgtgagtttgtataattctactaaagtaacttgggagaagcaaacttccttgataacctttcctccactaaccattacagatgagagcagtgggccacccgcctggggttaggaaagatcatatccgaggtgacgcagagtaatttcagcttagtgtccagactccatcacgtgaagaaccacatgcagagtgttttgagatcaaatgatgacttacctgttttacttatgcaagtgccttccataattttcatatccatctggtttagataggcacttcagtaagatattacaaatttttcatgttagtagaattrtaaacacttatcaacatggtttgtgtttgagaaataagttcaccataagagaaaagaagccccacacgagccacgtcttacctcaaaagggatgaagtgtttggtgccagttcatcatgttgtgtgtctgccacttkaaaaaaaacattcaaggcttcaccatgtgccgtgtgaccgaaaygtgtctcaggtatgtaatctttgtcctgttttcttttccaaggctttttagaccccgagaagaagcttttttctcaccgaatattatcaagggatgaatgtattgacccattttctaaaacgggaaaccttaggtatgtacccagccrcgctcctcacaaagacctcgctgttcatttcccatttcaaaaatcgcatcttgaaatttagagcagtatttctttttttctttttttttgagacggagtcttgctgttgcccaggctagagtgcagtggcgcgatctcggctcactgcaagctctgcttccagagttcacgccattctcctgcctcagcctcctgagtagctaggactacaggcacccaccacctcgcccggcaattttttttttttttttttttttttttttttttggatttttagtacagacggtggtttcactgtgttagccaggatggcctcgatctcctgacctcgtgatcttcccgcctcagcctcccaaagtgttgggattacaggcatgagccactgcacccggcctagagcagtatttctgtattgatgttttttaggaatttaacatcccctttccagttttcattgttagcctcagartacttagaaagttcctttctaacctgtactcccactgtctcccaggtgcctgagccctggtgcttgtgcagggcccccaatccaggctctgccccatcccaatagccctgtcctgccctgaaactgcccttgagctgggcttttgtgtctgtggaggcggggactgtcatcctctctgcctcgtctctgttagacagcacaattcgatgtcagcccgccacctgacgttgtgtatctgtcatcctctctgcctcatctctgtcagacggcactgattcgatgtcagcccgccacctgacgttgtgtatctgtttgcttaaccaaccctggcatatgtgatcattctagtcccttgacctccaaattttcattcctatgcgaagacctggcatcgagatttgtggttggagaggcaggaggcaggcgtgtgtccccacagtagccagctgtgaaggatttggcccttttgcctctgagtatccagggaatggccagggctcctggggaactcagcgactggactttcgggcccagaacccaggagggcaggcgtagggacgggatggcatcagggaggtggcagtcgaaaggacccgagtgggcagaggaatgtgaatagccccaccccacgcacaagctcagcagctctgcggggccactggtttagcggcagttcttgacatcagcgtcagcatctgaggttgataattttcttaggagcttgcttgtgttaatcctactaataatttacaaaatcctaagtcacttgactattatgcccatatttttgccttttgccatttcttcctttccatcagctccagagccccttcctgtcagctcctctgagcctttttgacagggcaggccgctccccgcccctccgcaaagactttttaatattcttttatatgctttgacgtttcttgcccactgtattcgaggagtttccccatttccacccggaagtccgtccttgctgatgtaacaccatgtcaggtgtggcttgttttcccgaggagcctggtggccacagcctcagcttcagccrcttcctggttctcggtggccagtccccacagactgtgagacctatgcttgctaatgttaactaagaagagaatctgaaagtatttacttcagaaacctcctttttgctagttagcgccagagtgagtagattaatcagggcaaaagagaatgagaggtgctgttagtgtgttacagggaaaagtcacccgaaggcagaatgataggatcgaatggggacatgcccaggataggccccagtggtgggtactgtggtttgcatggaggtagctggaggtccgcttagaaattctgcatcagcactgggtctggtttttgtttttttgtttttgagacggtctggctcggtcgcccaggcttaagtgcagtagtgtggtctcagctcaccacagtcttgacttcctgggctcaagctatcctcccacttcagccttctgagtagccgggactacgggcgcacaccccmacacctgtctaacttttgtatgttttgtagagacrgggtcttcctatgttgcccaggctggtgtcagactcctaggctcaagagaccctcctgccaagacctcccgaagtgctggaattgcaggcattagccacacagcgcctagcctggtctgtttacagagtcagcaaattctggcctttaggctacccagccttgtttgtacatgaagttttattgaaacatggtcacgcccacacggtcagagttgggtttcgtccccgtggcccgtaatgcctaaaatagtgactctggcgctttaagaaacagtttgggaactcctgcctgaaggagaatcggaaacagcactgaagatgttactgaggtttaaatgcgacccaaacagaaagggcttcggggcggttggtgtccgtctgattaacctgctgtctgctggttacatgtggattagaatcttaaactgttacgcttggcaagatgaatgactacaacttttcattattattttttgtarattatgcattttcacttgtagaaatctctttccttgtggagactcaatggtttgcattattgatgatcgagaagatgtctggaagtttgcccccaatctgataactgtgaagaaatatgtatacttccagggcacrggtgatatgaatgcgccccctgggtcccgagaatctcagaygagaaagaaaggtgggtaacctccttcctgattctctagaagaattcacatttgcttattgtttagctcttcttatttcttatctctgtttygactgctataaattcaagatacactttttttatttgtgtttcagtagagattattggatttatttatagagtactgaaaaacaggatattaggttgtttcaatttgggctttaaaaaaaatggccctcacttaagcgttttcccagttgaataaaaactagwggatgctgtttaacctaacacatccgaataactcccttcatcccagttttccttaaacacatccctgggtattgggccatagtgttctgtagagagagtgaatgtgggggcggtggctctgcggggaataaccgttccccrtgcgcagtggtcaggctgggcgctggctggggccccagagagcagcgtggtttaacttgtcagtcaggcatgcagctgacgtccaccctacgaaagttaagtgttttttgatctttagttttttgaaaaatattttgaggcacacgtttattgctgtagtcactaaaatggaacttggaggttaggaccaggggagggtgaaactaggggcattcctgtagaaggtagagactttcaccagatgggtggggtcagcgtggagttgctgacttcctccagaccgtggcttgggaaaccgtggccatggtggtgccaggtcatccggggcttacagtcacggtggcgccaggtctgcaggggcttacggccacggtggcgccaggtctgcaggggcttacggccacggtggcgccaggtctgcaggggcttacggccacggtggcgccaggtctgcaggggcttacggccacggtggygccaggtctgcaggggcttacggccacggtggcgccaggtcgtcaggggcttasggccacggtggcgccaggtctgcaggggcttacggtcacggtggcgccaggtctgcagcccggaaacctctagttgtccttacaggtggaggatccctcctcccccaaatccaaagctttttgagtgcccacatggtgcttaaaggaaatactcattagggtattttggatttttyggattggggatgttcagctggtaagtttaacgcaaatactccaaactcagaaaaaaattcaatatccaaaacgtccctggtcccacgcacttcaggtaaggggtgctcaccctgtccggcctcttcacagcaaggttgccaaggcctggtctagagggtggtggacttcacagccatggagaagggtgctgctttaacttggaacgttatttaatgtttaatgctaaattgcggtaacttttccttttgcatgcatatttagtaaatcattctcgaggcactgaggtctcagagccatctccgcccgtgagagaccctgagggggtaacgcaggcccctggagtggagcccagcaatggcctggagaagcctgcacgggagctgaacggcagcgaggccgccaccccgcgggactcaccccgccccgggaagccagacgagagggacatctggccccctgcccaggcccccaccagcagccargagctggcaggcgctcctgagccccagggatcctgtgcgcagggtggccgggtggcaccgggacagcggcctgcccagggtgccacgggcactgacctggactttgacttatccagcgacagcgagagcagcagtgagtccgagggcacgaagtcctcctcctccgcctctgatggcgaaagcgaggggaaaagaggccggcagaagccraaggctgccccagagggagccggggcgctggcacagggcagttccctggagccggggcggcctgcagcaccgagtctccccggagaggccgagcmtggcgcgcatgccccggacaaggagcctgagctgggtgggcaggaggagggcgagcgggatggcctctgcggcctgggcaacggctgtgccgacaggaaggaggcggagaccgagtcacagaacagcgagctgtcgggggtcactgcgggtgagtccctggaccagagcatrgaggaggaggaggaggaggacacggatgaggatgaccacctcatctacctggaggagatcctggtccgtgtacacactgactactatgccaagtatgaccgctacctcaacaaggagatcgaggaggcgccggacatccgcaagatcgtgccggagctcaagagcaaggtgctggcagacgtggccataattttcagtgggctacacccgacaaacttcccgatagagaagacgcgggagcattaccacgccacggcgctgggagcraagatcctcactcggctggtgctgagccccgacgcccctgacagggccacgcacctgatcgccgcgcgagctggtgagtgctgcctccctgtgccctgggcatggtcaggcccgcgggctccttgcaggcactccttagagttggcattgctgtttatctcactttcaattttcagaaacatttcccagaatcaccatcttttaagaatagatcatgacagtgggtgaaattggagtttgggcacgttcatgctttcagaccgcagtcatcgcacacaccattcaggggtgggagttactcgtgtgtagaaagttcaaccttctccctggagtaagccatggccgggttggaaaacagggaatcagcgatagggacgtagtggagaaattcgaggcaggaacaggagttcgcaggtaaaagattgacaaaccctctgagttagaaaactaaatgcaaggtttcagctgaaacgtgcacagaaggacacgttgtggctgggagggcggaggacaggcctgctgtctcccgacggtgaaacctgtcccggacggggcaggctgctctgacatgttgaaacttccgccgaataaaacaacctttcagcaataggtgattcttgaaggaagacttaacaccccggtgcttwaaaaacccaaatacctcgttattctagtwattctgtgaaaatgctcccataagcacctggattttccgcgaatgaagattgcggtttttctcctccaatctgcttcctgtcctggcggcgtttcctgagagggcttctcagtgcgtggccccgcctccggggctcaggaaagccttgtggggtgagctcatccctgtccacgcacgctccctgacagcaggtgtggtcttatttgaggccacggctctggcacgtatcatggggcgttggacacgcatgtgctcagtaaagcatttgaatcaagggtaaatggaaggttccatctcagtgtgaaatagccaggtgctagctgcagggcagaggcgggctttccgtggagcccagcgasacccttgatcccaggagaaagccaagccctggcctcctgtgggcagtcagacccttctctcctgagcgtggagccgggccaggccggggtcctccttggcccctcaggtgccygtctgccctgccgcgtgtctgcccagctcctgacccttctctcctgagcatggagctgggccaggccagggtcctccttggcccctcaggtgcccgcctgccctgtcctgtgagtgcccaagctcctggcccttctctcgcattccttcyttccccctgaattgtgctcacgtttcctttttgcttctgtgtacgtggcctcactgttgagaggctttgctgaacacatgctaagagaggtcctcctgctgctcaggtcacccgctgtgcccggctccccgtctgagatccaccccttcccaccatggctgcctatccctggcctggcagatgggaacctgcagtgggcagccctggtggggtgcagccgggtgagggccctggtggggtgcagccgagtgagggccctgagccctagtggggtacagctgggtaaaggccctgagtcctggtgggtacagccgggtgagggccctgagccctggtgggctgcagccgagtgagggccctgagccctggtggggtacagctgggtgaaggccctgagtcctggtgggtactgccaggtgagggccctgggccctggtggggtgtagccgggtgggggccctggtggggtgcagccgagtgagggccctgagccctggtggggtacagctgggtgaaggccctgagtcctggagaggtgcagccgagtgagggccttggtggggtgcagccgggtgagggccctggtggggtacagctgggtgagggccctgagccctgsaggggtrcagtcaggtgaaggccctggtgggatgcagccgagtgagggccctgagccctggtggggtacagccaggtgagggccctggtgggtgcagccggatgtgggccctgagcctccagtgctggccggaacagcctgacgcagccgggtctcctgcaggcacagagaaggtgctgcaggcacaggagtgcggacacctgcacgtggtcaaccctgactggctgtggagctgcctggagcgctgggacaaggtggaggagcagctcttcccgctcagggacgatcacaccaaggcacagaggtgggtcctcgctgcacccagcaggtccrtgccaggcgttcccttgctggacagctgttggttcatgcacctgggcagtgcccctcatcacccggacgccccgctcatggccctcgttctcttcctccgacagggagaacagccctgcggcctttcccgaccgggagggtgtgccccccaccgcctygttccacccgatgccggttcttcccaaggcccagcctggccccgaggttcggatctaygactccaacacggggaagctcatcaggacsggcgcccgggggcccccagcaccctccagctccctacccatccgccaggagccctcttcyttcaggtacgtggcggcccagccactgtccccagctaatgagggctcttcaagcttgctgctccagtctgttggggggatggcgtcagttgcccgaagtgagggcgggtggaggctgcagacggtgactcctgcttccaccttgtgggagcgccgcccccgcttgcagtcttgggtccttttgtttttctctcctgtcttgggtcccaaaactaaaacaaaaccccgaccatcagcttctcagatgttgtccaggcacccgcatgtgcccacctgtggccgccccgcagagcactcggtcctgggaacactcagcagagaacgagcagagccgggctggttctgagcccccckccccactcgcctcaccatctgctctccgccggctccacgtttgctgctctgccaaccccaggctgccctcttcgtttccacacagagcagatgcaggggttggtggcagtggcggctggtaaacagcactgtgaggaagggaaacttgattggactggaaggcgttggtagccgggatctgtgctgccctggagtggggagattgcaggcccygagggatgcttcctgagcatgtggcctctgtgcctgtttgcccgcgtggacccgagatcagccctcagcctaaggttgtggcccctggagaccccatgtaaatggctgtgggacattgttggagatttaagtgaggagtctttgtttgtaccgtggttgttgctttgaaattcaaccaaaagttcaactcaattaaacttgacccaggcaaggagcacccaccaagacctggtgtgcgtttgcccctggaagccgtctgacaggtcacaacacctcagatcctgtgacgggtacagaatgcaggctgctagagggagacgggtgctcacggttaatggggagatggagaggtacggcttgatgtccttttcgagcctttgcaggatccagcactgtccctgcgtggggatgctgaggcctggagtgcayggccctcccaagtcaggagcaggggtggccagggcgtggccttcgcacagtgggtggcagctcccgaacctgggtggacaggtgagaaggccccgccaggcaccgcggcaaagcccagccggctttcgggagaggccgctccctctggaaacgcgctctagttcctccccggttttctgtttcatagattgtgttttgtcttttacgattctggagagcagcgtgtgcccctctcggctgatttcacggcccttgaggtcatggtggagagtgttgctaagaggaggagtcgggtcgggtgactgggatgtgggcaggtgcagggtggctgcgggcagctgggccggtgcgggtggcttcccgtgcggcagcctggcgacgctctgggacctagggggtggggggtttgggatgaatctgaggtcctccattctgatgacagggaagaggatccccagccacagagatgatgtcatccctgatggataggaaggtgtcctcgtgatgatgtcacctcccgttgttaggaaggcatcctggtgatgtcacctccagttgttaggaaggtgtcctggtgatgtcacttcccattaggaaggcgtcctggtgatgatgtcacctcccattaggaaggcgtcctggtgttgatgtcacctcccatcattaggaaagcgtcctggtgatgatgtcacctcccattaggaaggcgtcctggtgatgatgtcacctcccatcgtgtcctggtgatgctgtcacctcccatcattaggaaggcatcctggtgatgatgtcacctcccattgtgtcctggtgatgatgtcatctcctgctgttaggaaggcgtcctggtgatgctgtcacctcccattaggaaggtgtcctggtgatgatgtcacctcccatcgtgtcctggtgatgatgtcacctcccatcattaggaaggcatcctggtgatgatgtcacctcccattgtgtcctggtgacgatgtcatctcctgtcgttaggaaggcgtcctggtgatgctgtcacctcccattaggaaggcgtcctggtgatgatgtcacctcccatcgtgtcctggtgatgatgtcacctcccatcattaggaaggcatcctggtgatgatgtcacctcccactgtgtcctggtgatgatgtcacctgttgtgtcctggtgacgatgtcatctcctgtcgttaggaaggcgtcctggtgatgctgtcacctcccattgtgtcctggtgatgtcacctcccatcattaggagggcatcctggtgatgatgtcacctcctattgtgtcctggtgatgmtgtcacctcccgtcattaggagggcgtcctggtgatgatgtcacctcctattgtgtcctggtgatgctgtcacctcccgtcattaggaaggcgtcctggtgatgatgtcacctcccatcgtgtcctggtgatgctgtcacctcctgtcattaggagggcrtcctcgtgatgatgtcacctcccatcgtgtcctagtgatgatgtcaccrcccgtcattagcgcatyctggtgatgatgtcacctcccatcgtgtcctggtgatgtcacttcccatcgtgttctggtgacgatgtcatctcctgttaaggcatcctcgtggtgatgtcgtttcaggtctttagaagggcttcctgttgcgggctggttgggtttttaatacaaggtgtctttccaacactgcttctctagctcttcgaggccagcaggtgcctaaagttcagtttgtttctgacgctgacgacccacggttgtcatcaggccttgagtctaggggctcagtcccaccaggctgccctcatctcggacccccaggccacctcactgtccagcttggccacagtgttgggggtccccacacacagacttgtgcagttttgataatctgctgaatcggctcacaaaattctggaaaacgtttcactcagcaataccagtttattttaaaggctcaagaacagccgaatgagggggcgcctggggcagggtccagaagggccctgagcatggcacgtgccctctggaagctctccgtcctttcatctgtggcgaaggcatagctgatcccacacgctgcccacttgctcctgcgaagcctcctaccctggagccgctcaggcccagcccacagccactctcaccactgcggtgatcccagggactgggaacaggtctctttctgtaacaccagggcttagtgctttggtgctactcttacttctttatttgacttaattaattccaactctccagccagttgacaaagctcctggacacttctgagaacagcagggcggaacctggcctatgggattgctgtgggccagtcagtgaacgggccagcaccacctagagcagaaggatgtggagaccccccgtctaggaagtcagggwctgttctgtactgtcattctaatcagtagaagcacgatggcaggacagatacgtgcactgaagtgatactgctgagatttggtttcgaaattatgtgataatttaaagcagccacacgatcagtactgcgaacagcacctgttctttagaygctgcttttcatactgttgrataaaatatccaggggggtggctcgcactgtagtcccagtgctttgggaggtggacccgcaaggatctctcgagctcaggagttcaaggctgcagtgagctgtgatcgcacccctgcgcttcatcctgggccacagggtgagagcctgtctcaaaaaaaaatttttcttaataatttaaaataaaatcacaaacctttgacttattttttcttcagtatttttatttatttttttttttttgagacggaatcttgctccatcgtccaggctggagtgcagtggtgcaatcttggctcactgcaacctccgcctcccaggttcaagcaattctcatgcctcagcctcttgagcagctggaattacaggcacgtgccaccasgcctggctaatctgtgtatttttagcagagatggggtttcatcatgttgctgaggttggtctcaagctcctgtcctcattgtcttaaactacataaagtggttaaagattagatacaaaactggtgttttaataattcagccttgcttgaagtgagctaggaatttctaagatcaatgagaaaaaaataattgttatctgaaaacagayttgcagatggtaagctggatttgaatgaagtcaaacacttttacttgaatgacactaataacatggcagccgataactgtgtatgtgtgttctgaaatgtgtataatttacgtgaacagcagcagttcagtttcgaatggcacgtcataaacaactgtttagctgtgccttccgtgaggaagatgcacgctgggctgtagttcatttgaataagtcgacttttgatgaaattttcttctgtttttaatgtgaaagtgtaatttgcaccaaaatatcaatattacttcagttaataccagctcatttatacgaaaggatgttaatgtgatttgttaggttgcgataatcgtcagtttggtggcgggaagcagcgttgttgtggctgcagcagcgggccccctggtctgggtgattgcaggctggatgcatctttgtcacgttaaggaaatgtctctcccttcacttgtacgtgttggaaactgagttctcctaaaatgagcctgggttctgctttttgatagttttcaaaattgatgaaacgacctacttacatcagaaaaaaggaatccctgtttgaatgtctccctccccaggctagacatagtgctggaagtctgaggaaacgggaccagccggcaggagttctgcggggccttcgtgctgcggtgaggacctgggcctgtgtggattggccacgcctctggtcccaccctcccttttctccgtaggcctccatcttggaggaacagtagagtgttttcttctggtttaatccaagagtcccccctgcttgtctgagttcatgtggcrcctgcccagttccctgcactaaatagacctgtgtccgcaatgccactccacgtgtggacccctagtgcctgcaggaccactccacctgtataaacgggtccagcgtggtctcctgcagccaccctcacacgcttgcaacagcactggtgccctgcagcccagttcccccatggcactcctgtctcacggagggtcccacacctgagcagccccaggcctcatctgtcacgggcattggttgcccgattcccccatggcatcccgtctcacagtgggtcccgtgcctgagtggccccaggcctcatatgttgtgtgcattggttgtgctgctgtggaggtggccccgtctccccaccctcctgagagtggtggttcctcattctgttctcggaaccccgtgcagaccccattgtgacaggacgcttggcagtgagggcagttggcccttcgtccctggactggtcctcatctaagtctttgaacgttgtacgttttttctaattctggctttgacctttttggtgctgggctggcaggctggctcactggggacctgggggtgagtgggaacattcagttttttggttagactttttgagatatttgtagatatatatgcagtgataatgcagagaggccctttggaccctttatcctgtttcccctgtggttgcctcttgtgaaagtggggaacaggctcaccactaggacccacacagactcatccagacacagaaccctcacaccagctcccctgcggcccttcatggcctcagccgcttccccttccctgacccttggccctccacctgctgtccctccctgcaccgcgccctctccggagtgctgtgtacggcaagtcggcaaccttctggagttggccctcctccctcagccagttcctggagcacctcygtgcccctcattcatgtccttctcttgcggagccgggtctcatggtgtgtggtggagccaactgtggtttcaccgttcaccctttgagggatatttgggttgtttccagcctttgctctaaatgtttgcacaggttgagcctctcatccgaaaatccaaaattgggaatgctccaaggttcgcatctttctgagcacgaagattcgcacctttctgagcactgacgtggccctggaaggaagtgctcatcagagcattcggatttggggtcaccggttgcagatgctcagcccgtaagtgtaacacagatatttcaaaattcaaaaatccaaaatcggaaacacttttggtctcaagcatgttggatatgggatgcttaacctatctaagtttttatttctttgggataaatgtccagtggtagatacagttgctaaattggatggtgagtgtgtgtttagctttttaaagaaactgccagacctttttctggaatacctgcatcatcatttcatgttttcagcagcggtgagtgacccaggtggcgtggccagtgctgtttattgcagccattctgataggtgtgtcctgagctggttgtggctgtaacctgcatttccgtggtgaataattacscatcactcctgtgtttgttccatctgctagtccttggttggatgtgtggcttacaaatcctttcctcccagtcagcaacttgagttttcatcctctagagggtctttggcagagcaaaagttattaattttcacgagattctatttatcacttctttcttttaggaatcgtgcttttgctgtgaagttaactagtagcccagtcccagatcccagagattttcttgatgttttatcctaaaagttctatagtctttcatgcgacacctcagccccagatgctcttgagggtggttttctggccccagccgcattgtcgccggcgccgtcctccctccatggctgcttctgccgcagcgtctcgagggcactcaggtgcacctgtgtggtctgtttctgggttttctgcccgtagatgcccttgatcaagttggatttcctgttttctgtgwgttgttatcaccagtgggtgttgaattttttaggagtttgttgattgatatgatggtgtgtgtggtttttcttcttttgcctgtcagtatgtggtggtcacattgactgatttttggacatgaaaacaaccttgcaccccagaaacaattcccgttggttgtggtrtatagtaaccttgatgcgcttctgtgaagtgtctttatgttgacgttgaggggcctgtggggctgcacttgtcacgttgtgtgccgtctgcccccaggtttgctgtggctccygtgatgaggtgggaagcgccccaccctccagcatcactggtgagactgcggacttgccccttcctttcacatattcgggagaattctccagtgagaccgtctggtcctggagattttatttttgcaaggtttaaaatttcatattcattttccttaacagttacagggcttttcacaggacctgctgcgtttgggtgagttgtggttgtgtttttgaaggaattgctccgcttaccttctctattttttttttgtttgtttttcagcctccttatttcgtactttccttctgcttgctttgggattatttcttatgacttttgttttgacagtcaagtgtggtctagagaactcgagcggagtctccggtgcttgcccggattcctgcttccgtcctcacgggaggttccctcggggtcccttccctcccgacctgacctggagtgtccatcatgctctcggrgcaggcctgggccctctccagtccctcccttgctgggggacgttttcacaggacaagastmtgggttgatcttcctttttctcggggcctgaaaaacatccggcttccttctgggctccgtggttctgatgagtgatcttctgtctttgaccgtttttcctgtaggtaagctgtgttttctctttcactgccttccasgtttttctctgtctttagctgaggtttgatgacgaggtgtcctggtgtagatttggagggtttaccttgtttatgtttgactctgctttttgagttggaaggtttatgtcttttgacgtctttgggacatttccagccattgcttttcagggccatctctgccatgctgggacagcagggacayggatgctgaggctttttgtatctcgtgcrtctctaagctgtgttctttttcctgttcagctcgttttctctgttgtccaggttgggtgacttctgttagattttcgggttcacagccttcctctgtctccttcatttgttgctagtctgtccaggacattttttggttttagtttttattttctgtttataaaatgtctgtatcttctatttctttgccaatcctttctgtgtttttcagttgtttcaagcatacttgcaattgcctcttgaagcatttttatcatggatgctataaaatcattgtgaattttagcatctctgccctctcagcttggcccttgttgattgtccttttctccatagtttgagatcttcctggttcttgctgtggcaagtgatactggattgaaacctggacctgtcacatcatgttaggagactctggatcttatttaaaccttctcccatcactgattttttttttttgggccatgctccagcagcaggagtggaggcccccttgttcctgccatttgggataggagtccagttccccacacggcctctttttgatgcctgagagtgggggatggaggtgacgaggccattgctggtggacggctgtgggggatgggggtgacaccattgytggtggacggctgtgggggaagggggtgacgctgttgctggtggacggctgtgggggatgggggtgacgccattgctggtggactgctgtgggggtggggtgacgccgttgctggtggatggctgtcggggtgggatgacgccgttgctggtggacgtctgtggggtatggggttgatgccgttgctggtggactgctgtgggggtggggtgacgccgttgctggtggacagctgtggggtatgggggtgacgcccttgctggtggacggctgtgggggctggtgagaatcctgaccttcccgcgtgggtgtgtggggcctcattgctgccggtggggttggatgtcaggctcctccatggccttctctgagaccccagaggtggggtgtttggcgggagtagagcagttatcatakgtttttaacatttagttgaaacatttaattcagtttaaaataacagtgcagttggccctttgaacaacactgctttggactgcgtgtgtccagttgtacgtacatgggtgtttcagccaaatgcaggtgggaagcacagcgttcgcggtgttcgcgggatgggaagcgtggcgttcacgggatggaaagcgcagcgttcacggtgttcacgggatgggaagcgcagcgttcgtggggtgggaagcctggcattcacggtgttcgtgggatgggaagcgcggctttcgcggggtgggaagcgtggcgtttgcggcrttcgtgggatgggaagcgcgtgttcacagagggccgccgtgaagagtggactttgacaaggcttgggaagtcctgaattccaaacagcgcagatcagcactttcagatttctgggcagaaaatcttctctccattagtaaatagcctaacatggttgtgtctttttagttttgtgactttgacttagtgcccgttttccttcaccaggatgggttttatcaccttcatcctcgtgcctgtcccgagcgagttggtatctgggacgcacgcttagtgcctcctggtctcatcctttggtcatccagggaagaaccagcagctagaaacagccgcctctcaggagggccgcaccacccctttcccagaggcttgccttaaattccagcagtcagaggcatgcatcagaatatattaataagattgacatatccagatcgagaaagatgtgtacagaggagagaaactatttcaaacggagctgcggtttgaacatagcagaaagatccttgaaacagaagattggccctttctagttgatttattacattaatatttaactatacaagcacaagatttacctttttctgttttttcgtgaattttttttttaaggtggagtcttgctctgttgcccaggctggagtgcagtggcgcaatctcggctcactgcaacctctgcctcccaggttcaagcgattctcctgcctcagcctcctgagtagctgggattacaggcgtgcaccaccacaccgggctaatttttgtatttttagtagagatggggtttagccatgttggccaggctggtctcgaactcctcacctgaagtgatccaccygcctcggcctcccaaagtgctggctttacaagcatgagccaccgtgctgacctgtgaaatgattttaatttcagcycactgacgtctgttttgtyacttggccgttttttgtgtctgttttcgtagcctggagatgttgcattttcttgttttgtgttttgccgtgtagctctccggaccctattttgagggtgaatgacatgtcctgggggttcccagaacacgcttcatctcccgtctctctttgccctttattctaagatgccagagcctggcagatgctctctgccccacgggggttttgtggataaaagaagatgggtgttatttttccdcrbgatabtcdgaaacghgttttgccagtcaccctggctcagttagcaaattctgatccattaacctctgaaaagtgtattggcgaaacatcacgtttttcatacgtgttccctgttggggtgtgtgagtgtttacctagtccgagagccaggagtctgattcggtgcggaaaagtgccattcgaactgaccttcctcatgtgggacctatgaaattcctttcagagcggttccgccaccccagccgcagatgtttggtgaagagctgcctgacgctcaggacggagagcagcctggcccttctagaagaaagcracagcccagtatgtctgagacaatgccgctgtacactctttgtaaggaggatttagagagtatggacaaagaggtgagccaaccccacgccccggtgcccgcgccagcgctcgtgctggggccgcagagctctggtgtgcgggcggattgctgagctgtgcacctggaggccgagctagagtcctgcacttgtgtagttgtgtctggtttgggacgagcacttgtgtttttcacgcaacttcctattcaaggagacctagaacagcattaagcaatgtgtccgcagtgtgtggcatgagaacacgtggaagttgtggcttaggattcgtgcctgcgtcttcaccaggaccgatgccgcccagcccctccggctctcccggctcaccccaaggacatgggacggggtctggaggcactcatggtcatgacaaggggtgaccctggggccrgtcaacaccccctgcctgacgccgaccggcccccattgagaaacgctggagggctgtgtgttgcacgtgggccttaaacacacgcacacagagtgactggtgattctcacagcatctcgttatcacagcgcgaaacaactttaggcagcatcggtggagctggggttttctcagccgggtcctgcttggcccctgtgtcctggrccccttggcccgtgtgcttctcctcttgggtcccaggccgccccctgatagaaggttccacaacagtccggatgttagggatgggcgatctgcgcagcaccgtccttcggagactgttctttaggaggactgtcctggaaaaccacatcccatgtcctcctgtaaggtgccctcatgggtggcgcctgtgtggggtgctcacctgcagctggtcagggcacaggccgtccccttccctcaggtcttcatgttcccaccagagcctatcctccctgcccgcctggcaccgctgtcctctggagagagccaccattctgtttgcatccagaaggcagcagaggttcttgaggaggaaaacagctcctgtgtatcttcaacagtagcagaaaaatgcagatagttctattcaggacagactcgtctcagtaactcaggtcatcacctttagacgccagtttatcttgtgaggatcagacccttttttgaggtgtgctgaatttctctgccatttttctgtctttttgaacatyagctgttttttgtttcacaaaaatgttttctctaaaaaaaatttttctcagccactacctgtaagcccagaccactttatttaagattccagaaggttctgtataaggaacagtcacctgcctaggaccaggggtgggaggagaggagggagggacgctgcctcttcctgcctggaagctgctgacacgtcccgtctccctcctggtttcctggtcgggcgtggaggactcggggtctgttccccacgcagtcctgtttcaggcagtggtgacaactggttcttagtcattcgatatcaaagggggttgaattctcaatgggagacagatgtcttgaacgcactcagcagctttcagccaccccaaaacctaatcctttctctcagaaataaaaagtaatcgtaaccccccagatgtagctctttgggaacaaatggtattgaaagcagaaggctgcagccgtggattgttctgtgcatgggagagaggccagagggttttatgttcgtgaatttttaaagcctccttgattctctgtgagtcctgggcccttaagacaatcagcgcctgcaggcaggagaaggggtcagaggagccccggcgccaaggacccgaggcctctggaagctggaagatgtgaggaagggattctcccagtggacacctggattttggtcctgtgaggctcatgttggacttctgacctgcacagctgtgaggttgtgaatttggatcttttgagccgtggcgcctggttattacagcagcctcaggaagctcctcgtggcctggccctggcctgacagcctcgtctcacatgtgtccctcttccactccatgtgcttggggcagatgaggcagcttcaccccagataagcctgtctctcgggcccattgcctgcaccccyccgtgggcctgtgagacggactaggtacctgcccccgggtgctccctggaggctgccgtggcccctcttcatcctggggacacatggggtggggctgctgctcgttttggggcacagacgatggggagtcaagaggatctggaaccagggtcaagtgcagcccgtcagggggcctttgagtgaggggtgtcgagatctctggccatttcyggcgcgtcagtgtgttaggtgggcattggctgctccagtggtagaggaagggtctccacgtcgacagaggagaggcaaagttgctgacccaagagtagcrcctgccgtgggggatgctgctcccacccacactgacaagggcttccccgcccctcatgtgaggagcagctttgrgaactcgcgcctggtcagtgctgtgggaatgtgtgcccagttccttgagacccagtaggcatctggatttcttctcgggtttaaaccacggaggcttctacagctaggagaccactcacttgatgtcactgctttcaaggaaaacccgtccccgtgtagcacatgcttctgacctccacgtccagaacatgcctaagcagagcgaggcatggcgtcagtaagcgttcacctgcaacggctttgaagaaacctgaaagccatgaaaattaacgttgtaattttatcttaaccatttttaaattctgcatttaatatacgtggaagccaagaaatatgatgaccctgataaaatgcctcaagaacagaggccgggtgtggggccaccatcaccaggagtgctcccaagatcacatgagatgtaagaactcactaacatcaggagtgctcccaaaatcacgtgagatgtaagaactcacattaggagtgctccccaaatcaggtgagacatgagaactcactaacatgaggaatgctcccaaaatcccatgagatgtaagaactcactaacatcaggagtgctcccaaaatcacatagacatgagaactcgctaacatcaggagtgctcccaaatcacatgagatgtaagaacttgctgacatcaggagtgctcccaaaatcacgtgagacataagaactaacatcaggagtgctcccaaaatcaccagacgtaagaactcgctgtcatcaggagtgctcccaaaatcacatgagacttgagaactcactaacatgagaagtgctcccaaaatcacagacatgagaactcgctaacatcaggagtgctcccaaaatcacktgagacatgagaactmacatcaggagtgctcccaaaatcacgygagacatgagaactcacatcaggagtgctcccaaaatcacgcgagacatgagaactcaggagtgctcccaaaatcacgygagacatgagaactcacatcaggagtgctcccaaaatcacgtgagacatgagaactcacatcaggagtgctcccaaaatcacgtgagacatgagaactcacatcaggagtgctcccaaaatcacgtgagacatgagaactcacatcaggagtgctcccaaaatcacgtgagacatgagaactaacatcaggagtgctcccaaaatcacgtgagacgtaagaactcactgtcatcaggagtgctcccaaaatcacttgagacttgagaactcgctgacatcaggagtgctcccaaaatcacgagacataagaactcactgtcaccaggagtgctcccaaaatcatgtgagacgtaagaactccctaacaggagtgctcccaaaatcatgagatgtaagaactcagctgtcaccaggagcgctcccaaaatcatgtgagacgtaagaactcgctaacatcaggagtgctcccaaaatcacctgagacatgaaaactcgctctcaccatgagtgctcccaaaatcacaggagatgtgagaactcgctaacgtggatttttcttctggaagcgactctaaagcatgcacccccacacagtccctgagtctcctcgtggtgggcgtggccaaagcactgtgcctggtgactgtgtgtgaatagcactcagtcctcgtgctgtggcctcagcacaggacgaatgtgtgttgtgtgtgtggatcctcacgccacggcctcggcacaggacgggtgtgcgtttgtcgtgtgtggatcctcacgctgcggcctcagcagaggacaggtgtgcgtttggcgtgtgtggatcctcgcgccgcagcctcggcacaggacgggtgtgcgtttggtgtgtttgtgcacaaacacccgcctgtctcagccagctcacaaagagactcacacccatgtgtcggtccccctgcaggttcctgtgtgatcatggaactgcggggaagggaaggtgccggaaccagggctgggagatcacygagggttgaggtggggcccgtctcctgtacacccctgcggaaaagcctgctgggccccagagccggcgtccgctgcctctgcagctgcgttacctcgttcctgcctgttctgctgggccccaaagccggcgtccgctgcctctccagctgcsttacctcgtttctgcgtgttctgctgggccccaaagctggcgtccgctgcctctccagctgcgttacctcgtttcagcctgttctgcttctcatgctcaggatgctttcccgaccttgctctgtgtctcttcttgtttcccgtcctctctcttgaagccgtcccacctcactccagcgcagagctggggagagttttattctgtgatccagggtcgtgcaaggaggttggtagaaacatttcatttccgtgcattgacaggataccgtagcatctgctgttatctgtatttgctctttggtagaaattccaacacttaggtatgaattcacttgtgttttttctctttacatacttttaaattttccttaagattaaaaaaaattatgttagcatgttttaagtgaagtaaatacaaacgaccctcaactttacaatagttcgcttaacaattttctaactttacaatgatgtgcaagtgacgtgtgtttsgtagaaaccacactttgaattagaagtcttggctcagaattctgtagaacagcttgttccaagtyggccttgtgctggacgactttgccagcgatggggtaatgtctgagcrtggaaggcggctgggccgggtgtgctgacacgttttcagcctgtgatgggctcatctggacgtgaccccatcctgagtcaaggagcctctgtaatgaagaaaactgtttttcagaaagcgcagtcaccttttttgtamaaacaagcccaggaaaggtaggtgtcgttcccacatcagtgtgtttacacgagtcaggcagaaagagggagaggagatcggaggagcatgatgtaggcgaggtcaggttttaatgtgaatgtgtgcccacgtttctggcttggctgtgcaaaacgtacctccagatcttccagatagcagcacgggggcacgtgccgggctgccctgcctcaccagygttggcacggacgtctgaggccctcccaggtggggcrccacactagygagggtccctyrggtccgtgggctgccgtgctggccggcccgcctgcccttggctgtcaagtgtaaaataacagattttaacagtgccttgtttttctctcttgacaaggtatgatgccgtgttaaaggccctaagtatttcagaatagaatttagtagaattattcccgtaggagatttgccatcgaaacagtaaattcagtgatgtaagcattctggtgaagtgtgaatattagtaaccttgtcgagtaaccagatgctcttattaaataccattccatgccagcgtccctgggaacatgttacttttagagatcaytataatgacctgatgataaagccgctgccttagctaattaaccattggttaaaatgtttctgccttttaatgattcaggccagggcacatgtgctgtgactagctggacacgtggcgatgagtttgaaattgcagagtggacggggtggatgcgtcggcctccatgtgggctcgggggctgagctgtgatttctgatcgaagcggcttcacaccgagtctctgtgactctggactcggcctcgactgctccgaaccgcgcctgtctcgggagttgtgctccgtcctctgtggccgtktctcgtacctgctgcgggggtggggttaggtcggcgtcggtgagtgcccctcaaggccccagccaggtgtgcacccccagatccctcctgggaaacagcctgcgctgggggactgtggtcaggccgccccgcctcacctgcctgtctcagggaccacggggctgtgccgtcgcacacagacgccctcaacgtcggagagctgtgagcggggccgtgctcttgggatgggagcccccgggagagctgcccgccaacaccactccgacgtgatccatgctggacataaagtgctcttccctccgctagtcatcggccgagcgggcccctcgctcctgggtgtaagttctttctgtgcgtccttctcccatctccgtgcagttcaggagaggaggggagaacttgagttcacctcccggcactgggctcagcctctcccgccgccacatcgaggcactgacggtacccacctcccgcctgctgaggttcggggaggctgaggtttggatgcggtactcccatcacctgctcacttgcctgccgcctctgttgccactcccgtccgcgtcacacgtgtcaggcgtggggccggctgagctcaccccaggtgttcaggagtcgccctctctgcatgtttcccaaattggaggcgtgcccagagcgagcgggtggacatcttagcgagcgtccctgtggcacggccacgtctccacccccaggtggctgctctcccagattccaggatgggaaggactgggacgcctccctgaaagccctgccactcaggagtcttgctgtgaatctcattgatcttgaaaatttcaagcaaatattctgattattcaccataaaatccaacagtgcaccaggaataaagtccctgttcacataagggacagaaggaatttaaacccaatctttgcctgcgaaccgactgggtttgctctgtggatttccaagcgtcttttgcccrgggctttgttaaggattggttgagtttcaagccccagggctcaggtagaaagcagagtgctacctccagcccccaccctgctgcactcagagccctggactctgccgggagaagcctgttgcggaggaacggggcccgggaaggaggtctgtcgctgactcttggctgtttgtcaggtggacgacatccttggagaaggcagcgacgacagcgacagcgagaagaggaggcctgaggagcaggaggaggagccccagccccggaagccagggacccgcagggagcggacgctcggggcacctgcgtccagcgagaggagcgcggcagggggccgggggcccaggtgagtgcggggtctgaggtgggaggggcctgacacgggctcccggaggtgactctgcagttggtgggccgcctacctgcatctcattcttcacgccctccaccattctgtgtgtgacaccagcagcttccaaactcagcagcccctggtgatggccacttggttgtctccatgctgatccatgtcatcttacatgtgtgcaggcgtgtgaggtgtgtgcaggtgtggggggggatctgtacatctgcgcaggcgtgtgtggggtgtctacacgtgcacaggcgtgtggtgggggtatgcacgtgtgcgcaggcatgtgtgaggtgtctacaggcrtgtgtgaggtatctacacgtgcgcacaggcgtgtgtgggttctgcaggtgtgggggggtctgcacgtgtgcacgcaggcatgtacggggtctgtatgtgtgcacaggcgtgtgcagggtctgcacatggcactgctggtcaggagccagcgtcctgcatgtcgagggtggtgcctgatgtgggtcccccgccggtgacagtggtccccgcctccagcgtgcggtctgtgggtgggaagagctgagcaccgtggtttgctttgcgcttccttcgccatgaatgaggcctgttttcgggcgtttggccgcaacagcgcactctaaacgctgctcacctgctccttgtgactggtcagtgttttctgcattgccgtgaaaggtatctttttgtcacctttaacttggatgacatttctgccatgcagagatgttactattgtgcagatcttacagctgcttggttctgaatcttgtccgagaatcttaaccctgtgtcttttccttggatgcgtttacgtttgaccttttctacatatgaatctttgtaaattaagatttattttttagtaagggggggatttagcttttttcccagatgattagctcacggtcccatcgcagtttctgacatcatctttctccactaatcggctttgttctctggatctctgtgctgctgtcgaatggtggggaggagccggtttgctttgagacatcttttctcaggttggtcgatgaacaggcatgaaacccagggtgtggagaggtccccgtcccgcatcccccatgcatgtccttgtgtgaaaggcagccacctcactgcccggttctgggtggtggcggagacctgccgtgccgttaggcattttgggtgccgtctgttgattcttagcgttcaacatacagactgcgtctcttcttgcctccgccctgccaatatcaacacgccaggatttgggggtgtggaatgacgcagtgtttcctatgaccgtaaattgcttttaccaaatagaataggacacggtgatgctgttccctttcttaaacatctgttttacctggatttgataatcacctcacttttgttagctttcttcctttttgcctgtttctgaatccctggctgcctctccgctccactcccccggcctcccccgcaggtccccgcctccccccgcccgccctgctcaccgcccccgggagttgccttccccactctctggggtgttctctgtctctgcattttggtggagtacatctcccagaagcttcctgagaaagcgtctgtcctgtccatacgtccgcagtcagcgggctgcgtaaccccaggtggcagcatctccttgaggatttagaagcacggctcccgtcttcagctccggggctgctccgaggccgtccgaggtaacctcggaggctttgtcttgcccgcctgttagacaggatgtggccctccaggtcctgccgacatcctcagtacagacttgtgtcccgaggatttgccctgagaacttggtctccagagscttcttgsatctgctgcggggccgtgggccggtatttggacctctgcatcctggtttcctcacctgtgaaatgaggtaggagcagcgccagcctcggaggagctgctcccagcttcagcaggctagcagggggcactccaggtacacgtctggtgtctgtggtgaagaagacagtgcagactgctttctttctccccacgtctggtcttactcttaggctctcctgtaggtgaataaacagcatttcaagaaaagagcgtaactcattcaggcaatccagttacaaaattgggccagaaattccagcaacagatgcagacaagacaagatagtcattgttccgtttgcaggaattacttacagaaaatcacttgatttgcagctctgtggtttagcagggaaatgagtgcagcttctctcctggcaacccactctgtgtttaccacgtagaaagcagcattttccagctgtgttgaaatgatatgaagttgttttaggagagattttgaaattccgtattgggtgataacaagccttggttcttcccacatgaattacggggtggttttgcctggccgtaccttccttcacttttcggtgtagacccattgggtctgtcatgaagctctggggtcaggcctggggaaggcggtgcactgggggcctctgggagggttccactgccctcccctgaagaccctctagcccggggctgagctgagccagctccaaggagtctgtctgccgtggccatgttagtatctgcggatttgcagcgtgctytttgtatgaacataggtggtttaacstgatagtttttttttctaattaaaagaagaaacccaaagtgcttttccactaagaccagtcagggtgttgctggcggccagccacgtcatccaggatacgtgctgcatccgtgtctccccctgtgggcaactggatgtggcgctcagcgggtcgggacccagagctgctgaagacttgggggccaggactggagttagcacccctgggwttttgtggtttttttttttttgctaaatgacctgcgcacggcagaactgaccctcacgggtgaaaccacgcaagcacgattagagaaccacgcaagcacggaactgaccctccctggtgaaaccacacgagcatgattagaaaacccctcggctctggcgcggcttccatgctgccctcccagctgcaggaggtggttggggttctgcctctccattctggctcctcgggcaaggaccagatcagtactgtaattgccgtttcactctatgtcttacagactcggtgggcttgggtgatttcagaatttgagatcaggagaataaagtgtcctgggagtctgttcaggttctgctgcgcagccttcatacccgccgccaggacgggtgggactctcatacccacggccgggacgggtgggactctcatacccayggccgggacgggtgggactcggcgcttgctccctgcctgcaccacgcctgccgtttgcggatcgctgtggacgtgtggccgcgatagcagcctgactgctgggggccgtgtgtgcccctcaaaagggtggggcggtggggtcttttcagcttcctgtccagctgggtttttgtgactcttggactttggggacctcacttcttccttaaagaccagggacttccagttttatttcattcctgtttatggggtattcagtgagatgtgaatgttttgaaatttttcacatgaaatttttgcttgtaacgaagtaaatgtggtttgagttttttatttttgcatgttgaacatgtaggtttcatcatgattctttcccatgcgtggcaatgcgtttcgtacagaagctggaggtcactctgctctttcctgtcagtgctctagctggtggtacgtcttgctaatttcgcatggccaagctgttccacagaatcttaatgtcagttgaacttgaaaatgagttttaacataagggggaaggttgtgttttttacttgtctaccaagagtgattcattcttctctcaagtcaacaaacatcagatgcctgttctatatgcagccgcctgccgggcastttcactccttaaaataaatcctcaaaataaaaaaccaaacaagtcatcttcagaatgtttaaggatctcacagacacatcgtcccaacaccagttccaggtaccgaaaagaacaggcgcccaggtgaggtgaggtctcctgcacaggttgggtgaggtcccccgtgcggttgatctgtccctgagtccctgaggtcccccgtgcggttgatctgtccctgagtccctgaggtcccccgtacggttgatctgtcccttagcccatggttgggtgaggtccccgtgtggttgatctgtccctgagtccccgaggtccccttgcggttgatctgtccctgagcccgtggttgggtgargtccccgtgcggttgatctgtccctgagtccctgaggtcccccgtgtggttgatctgtccctgagcctgtggttgggtgaggtcccccgtgcggttgatctctccctgagcctatccttttatgcttttggtggccrgaggtgaatcatcactcacaaaggcaactttaaaatataccatagcctctttcttcagatcattcctagagttcgcrgagaagtgaaaacgacattgagttaactgccaagaaacatagcacagcatggtgggagctgttatgttactggcaagaagatgagctggtcgttcccatgatctgttgacagagacaacagctgatgatggctccctaagtacttggagattttagtcctggtgcccccgtttcctgtcccatctggtgcagtgataaacaggaaaggaaaacagcaccaygttttaaaggcttagtttcctgacacgagtacccagatcccaacactcagctcttctccacaggggtgtgtggtcagcctgcgtgggagacacagggcggcaggcagggtccttctgaggttcacctcctcttgtccgtttgggagggttgcgtgagctcccactcttagacaacagggaatagtgctccaccagaaacactcacacatcaaagttgtttttaatcttggataattaactaagaaagataatctttaggagagagaggagcagaaaaactattcaaagacataatgactgaaaactccccaaatgtaatggaaaacattaatttatacatcccagaagcacaacaaactccaaataggatgaacacaaagatctttacctaggcacatcccagtggaagaggaaatgccgggagcagggctgggggcccagaggaagcrtgaggcgtcgtgggagagaggcctgggggcagcagaggaggcatgaggtggaggcctgggggcagcagaggargcatgaagcatgagagagagagagagagagagagagaggcctggcaccagaggaagcgtgaggggttggtggagagaggcctgagggcagcagaggaggtgtgaggtgtccacgagagagaggcctgagggcagcagaggaggcatgaggcgtccatgggagagaggcctgagggtgggagaacccatcacaccacagccgcttctcctcagagatggcaccaccacacccaggcccctgtatccagcaaaacaacctttcaaaaacaaaggcagggttttcccagacaaagtgggaattcactagcagacgcaccttacaagaagttctaaaggaagctcttcaggctgaaagcaggtgacttagatgaaatctgaatccacacaaacaagcaagcacgaggaatgcagattatgtaactctgtaaggtagcgtgttgcttctcctttattctcttgatttaaaaagcagtatagttttatagtataagactctatgcctggrcatgtggtggctgtggctcacgcctgtaatcctagcactttaggaygccgaggtgggcagatgacttgaggtcaggagttcaagaccaacctggccaacatggtgaaaccctgtctctactgaaaatacaaaaattagctgggcatggtggtgcacgcctgtaatttcagctactcaggaggctgaggcacaagaatcactagaacccagaggggaggttgcagtgagccaagatcatgccactgcactcccgcctgggccacagagcaagaccctgtcacaaaacgaaataaaacaactctttgtacctaattgtattgttgggcccataccatgtggagatgtaacatttgccagtagcygcgccgaggaggggcctaggattaaatgacagcagatggtgactggaatttacagcaagagctgaagagacccaggagtgctgaacaagaaggttggtctcaccgtgctccgagtgtgcacctgttccctgtcctgctgtaaataattacaacgatgcattgttgggtttgtagcatgcatggatgtggtatcgtacagtgaagcaaggccgagcacggtggctcatgcttgtaatcccagcactctaggaagctgaggcgggcggattgcctgagttcaggagttcgagaacagcctgggcaacatggtgaaaccccatctctactaaaatacaaaaaattagctggacatggcagcatgcgcctgtagtcccagctactcaggaggctgaggcaggagaattgcttgaacccaggaggtggaggttgcggtgagccgagatcgtgccactacactccaccctggacaacggagtgagactccgtctccaaaaaaaaaaaaaaaaaaacagtgaagcacaaagtgaggagtctgagtgtgcacctgctctcactcctgctgtaaataattacaacgatgcattgttgggttcatggcgtgcatggatgtggtattgtacagtgaagcacaaagtgaggaggggctgagctgtgcagcagccatgtctccgtatcgaattggaattaggccagcatgagtccaaaattgattctgatcragcgagatatacgtatgctaaacccaagagcagaagctaaggaagtaactcaaaatacatcgtgaaacagatcatacaagtgtgaaaggaggataaaccttgggccccaccatcatgaaactgaagggaaaagtcacactgggaactgctcagggccagcctgcctcccgttctatccaacctcccgcccattctatccaaagccaccctccgctcactgagacagatgcagctcagggcaaacccgccacccattctatccaaagccaccttctgctcactgagacaggtgcagatctgatggcctcctttggagaggctgatcagaaactcaggaggatgcagccatttgtctcttgtctacctgtgacctggaagtccctccctggttccagctgtcccacctttccagagtgaaccagtgttcatcttacatatgttctttcatgtctcatgtctccctaaaatgtgtaaaacagagccgtgcccygaccacctcaggcacatgtcaggccctcctgaggccgtgtcacaggcaggtgaccccaaccttggcaaaataaactttttaagttaagtgagacctgacacagatacttggagttcacaaaaggaaccaaaatgttacattagacagtattcacttaatgcaaaagaaaacagaaaagggaagacaggaactaaaactacatgaggcatgagaaacaaagcagagtggcggtgtgaacgtgaggggattcagagctttaactatgagtggatggacaactgggtcagaggccatcaccgtaggaaagctggagtgttccgctaatatcagagaagactgaatttaaacaaagaatgcttctacaggtaaagaaggacgctttataatgataacggatggaattacgatgctaagagctggatccatcgggaagagtgacagttgctagcacatgtgcaccggaagtgagaaccaactcaccagtggcagaaactgacaagcaaagggagaggcggccatggcgagaccttggaggttcccccgccactcagtcatggggggcgtcgtgggaggatgctgcccctggaggggccacagaccagtcctgaagctcttacaggaacgcaggagaccctggagggtcttgaggaagagcaggccagaggacgcacatcgtgcttcagagtaacggaggctggtgtgatgacagtgtgctgggccgtggagcaggagtgtccatcccagaacagccccatgtccatggccagctggctctcagcaggggtaccaggccactccatgggaaagacttgtgggtcctgagagtggggtggggaatcagaaggtgctcctgggattaggaggtgtccccacgacatgtaagttcatgtgagtttcaggcttttccaaagcagttgtaatgactgtggcatggataatttttgtggggaagatgagtggtcagcacacatacgtgtttgactggattgtgcgtccctcccatgcgcgttctgtccctgcgtccctcccgtgcgcgttctgtccctgcgtccctcccgtgcgcgttctgtccctgcgtccctcccgtgcgcgttctgtgcccgcgtccctcccgtgcgcgttctgaccccgcgtccctcccgtgcgcgttctgtccgtgcgtccctcccatgcgtgttctgactctgcggtctcttcagggtttgccactcgagggtgtcggaggtggaggttgtgttcgttctcccttcacatagcacgcggagttttggtttgtgaaagtttgctttttcgtgttttcatagctacacaaactgcatctcttggaaaagtgagagcgttttgacarctgctgtcactgtgaacaggtcaggaggccctgccttgcccaccccatacttaggggcttaagaaacaaggtctcactctgttgcctgggctggagtgcagtggcacgatcatggctcactggaagcttgaactcctgggctcaagggatcgtcccgcctcaaccttccaagtaggtaggaccacaggtgcgcaccaccatgcctggctaatgtttttaaaatttttttgtagagatggggacttcctttgttgcccattgagaccagcctggcctcaaactcctggcctccagcgatcctcccgcctcagcctcccaaagtgctggacctacaggtgtgaacaccgtgcccactgtgcctaccgtgcctaggggtgttaaagtggtccttggtgcacagggctaaaggctcctggtcgcgtgacttgaccgtgtgctgccagccactctggtgcctgcagtttagaatttgggtacaaagctgctgaatcaaatagtgttttttaatgattgcccaattttaaatgagagacattaatttttttccagtcctttcataccaatacacgaagcagcaattcttaccctaaaataggtcactgaacttcccactttaaagagccccggcctggcagcaggctctcggaggggagggtcaggtgtggtgagcgcccggccagctccctgctgggaagggcccctgcccctcttccacctgtaacacacacaggttcattctaatgccatgagattgctgaggagagcatgacaatgttcacacccagagctgtggcatccccgctggggccctgcgggaactgggactcaggtgcagacgccacggagggagggcaccgctggctctccctgggcccgggcccactctcagcagcagaccagctcttgccgcctgctttccttggcagagcccagccctgtgttgtaggtggttggactgttgggtcccgctgacgtcatctggtgggttccttccaggtccccgcggagccccccacgcttgtgtgaggcttcacctgctttgggcagccccaacgccgctctcacgccacgttccactccagggtgcactggggaaattatccgccatgcgcagcgcctcctgcaggtgtccggtgcgtgcagacctggccacgccggcacgggttttttagtgacgtggcggcctcacggtgagcagcactggtcttcccttttgttcccgcggccacgctggcagtggccacgggaaccctgtgcctgtggattgttccatcccctttggattagatgctggtgtgacacaattgtgcatttgccgcactgacggatatctttccggtgccaaatcgtgtgcactgtgacagcccagtgtgtttggaaaactgaaatatgggggtggggtatacatatatattattctgtttgtattcttgccttattcaatgttgaatttgagataaatgttaaagctgtaaattttccccaaattctatctgttaacatttctctatggagctgtgcagctggttgtatgaacaaaatacaaatattgcatgttatgctgaggaagtgaagctagtatcagttgcggacatttactaaccatagyctgcagctgtgtctaatgttcgaggtaatttttaatgactaaagtccattcatctcgtatttttaaatcccatgctccaaacatcgtttaactaagagcaaaggttttgtgccaccttagtgaggcgctccctgtacttcatcayggagcgagaycgagggtgcrgcattcgcagcaccaggagggaccgcgcagggcctggggggacccatggagggagggccgccccagcccgggctctgtgacccctcagggtggaagccgttgacctggtcccagacactcagcctcatggaagccctgaccctgtctcccgagtcagctacgtttttccaaagtgcgtggaggacgtttctcagcattcttaccagcatcgtgrggtccaggcccctgctgtgagatggggatggtggcgcctgcccgcaggtttcttgtgaaaatctaaggaagaagcacttagcacagccccagaccacagcgtccccagctgtggatccacaagaaactgttcccagcgaatgccatgagcgcctgcggccgcctcatctcacacaacagcgacagagtcatgatcagaggcctttagagtcatcattatcatgtctgtgtgtgagccgtgactgcctgggagccgtgtctgcctgggagccgtgactgcacatgagccgtgtctgtgtgtgagccgttctgtgtgtttgccgtgtctgtgtgtttgccgtgtctgtgtgtgagccgtgtctgtgtgtgagccgtgttggtgcatgtgcacagggctctccagcgggagctgaggtggtcccttccgtgggctcggttcaggtcctgtggcaccctgccaagttatgctggcgtttctgaaggtgtgtcctgctgtcaacagcactctgggtgtttttgtcggccttgtgaggggaacatatttctaaacctcaaacagagagtcacagctggcatttcccattctttgccatcctcttgctgccattagaactctgccacggatggcttcctcgcttgattttagaaagaaaagaattgttggaactggttcttgcacctctcgccctccccctcctctccctgcttgccccagggtcccgcctggctctcgtctgccccgtcttcactttcggtcrgggcccctgcccctgcccctgctctgctcagtgcccctgatacrtccaacccagcgtcgctgtgagggagtcaaccacacctgccagcacccccgagtctggccccactaggaggggccagggctcccttgagcaaggcatcagcacacaggcagggagccgggcaccagactgtgagggtcgcgccacgcactcccgaggccccgtgcacacgagatccaggcccgccccctcctggacttggtgaccgtcccgagctcgacctgagagggcacttcggctctcctgttcacagtcatgactgycccctccccgaggtcagcgccatgcactgctctgggggcctgaaacrccgcctctgttcgcaagggtctcctgtcccgtccacctgccagtgggttgagctcttccaggggttcgggacacccctcacggcagcaccttcacgtttacgagaactgtctctgtcttgttttgtttcaagttctcaaaacggagtgaggtggaggaagcctaatgggaggatgggagccgggttttcccggaacagccgtcagcgtgtatgcggaggaaragagatgactgatgaatttgttaattgccaaaagcttgttgctgtagcaaccggaggccagactcgtggccctgacagcgtcgttagtgtcagcagagactggaaataaaggaaactcgtgtatgatacgcctggcgtcctcaaagcaaacagcrggcggtgcccagcccaacacaggcacgggcacaagatctgcagatgaggcatggaggggaagcgggcggtgcccagcccaacacaggcacgggcacaagatctgcagacgaggtgtgcagaggggaagcaggtgcacagaaaaggtgcgcggagattttttttttttaagacagggtcttgctctgtcgcccaggctggagtgcagtgttgcggtcatggcccaggctcactgcagcctccatttcctgggctcagaggatcctttttcctcagcctcccaaatagctgggactccaggcatgcaccgacactcccagctaatttgcaacccctcactctcatgtagcaattaaaagtaagcctttatttctcagtagaaaatattcattccagttgacataaaaataaattcgtttaaaacttggacggcaggtattagggcgtgcacttcccgctactctgcctttttttttcccccccgagacagagtctcgctctgtcacccaggctggagtgcagtggcgtgatctcagctcactgcaacttccgcctcccgggttcaaacaattctcgtgccccggcttcccgagtagctgggactacaggtgcccaccaccacacctggctaattttttgctttttttttttttttttttttttaatgtggagatggggtttcaccatgttggtcaggctggtcttgaactcctgacctcaggtgatccgcctgacttggcctcccaaagtgctggtattacaggtgtgagccgccacgccctgcctactccgcttttaaatgatgggatgcattgctttttaagaaaggatctcatggatccaggggtcccagtatgtgatgaaagatggcagttcccatcttacagagcgggctggactcagaggcaggccggggagggaggggctgggtacagagggcaggcttgggagggaggggctgggcacagaggacaggctggggaaggaggcactgggcgccgagggcaggtcagggagggagggaggctgggcacacagagggcaggtcagggagggagggaggctgggcacacagagggcaggccagggagggaggggctggactcagaggcaggccggggagggaggggctgggtacagagggcaggcttgggagggaggggctgggcacagaagacaggctagggagggaggggctgggcgcagaggacaggccggggagggagggaggctgggcacacagggcaggccagggaaggaggggctgggcacacagagggcaggccagggagggaggggctgggcacagaggcaggtccaggagggaaggagggagcgggggaggggctgtcatcctacggcccagtgcctgccacctggacaggacttggagttctggggcccttgtgtttctctcatgcggtatttcctggaccacgaacagttgggttctctgaacgagcttgtcgtgactgatcggctgtgtgtgccagcccacggggttctcttgtcttctgttggttccatctgatcagctgattttattccttttgtctcttataaatgaactgtgattcttctaataccagcaagaatggtttcaagttatttctgcgctatagtttgtgtatattagcctcgagtgcatgtgtgttacatgcgtgctgtgtgtgcgtgcaggtgtatcacattaccgtgctatagtttgtgtgtgagcctcgagtgcatgtgtgttatatgcctgctgtgtgtgtgtgtggctgtatcacacataatgtgtcacataggtgtgtatgttagctacattgtatctacgttagctaagaaaatattcttagggtactcacatatggtgactgtccctagtttctctcagtgacttttcgggattgtaactgaaggctagtatggctcagttgcccctaatcagggtaaaatcaaaacaggctgtgcacatttaaccaggcttccacctctaaggttgtagctgaggttccttggcgcagtgggacgtcccagcacggcaccaggagggagggtgtctggcaggacatcaggtggttggaatttcagggctctggggatctcctgggtgtgccccgatcaagtcggctcacgtcacagaaaccaggtgcacctgcagcggctcctaaggaaaacctagtggcactggctggttatgcagmggctcstaaggaaarcctagtggcacyggctggttatgcagaggctcctaaggaaagcctagtggcaccggctggttatgcagaggctcctaaggaaagcctagtggcaccggctggttatgcagaggctcgtaaggaaagcctagtggtactggctggttatgcagaggctcgtaaggaaagcctagtggcaccggctggttatgcagagggctggtgttctctttgtttattaagagtcattttagcagtggcctgaggaaatgagaatttccagaccgtggcccacttgatgagctgggaggtgcttgttcacataacactaatagttactctgacagatgatcttaacttccctgtcctgttttcctgttctgatgtcttctggcatcacaggtgttcatgagcggccggaacgtgcatttgcagcaggtgaacacctgctttgtcartggtgtcctggtgtgtaacagggctggggcctcttctcctgcrctggggctctgctgtccacacgtgtgtgaygtggccctgggtcggtggcctgtgtgtgtccttgaccagagaattgtgccgtcttgtgttaaaaccacggaagccacttcccaaatgcagaccaggcggtgacccggcgttgtgcgtttgccacaagcatctcacaccatgtttgcttctctkcagaggccacaagaggaagctgaatgaagaggacgccgccagcgagtccagcagggagtccagcaacgaggaygagggcagcagctccgaggccgacgagatggccaaggcgctggaggcggagctcaacgacctcatgtgagcgcgggcagcgggcagggactgaagcctgacygacctccagcagcactcrgacgtccccggaccagccctcagtctcggtccacgctgctttcttcccaaaggacatgtatatttgcagagctccacatacagaaacacattattttgcagaaataggtgtttttaagaagttttactacaggaatgtctacttttgtaagtgacaggtgttaaaggcccaggtgtgctgtgccaaagagctcagcagaggctcacgtggcccaggctggtgcgcccgctgtctcggtaaggggcgggttggtgtgttttccccttgtgtaccagagcacattccttaggggacggctttgggggtcccacgagacatggactaggagtttaagcaggacagtgtgcgtgcacgagctccgagcccagcacagacatgcctggaacccccgccgcctgctgctccctcctagggaacccatttccggggaacgccgtgactgtcgggcagcctggagcttcctgcagcctcctacgcagggtccacgccacgtggcctgggctgccatcctgccgtcctcccactggcatcctggcaagggggcgttgcttttcctgggcggccttttatgtcttggagacacctgatgtaaagtttctgtaaatctatttcatatctgacccaccaaacagatttctctttaataaaaatcctttttgtaagttctcttctcgtgggtgtgtggcagcggtgagcacccgcctcctccctcgctgggatccagctccttagctgtgaaacagaaacgaaaaaattcccacggacrggaccgtgtggaacggcagaaatggaaaccgcagaactgcgagcgtgatgatctcagggtttcgcctctgagcataagaaccaggcttgtagctggtattttaaaacggttaagtgtgaagaattactctcttgcattattttcatccttcccttttgtttgtttgggatgcgggggcccgagagctacaggtaggtgctgggctatggccgccgccaggacccctcccggccagcagcctcggctcacgtcccctcctcctcccagcatcagtcccgcagcgtggcggtgggaggctgcacctcgaggccacggcccttctccaaaagcacacactcctgctttccgacggcaccctcccctgaccacagctcgggaggtggcacgtgtgagaactctccatccacaggatgtggctctcgcgggacctccaggctcaggctgtctccgctgggtgtgggacctttcctgtggggttttcgatggaggttggctggggagggaggcatcctcagtgggtagaggaccccggggtcctggtgctgctgtcgtcaagatgcggcgacatggtggcagaggaaaggcaccgttacccagcagcacgccagccccgggtgactgtttcctgtactaactaggttatttgcagcgccgagtgaagaggcagcttcaccacccaacccacctgtgggttctccggggtctgcagtctgaggaggctgcaggatgaccagacgccggtcagggagttcctcctgtccagagaagcaggaggtgaactgggcccacctcaggtccgatttcgccacgagcaagaatgtaagatgaattggacagaaaacaaaaatagatgtacaagttgatacccaaagaaagcagaagattctacagtttatagggaggggcacaaaacgtgcagggagtaatgtgccggggggtgggggcaggggccgatgaacgaggccttgatgctgtgtggagacctctgggaaaggctgggagaccttccctccttccacagtggtttctccctgaaggcgattctgcgtgtggttggtcctgctgggaccaaggtggccccttgttctgctcttggccgagtcccctctggcttcatgggggtgttaatgaggctctgcaaggcctccttaaacacagtgtggaaatacaggtggtgctgcaggggcagcgagaacggggacctctgctgctgggtctggcctaggggtgaagaggacgggaggagggtggcgtggtagctggctgcgcggggcctggtgacgggaggggccggaccgcatgcagcattcaggaccagcgtggccctgggtgttccgcctgttctgaccgtgtggtcgagtgaacagagcatgcaggggagatgcagcaggttctccccgacgcggaagagcaaggggtccccggttcctggaggagcagcgggattgccccaggctctgggatcgcccacgggggcagcgggccagcacccccagccgcatctctgcacagccgtgctgcacaccttctccgtcacgtgttggaggtgggtctcagcaccagcacatccacattgatagcttaaaatgggacttttctcccgcctgtctcactgttggcccgcccccatgcagcggtggggaccccactgcagggactccaagagccccatcctgtcctcggctccagcctccatcagcaccagccgtgtccttgcagccctgactggagcaactcccaaactctgctgcccggcaggtcttctgaccctgcccgcggtgatggcaccctctggaaggctggcccaggacggcacctccatgctggcagcccctgagtgtagtgtgtgttctacacaaaagagccaggaagtcatctgtgatcattgtttaagggactgtgattaacgtttatgaaatgttctgtgctatgcgaagaaaccactgaatgttagggaaaatattaaatactgaataattatacaactgttccaaataaagtcttaagaagaaacttgaacttgcttcccttagtataaatttcatgtcaggttttaagcttaaactggctgtaaggaaatttgtgatttaaaatttgaagaggtgactccttaaatttcgagatagtcgttgcataaatagatgataaattttagaccattcaaaaatctgtaacagttaaatttaatgaaatttccttccttttctcttttgagaaatggaaagttgaaattttgtataacagcatgcacagatttcatatctgatcagtttttcatattaagttttcaaaacaaccatgaagctctaatctgcacgtgcgcttgctgtgagacggtgcctggcagacgtggagatcgggaggtagtggttctccacctggtgcccacccagtgatcacttttagcgccagacatgccataggttttgacaaatgtctgatggtgtatccaccactgtggtgtcgcacagaatcgtgtccccgtgtatccaccaccgtggtgtggcacataatcgtgttatatgactggaattagtatgtagccttttcagattggcatcttccacccagtaatatgcatttaagtttcctccatgtcttttcatgacttgagagctcatttctttttaccacggaatcacacaattcatttatccattcacctactggaagataatcttggttgtctccaagtttgggcagtgatgaacaaagctgctctaaatatccatatacatgtttttgccaggacataacttcttaatcccttagggtaatgccaaggcatgtgactgccggatcctacggtcacagtgcatttagaaactcagattgtctcccaaagcagctgtgccattttgcattcccacccacagtgaatgagagttcctgttgctctatgtcctcactggcgttcgacgcaacgcagagcatcttttcatgtgattatttgccatctctgtattcatatcttctttgacgaggttttaaaatctttagcccattttgaaatcagttcgtttctaattgttgactttctctgttgtttttttttgtttgtttgttttttgagaggctgagtttcaccatattgcccaggctggtctcaaactcctgagctcaaacaatctgctcgcctcagcctcccaaggtgctgagattgcaggcatgagccaccacgcccggcgagttttgatttctgttaggaaagagttttgtatgcattctggagaacaatcctttctcacacatgtctcttgcaagtcctgtctcctagtctgccttgtcttctaattctcttgacagtgtctttgagagggcagaattttttcattttcatgaagttcagctcatcagttacttctgtcatagactgtgcctttgctgttgtgtgaaaaggttcaccatcatacctagatcatgtaggtattccctaggggtttcatagttttgcattttatagttaggtctctgatctattttcagccaatttttgtgaaaggtgtaatgtgtgtgtcaacattcatttctttgcttatggacatccagttgttccagaaccatttgttaaaaagactcttttctccactgtattccctttgctcacttgtgaaagatcagccgactgtatctttgtgggtctgtttcatcaatccatttgtctttctttcaccagtacctcagtgtcttaattactgtcgctttagttaagtcttgaggtcgggtactgtccatcctccagcttctttcttctccttcagtattttgttgggtattcggggtcattgcctctccatataaactttaaagtcagtttgtcagtatccacaagataacttgctaggattttgattaggattgcattgaatgtgtagatcaaattgggaagaactgacaccttgaaagacttgattcttcctatccatgtacatagaatatctctctgtttcattcttccttgactttgttgatcagaattttgtagttttcctgatagagatcttatctatatatagttagatttatacaaaagtattttatttggcacaggtaatgtaagtgatactatgtttttaattccaaattccacttgttcattgctggtatataggaaagcagttgactttgtgtattaaccttgcatgctgaaaacttgctgtagttccaggaggcacttggtcggggcagtccaattcttttggattttctacacagacaattatgtcatctgcaaagagttttatttcttcgctcccaatcagtatactttttatttccttttcttactgcattagttgagacttccagtatgatgttgaaaaggagtggtgagaggatgtccttgccttgttcctgatcttaatgggaaagctttgcatttctcaccattattatagattttctgtgtcaagttgaagttcccctttattcctagtttgctgagttttatcatgaataagtattgaatttttgtcagatgctttttctgcatctgttgatacgctcacgtaatttttttgttgttgctgtgatgggttacattgattttcaaatcccagtagtctggggtaaatcccaatagtcttgctgtagaattctttttatgcattgtagctttcagttggataagatttggttgacgattttgcatctgtgttcatgagagatattggtctatagttttcttattttcatctggtttgtgtaatagagtgatgctggtctcatagaatgagcttggaagtattccctctgcttctgtcttctgaaggagatgatagaaatttcatataatttcttccttaaatatttggcaaaattcaccagtaaactcatctgggcttgatgctttctgctttggaaagttgtttattattgattcaatttcttcaatagatattggcctatttagacaaactggttcttatatgagtttcagcagattgtgtctttgaaggaattggtccatttcatctgggttatcacatttgtgggcatagagttgttcatagtattcccttattatccttttaatgtctatgggatctgtagtgatgtcccctctcattttttgatattagcagtttgtgtcctttttttttttttcttaccctggctaaagagatatcaattttctttcttttcaaagaactagcttctggcttccttacttttctgtattgatttcctattttcaatttcattgttttcatctctaattttttttatcacttctacttagtgattgttgttttttgagatggaatctcactctgtcacccaggctagagtgcagtggtgcaatcttggctcactgcaccctccaccttctgggttcaagtgattctcctgcctcagcctcctgagtagctgggactacaggcatgcaccaccacgcccagctaatttttgtatttttagtagagacggggtttcaccacattggccagtctggtctcaaactcctgacttcaggtgatctgcctgccttggcctcctaaagtgctggggattacaggcgtgagccaccgcacccagcctattacttctactttgaatttaatttgttattcttgtcttattcaggtggaagcttcagttattgattttagatcttttctaatatatgcattcagtactctgaatttctctgcagtactgcttttgctgcatcccacaaattttggtaacttgtgttttcattttcatttacttcaaaatatttttaaatttctcttggtattacttctttgtcctgtatgttatttagaaatgtgttgtttaattgctgcatgtttttgtgatttttcagttatctttctattactgatttttgctgtaatttcactgtgatctgagagcagacactgcatgatttctcctcttttaagtttgctgaggtgtgattgatggcctgtctgcatgaatgttcctgtgagcctgagaagaacgttactgtgctgctggtggataacattgtctgtagatgttaatgatatccagttgattgatggtagtgttgagtttgaccatatgcttactgattttatacctactgaccaccctgtctcctcccctccttatagcccttgctgaatttggggttgttttgatttttgcctttttgttttgtttttttggctgactgcaccatgacagcaggaatgcagtctggttggttgatgtagcttctactctcaacacagaactggctcataatatctgttcaacaaaagtttgttgaatgaataaatgcaggttctcaattcccagtatcttgcaggcatccacctaatgtggctca

SEQ ID NO: 93295 - DNA, 18666 bp, Homo sapiens
  misc_feature (1)...(18666): n = A,T,C or G
ggcgagcccttgcggctccacatcctcgggacggcacgctcccacgggactggagcaaaggtttcagagactcgggatacagccagatctcttcggtgaggagactcagtcttactcgagtgtatgtgatttttaaaaaagacattgaaacaactatggaaacagaggcaaaggcagcaaggctttgggtttgcgactgggaatccgtgcggcctccctttggtgaagacctgaccccgtggtgggggtgaacagggtttccttgaccccgtcccagggttcccttcaggacagatggatttcactaggggaagcgtgatgctggtagcctccactctcaggctgggcagggtaggctcccagggaggcagctcccagcgcagcctcttccatcactccggctggagctagaaggagagaagtgagctgaggctctagaaagtgctgcactcctgcctttctttttcccaagggtgctcttgacatctggagtgcagtcagcaggcctttccgagtgggctggctgcctcagatgcctcagtscctgttgctggggatgcttcggtggggcctcctcactgtgggccttctcttgggtcagtgtgatcctcgtgtcccttccctgtgccagcgacactcgtgggcttcacgtggctggcccctgctcccagggctcttgagatgctgcctctgactgcagctcctgccacactggcacctgtgtggccgctgctcccctctgcacctgggaatagctgcccagagacttcctgttttgaaccttttgccttgctcaggcagccagcaagggccctggcactcacaacagaagggccctgcagtgctgcggctctgctggcgggccaggacaagctgtggggcgcagacacactgggcacactccagacaggcacagggcctctgggcagtgagtttgcaagtgttttgtggtcctggatcatgcacaggcttcttggcagccaggagaggctgtctctgcatttagtgtgcacacctgaaagagcggcccctcacccactaggcagtgtcctcccacatccccaggagggtcttcctgtgccatctgaggtccacttagtggaaagcctttgccacaccaggacactttcaggactactcccccacgtggctgtgctcatggtggccagggctgtatggctcttgaagctctccacacacttggcacagatggatggcttttccagtggaatcaaaaggactcaggcattctgaggccagtctggccttggggtttttcagcttcccagaagcctgcagaatcgttctggggggttcccagttgcctccagaatcatcttcagtcttgtttctgactgtgttaccaaatactgtggaagaaactcagatgttagcctagtgatggggacacacttcttttgttcagtgtgacctgctcagcctctagcccccagccccagcgagatgacggataaggcagcgtcctgtggatgccagagccggggccaagtgtgggtcagcatcccagctcagaggagcggcccagtttgtctgagaacactgaagtcccagagccctggggaggggcttctgaccagcactcctcctgctctcattccaacacacacaaagggaatgtcctggtccagggagccagggctctcttgctgccatgtgaataattccctgtagcagccactgctagacagcaagcttgggaagccttcttatgcagaaatcaaagtcatttttataaaaagtgtcacagagtcccttatgaagacagctggacagagcaggagccgacccttccctgactgcccagttcagtgagcccggtaaaatatctgccgtcagcagcctgccatgaggtgcagtgaggaccttctacttcatccctccaagctgagtcgtatcataaaatgcatactttatgttccttctgcctgtagagaatcagaaagcacatgatggaggtttcagaaaagggcttgtgagatcgagcatgtcagagctgaagatctgtgtctgtgagacatgtcctcctgaaagagcacacatgagctgacatagccacggcgccggattgccctcaccctgattgtcccatcagtgtagcttgtctcaagaggtttacactgtggctgtgtttctcacaggttacccaaactcctatcataaaggcaggaaacagaagtaaaaaacctgaatccaaaccacaggaagtgctgyggagatactgattcgtgggttgatcagagcccaggaggcactaaaggctcaatgaacatggtgatctttgtgcaagagatgttccatcaaggcttacctggctgggtggtagctttttggcctctgttgggggctgggaatccttcacccaaagctcatgttccctttcaagtctacaagtgatctctggtttggcagcagcatgcactgtagggagaaagacagcccagtgcccctcaacccacactgagcgcacatagacccgtgtcagtcctgaagcctgacttgcaccacccatttaatgccctgggctcaccctatcaatttgggacagcgggggtaggttgtaaacctaagagagctccagaagtaggcagggcctggcatacaggtagggatgtttatttcagggcaacttcaggagtgccaagggctgataaaacagtgcaattgtcataatatgttttcccactgccagggcccttgaaggagaaacaggctcaactagtcacagagacaaccatgctctgggtctagttctccctgaccccacaggccaggagtgcccctattagatggcaagcaagcaaggggccaaggtcctcacccagcaagactcccagctcctaattccttcttatcacatcctggtataattccttctactcatggccaccagaacaatgggtggaaggtaggtggttacatcattaaatgtcacaggccttatttgcaaagacagagacatctggagctgttgttctcacctccgacacgtgccccgtctgcagagagcattaggatgcatctgtggctctgaggtgtgatttcctagggccttcaagtgtcctggggctcctgttcatttgcactgggggacactcagggaagttttaaagagcctctttcagtggctccttctccttctaccctttctaggaattcatcagccccatgaaaagatgaacgatagagatgtcaccaacatcaggaccccactccctgggagatgtcatggaaacttgtcaatcacacccaaagcactcactgaggagccatggcagagcagtcggtggcgccaataccaaccagaagccgccagggcagaggggaaccgtgaagccagyggaatgcacagctccacctcaggggaccggggtaggcggggctgtgtctggtaacatgccctttgcctcacattagtgcctctgaaaatagtgtcctcagcctgggcacaaaccctaggggtgagctgggagtgtggaggagacgctggattagggagaagtctcggccatgtgttctggctcttttactgatgagctgtgtgggcctaggcaagttacttcacttctctgggcctcagttttatcacctgtaaagtgataggattgccttagcctctaagatccctttcagctaaaaacaaagttctagaaaataaatatgtggtactgtggaactctggggagctgtttgatcaggtgaacagtttacccatggaaatggggctccagcacaaagctgctcacatcttccagtcacgctccagggaacagccagggcttgtgggcccagatgaggctttagtggttggagaaggagccagttcctggttttaatcccttcatggacctcagaccatcacaaagctgccaaacaaatgacataggcaatcacatgcaaattaggacagaaatgaaacatcaaagacattaaaggaaaagagtaagagctgcaggctgctaatatgagtggctgctcagactcagcaatgtttttggttctggccaaagccaagacaaaggagcagaggcaaagaaggaaatacatttcactttacagctgtcattttctacagaggattttttttttccagaacaaaattcaaaaagtccgtcttttttgagctatagaactttcgtggtgattttttttttttttttttgagacggagtctcactctatcccccaggctggagtgcaggggcacaatctcggctcactgcaagtgcaagctctgcctcccgggttcacgccattctcctttcagcctccaaagtagctaggactacaggtgcccgccaccatgcccagctaatttttttatatttttagtagagacggggtttcaccgtgttagccaggatggtctcgatctcctgacctcgtgatccgcccgcctctgcctcccatagtgctgggattacaggtgtgagccactgcgctcagccctcgtggtgattttttgaaggcctgtatggacatactcttaactctatctcctggatgccaagtgcacccttatcctaggccagtgttctcaacaatgtacacactctggatgagaaaaataaccattgtttacaatccagctaaaatctcacctcctccagggagtcttcctggatttctccaccctctgaattctcataatgggcatttggctactttgatcacagggctcttagaactgcgctgtccagcattatgattttaccagaatatatcactcctcaactactttagaaacccctcgaaggctaggatggtattttatacctaacagtttggtgtcatcccacgcccacctccaacttacatgaatgttggaaggatggatagggaggtttcaactagagaacggagaagggcggatgtaactggttcttgatttcagaaaacagccaggagcacacatggctgacggggtcagtgcaaggacaggcacatttcccttctgcatcacgtggggactgcgcctccctatgtcatgaagccagggaatatgtgtggccggccgcttggggtagcacttgttgctagagataccgcctggaggccactgatctgtaaaagggatctctacagaagatagggatttttgatcgccagagaagaagggatatgtgagatccaaacgccgaaggaggaaagcaggctccgtggtctcttccagccctgatggaagaaactaccgagccttattatactaggtgctttccacatgcctattcatttaatcctccagcaaccttgtaagaagggccatcccattttatatttaaacaaaccttaactactgacgcaaggagtcaaggatctaatcccaaagcctctgcctggttcgctgcagatggatgtccgcgaggacgccagccctccgcctcccgccgggtccctgaacgccggcccggccggtccaacctcattccgcttcccgccatcgaaacgcgaagcccccgccttcccccaaacgtctcagcgccgctggggcctttctggctgcgccgcctccgaccccaggccccggtccgcgcccgccgctcgctagtcctgggagtgaggagaacgcgtgctgaggacccggccagagggacagcggggaccgccctcccgctgcgtctctgaaagcgaggccgttcctcccgcgtccgacccccgcggggccgtccggttcggggcggcccaggctgcgggtccgcagggcgcttcgggccgagccggcgcggcgcgtgaagggcaggggacgccccgaaagaccgctggggtgggaccccaagctccaggggtctttggaaataagaatgcggcgtgacgttggctgtgcgggcgcggggctgacgcggaccctataacccatcgccgaaaccgggcggccgcgcccctattcctcggcatttctctctgtccgcggccctgctcagccaatcagcgagtgggctcctaggcaggtcctgagtgacagcgcggcgggctggatcaggagatgcgcgtgcgcggcccggcccggctgmtcgcttcgggtgctcgactcctgttgcgcatgctcagcgcgctgcccggctggggacccrcgcacctgcagcgcccgctgctcggccctgcatcctgcctgggcatcctgcgcccggccatgacggcgcactcattcgccctcccggtcatcatcttcaccacgttctggggcctcgtcggcatcgccgggccctggttcgtgccgaagggacccaaccgcgggtaaggaaagcgcgcaggccctgcagacctctccaccccggccccctggcccggctcgcccctccgccccggggcggcggcttcctgctctgcagcgagcgtccgcaggagggacgccaggaccccggacgccacctctgaggtctctctgcacctgggtctctgacagccgggaacaggcaggaggtggggcgagagggcatatccagaaggtaaagaggagagtgacattggagatgtctgtcacccctcctgcagccagtaaagggcacaagtgggcactgacgcagtttctccactccttgctagctgtgtgacctagagccaatatcaagtctcagtttcttcatgggtaaaatggagataatgtcgactcctgccttaaaaggctgctgtgaggatgacctgcggtaacgcatttaaaacacctaccagtgcgtgacactttgtaggtatgggataagtttagctggcgttatttttcgaaggtcctctagcagattgctgcgccattcaccagtttctgcttcatattatcttcagttacaaagcacccttcccttgactgcatgttcccaggggctggagtttgtccagttcaccattgtctactcagtgcccagccaggactggcacaacctgcttagtaatgttgaaaaagggatcgcgtgctcctgtgtccagcaccagcttgcagtgctttagatcaaagatcaagggcctcgtttggattagagttagctttgcccaaaggccgtttggacatgtgagtgctgcctttgttcttaaagacaggcagggtttgggatcccacagcttcactttgtaaaccattttcgtgtcttgcgtctcctgctattcttggtgagttcttgcttcagtttgactgaaatttcttttgctgcacttgaagcatctgtctctggtcttctctgagtacacgcaaagtggctagtccctgttctctttgtaacaactcactgggcctcagaactggctcacagtctgcctgcttcttgccctgtcttctagcctattgttttccttccccttgctccatgaattttgaattctacagaccactccctgttgggttgccacaaatgcagctctgtgcagtgcctttccacaacacgtctgcattaagatggagcaatattgggtggtagagaagggaaatgaagggaaggattcttaaggcaacttggatgtggtcaaggttggcctctctgtgaggtgacactttcagtttttattttctgccttgctattcttaccctgagtagaactcagcctcctgtgtccaggaggcatcaggaaggccaatggaaaagagctcacaccaggagctcttcttgctctggtcctggccaggccttgtgaggtgctggctgcatttgttctgacccgtgtcctcttctgctgcagagtgatcatcaccatgctggtcgccaccgccgtctgctgttacctcttgtaagtactactctccccagctcaaagtcagccagttcctttgtcctccctcctttcctcctcaccctagcctgctcttccttctgtcctggtagtaaatgcctcttsaaaggctgaacctataaaacaacaggagtggaggtggtgtggaatgggaaagagagcagtgggccagaagtcatgaaccctgggctctggatctggctctgcccccagagttctggcccccatgggctgtagttttctcacctgggcaaggaaggaggcaggccacctcagtgctgtctgtgcctgactgggtcacctggagtgattgttcaaacacagttttcaggctgcaccctacacccatgaaattacaactctcgagatctgcacttgggaattcctgttgttcatgaatgcccccaggtgactggaatgcagccatcttagaaccactaggtgagaggccagacgtggcggctcacgcctgtaatcccagcactttgggaggctgaggtgggtggatcacgaggtcaggagttcgagaccagtctggccaacatagtgaaactctgtctcgactaaaaatacaaaaattagccaggcctggtggcgcgtgcytgtagtcccagctactcaggaggctgaggcaggagaatcgcttgaacccgggagacggaggttgcggtgagccaagatcttaccactgcactccagcctgggcaacagagtgagamtccgactctaaaaaaagaaccactaggtgagagtaagtcatcaaacttgggataggtaccctggggatatagaagaacattccaagggacttgaatmcctggagagtgtgaggaaatcagtttgcagatcctcagtgtctattgtttagtctcttgctaaaactgccattcacaatagccaatccctctttattaaaaaaattttttaaaaggaaaaagaaaaagaccctgcccccgcatccatcccaaacctgcggttacattgctccatgtttagatgatcctggctgccaaccaagagataagttcaagttctagtttgttgggaggcctgtctcatggttaatcaagctgcattaaggctgttgggtttcccatcttcctatgtcttgtacattatttttatgggttaagcttggcatcgttgggtgttcttaattcagaataatcaaaacaggacaggtaaagtgatgagatgctcattctttaagaggtaacagattcttttgaaacaactggagtattttccagggttgccaaatttttcaaaatacataggacaaaacccactttcaaaaaatttacttcattgatttmagatttgatgttatcatagttaaaattgttttatctgattaggtcatggattctttattcctattaaccaattctcttaatttaccttatgttttattgattgattgattgaaatggggtcttgtcaagacccctggtcttgagaccaggccagtatggtctcaaactcctgggctcaaatgatccttctgcctcagcctccccaaggagctgggatgacaggtgcacaccaytgcacccggctgttaactaattagataattgacagggtcttactctgttgcccaggctagagtgcagtggtgggatcatagctcactgcagcctcaaccttctgggctcaagccatcctcccacctcagcctagctttgaccacaggcatgtgccaccatgcctggctgatttttaaattttctgtaggacagggtcttgccatgttgctaaggctgtgcttgaactccttggcttaagtgatccttccacctcagcctcctgagtagctaggattacaggtacacgccactgcacccagaaatgtataagccctcctactgacaaaaactaaacttgttagaaataatgatgactattaacacatggtttaacttaaacccactttttttttttttttcaaaattcttcctggacagagcattctctgaggtcctttctctaatgctatttctaggtccttcagggcttgagaaaagatcctcatctgcccatggcagggcctcagaggggcttgtgtttggtggctgggagggtgggggagacggggcctacacaagatgyggggtaatcccaaataccaactgaatcaacatacgggaaacagaaaacacactgcaaattggatgcatacaggtagaaaggtggggtcattctaagaaaatgttacgcctagaaattatatttacaaaacataaactcggagagaatgctgatgtaaaggaggtaacaatttmtgatggcttcctgggcgttaggtcctcctacctactgtgagggattcaaagagggaaaatrccgatccttcctgcagaaacagacaaagcmgtgtggatgtggtcgtggggggcccttccaggtcaggcactgacagagcgtggggacctactaactactgtggcaaatgaagttgggagctttgtcatgaatgatggggccagacagccacccacacgcccagcagtgatgacaggtggggcaggtccctgagggttttctggcctgaagaacagaggtggcctggcagcagcctgaacaggaggcccctgacccgtcagctcctcacgtcttggggtagttccttctctcataagaggaggtgattctgacgtgctgcccgmcaggcctgccctgttcgctccctggtgcatggagccgggggagcctggacagaggtgtgtgagggcacagctgggagtcgctcccaaagcgcccctgaggctgcctcccctcttctctaaccccaggttcagccccaactcggggatcctgcagatctaccgaacatcaaatgaaaccaaaaccaaacccagaagtgnnnnnnnnnnnnnnnnnnnnnnnnnnnnnnnnnnnnnnnnnnnnnnnnnnnnnnnnnnnnnnnnnnnnnnnnnnnnnnnnnnnnnnnnnnnnnnnnnnnnnnnnnnnnnnnnnnnnnnnnnnnnnnnnnnnnnnnnnnnnnnnnnnnnnnnnnnnnnnnnnnnnnnnnnnnnnnntcctgtgccaggctcaccatctttgctgtccctggcagctggctcatcgccatcctggcgcagctgaaccccctgttcgggccccagctgaagaatgagaccatctggtacgtgcgcttcctgtgggagtgacccgccgcccccgacccaggtaccgtgtgggcgaggggtgtgggtggggaagaggggaaagacaaggctgtggttagagttcttgttgggattcaggcatctatttatttcatgaaaagaaaaggtggggaggggactgaacatcaactcccttcctgcctggcctgtgttggccgccagggatgaaatgggaaccatgctcccagcacccccctcccccatcctcacagcgcttcaccccaaggcaagaccctaacctgggccctaacctggacggagggagggaaagggtaagctgaggactatctgggcaggggtgagggggctttccagggagggttgggggcagtggagtctccactgcaaggccgggacccttccatgtgatgtgcttttcaggtgcccagctctcggaatgactgtggctccactgtccctgacaaccccttcgtccggaccctcccccacacaactatgtctggtcaccagctccctcctgctggcacccagagacccggacccgcagggcctgcctggttcctggaagtcttcccagtcttcccagccagcccgggccctggggagccctgggcacagcagcggccgaggggatgtcctgctccaatacccgcactgctctggagtttgccctctttcccaaggagatgctgctggggagctggtatgggtggggtctttccctttacagacggggcagatgccaggactcagcccatcctgaggaggacacgtgtcctcatggagagggtgctccggcccaggcgggggagtcrgtgcccagtcagcagctctgccaccatcctgctgggaactgggggggcctctattgggttataggcaaggccttttctctggcatggaattgttaattttctgacacgtctagatgtgaaatttctgaaaatgttgaagcagagaaacattcacacacaaaaagcaacatagtcatgtgggtccagatggcctcagtcctagatgttggcaccctttgctgtgtctcctcagagtatcctgttccgcctcctgccacctggacctccctcagtggatgtcttccctcccccgaccccagcctgtcagtccgagcacagtgcaggtttggctctgacttgggcttttggctgcagtgggggtggatttcagagcctctcatggcagcatctaagtgaccagagctgggatgagagaggggaaggggcaatgtgagtggcgctatgggacgggccagccctgctcctgagccagccccgccctctgccccctggccctgggctctgtgctagggatggtgaagaatgggggcgtgccagcctggcaggagtgggaagcaacacgcaggggtcccggacctctccagccttgccctcacgcttatccgagctcccagtgtggttagcacagagctcacccaccttgcctggctcccagctggggcctgtcctcactggtgctccaggggaagaaacgacagcctcacttctgtatggactgctgatgtggcctgccatcctgttcagcgggcattgtctttggagcagcaggagamtaggatgcctctcactcacatgccagttcctggctggccagctgctcagggctcaggctggggcctcccattgacatcctccccctacactccctctctgagcctccgtcgcccctcctgttgggtaagggtgttgagtgtgacttgtgctgaaaacctggttcatatataataaataatggtgatgaaaagattactgtttggtgacaaagccctggcctctgcctgtgtgcaggtcccctgccccgcccacctgattcttgtttctccagtgggtgggtctggggaggggagcagggaaggattctgggagctgcagttatgaacacagatatccaggactactttttcctgagatctggaggaaaatccggccccctgctgactgcccggattcggcggagaaccaggcctggcaggaagaccgaggacttgttcaagtgcagctttgagcaccactcgtctgggccccagaggacacagtgcaggactcctgcagtgaagcaggtcgccagaggcttcaaagcctccttcatgaaatagcctagggctgggatctgccagcgtctcgctgcaggtccagtggggaagtgggcagagggagcccagccctccagcccagcctgtagcccagggcagagctgaaagaacttccctggagggacaggagggtggggcgggactggaagacgcacaatggaggcaccagagcactgagggcggaaagccagctgaggagcttggatggatcccaagggccatgggagccgtgaaagggatttaaagcagggccgtgacatggccaactggatttctagcattatctctacaagctgcacagtggacggcaggctggtttgacatctttattagggcccctggtggaagtggtgaggacagagaagcgaggggggagctgcttggctgtgacccatagagaccgaggctgcccgtggtggggagtgcagcaagggcaggtctgagagtggctgtgggagctgaggtgttcctttgtttcctggtgagtcgtgtgtgtccagggcaccccgtggaagtgtaggtagtggctggctgggcggggggggcggatggtcaggaggaagatgaggctgcaggaggcagagttggagccatcggcataaataaccggtgatccctgaggggtgcaggttgctcagggggttcagagtgagaaaaacccagaagagaaccccaaggagtgtgagttcacggggtgggtgggtgaaggtggcctgtggaggatgccgggaggttgcaggtagccagaagacaaccaggtgagtgtcactcaggaggatgagaggttcaacaggagagagtggttgaggtaacayagacccccattgtcctctacccccaagaagtcaaggtcagctggcatctttggtgatgggcagtaaagtcagactgcagtgggctgggagcgagtgggcaggtggggggtgagaaacacagtgacctcaggatggggaccccgtggacccagtgaagctggacctggaaagaccaaagggagctaaacaaggagggacctactgggcccattttcccatgtcgctgtgggtcagccctgggcctgggggaaccactctgccagttcctgccgctgcacctctgaagccacacccagcccgccacaggcccaccatgggggcttcaggttcaggatgctgaagatccacgttggcccaggattggggtggggggcatgtatccaaaatggctacttccttgtctcggcttctgctctttgggttcttgccttctgtgatattggattggtggcatctttagacactctcccgggatgtgtgtggctgtggctgaattctcactgagccccctgggtggcatcctctgggcctgggaggtggagtcctggagagctgctcgctgctctctgggcagcctctggactgctgagggctggtagctccttcccaggcagggtggcctttctcacgtcttccatccttccttcctgtgcagccattccggcagagaggagagggtcccagagctcatgtccactccactccctggcacgatctggtctcccaccctttggtgaggaccgtgttcctcccagaggctttccctccaggcccgaggtgggaacctgcagggtaagtaggtctgtcaaagataaactaagctggaccttagttaaatctacgaaaacagaccttattcattaaccactgacaggggagaagctgagctccattcagatctgtgcagggggactggacagtttaatgggagaacgtaggagtcgggaaagggcattccagggctcaggaatcatgggagtgaaaaattacaaagggctctctgtgttattgtggccgggccagctgtgtgtgccagctggcagtgatggaagttaggttctggcctcccccagagcctgggagacaggccccatccttcctgatgatgccatttcaaaggactggctctcaggctcttgagaaagacactcctggacacacatgcatgtacatctcaaagggacaagggaaggaggtacgactccaagtgtttttaacgtaaatgctctaagaaagtgagggggtggtcagaggcctgttgtcaggtgttggtaggaacaaacactaaatgattttgacggccttgagctttttcagacaggaactcaaagggtggccaggtggtcccagggatgccgctttgggctgccagaagccatgctagggttggtccagtctcttggtgcaggggtttggacacagtcactatgtacccaacttctgttagagttatcagtttcaaaccccacccgtgcccccaacaccatccccaatgtgggaggcacatcagtaaatatcagcctctgacacagatgctcacggacctacacgatgcaaaaaagctctaaaaatgggccgtgactgagagcagggcagccctgaaccataccaagtggcagagcaggaagtggccttggaggccacgctgagacagaggacaaagccactgagaaaaaaaagtaaaggtaaccaagaaaagttaagctgcacacaaagagtatggccaacagagggcagcgcctgcgtgcaggatgaagtctctagcgagccctcgtccaatctgcgcattgctgggggtggatggtgccgaggtcagagatggtggccctagagtcataggcttgagcagggagccacgataattctccagacagtaccacagcctggaggaaacgcccttcaggaatatttcatagtggcaatgaatgacgagcattgagccatcatgaggtgccaggcactgcttcggaaaccaaaggaccatgctgaagagctctgtcgttctccactctgatcccaggcttcccgaaccgtcttctggttctgtcttcccgaactgtttcgtacctcagcatccctgagagatctagcacattccattctgtaacagggacgccacaggtttttagtggagggagggagggaggtgctgctcctgctggccatagggtccacgctccctgcagaagccctcaaagagcagccctcagttaattttggctgctttgaacagaaataggatagttggtaattctggaacagtgaggagctggaggtgaagtgagaggcgtggctaatctccttatctgtgtgctggaagtgacctgctggtaaagctttgggcttccgggaatgaaatcagctggcaggcaccacagttttgcttgacttgtagcactggaagatgagggcagatgaccagagtcctgtgtggatttaggccacatactgggttagcaaatctaaatacgaatctctcattggggaaatgttggtcaaaagatagagaatttcagttagacaagaggaataagtccaagagacctagtgtgcagcccatggtgacaaagtgctcaacagtgtgttgtatgctggaaattgatgagagtagatttcacaaaatgaaaagtgaggtaatgcatttgttattagctcaatttagccatttcacaatgtatacacatttccaaacatggtatatacctacatgtatgcaatttttgtcaacttaaaaaaaaaaaaggaatcacttaagccaaacaaaacaacccatggaattctgggatggaagccatgtctattacaagagaacctccagggatgaaggaggctggggctttagccagctctccagctgcctctgccccaggcagacccacacagggccagagtttgggaatcatgcgccgggtgcagcctgcagtgctacttgtcaatgtggagtatggtctacctgtaacagaataatctggaatgcttgaaagtacaggttcctgggtctcacactgcaccctatgggtttaggggattctagactccacattttaaaccagctcccaagggttttggtgctaactgaagccctcgaagacaggatgtccaagccctgacactgttgacaatttgggctagataattctttgggtttttttgtgggggagggggagcacgggagggcactgttctttgcatcctatgatgcttagcagtaccgcctccctttacccaccagatgctagcagaacccctctccctgctcctggccatgacaactataaatgtctccagccattttgaaatgttccctagggaaacacccctaccattgaaaccactgccctagaacctcaacccctcaagggatttccaaacttagttatcaacccagaccctcgggaaaggagcctgggaggccctgaggggagccgagtgccttcagctggcttccccagcaggactggagcttctgaccaggagaccacaccccagcaagaagtaagcccccaagccgccagggacttccaggtatcagagcaggcactgatcccagcatgagctggtccctctgcgagctggtgcttcccaggaggccgggggcagggagctccggcactgccccgagcccagtggaactttgtgttctccccgcaggcggcttcctgagcagggtgggcggacacagttgggatggatgttctcacccctacaggacctccgccttggctccctaacctcaggattaagggccatgatagcagcaagggtcttcctccctcctgaaatgtcagcattttgtcctctgacaaagacctgggacacactggggtggtgacttcatcttcccattctgtgtcccacacagcaggagccccaggctctgaattcctgcggattctgcagcttcagtcagctgtgatgccaggtgcaaaggcctggcccttggccggcagcaattgattcagcaaacatatttctcttttttctctctacccagactcccagaagcagtttaactttacttagcagctcagctcagcttggaggttgagagtgcagagtctacaactggatcaaattccagctctgatgatgattagttgagtgaaagtgacttaatctttctgagcttcatttttattgatgaatcaggataatattagtagcacctgcctcatagaagttgtgcatatgaactcagataatggactaaagtgcttaactggtcgataaatgctattaatttcattatatttacatattaactatttaattccatgccacattttattctgccaggatctcagcttccttccccttttctgttcctgtcatggtcaccacactgatgcactttgcggaagagaaggtggcaagtgccctgtgtgcttttatatgtgagacaggacctgacaaataagtactatgaaaaatacctggggcctgcttatgtatctgcatttttgtgtttcctgtcgaatgtctttaatgtataaatgtagcatcttctcagtaaaaacacaaatgcttttggaggacggggggaggaagcagatactagaattggcatgctgtttctaaagccctctgggaaaaacaaacatgtaagaaataaccaagatattcctggaaaagcagagcattgagagggacactggcactccagatactaaaaagtctaagataaagataccatttgcaaggctacagaaatgcaaacagtggggctggcacatgaacacacagacgactcaaggggagaaaataagtccagaaataaatttacaatcaggaattaagaatatgataaacagccagacacagtttctcacacctgtaatcc

SEQ ID NO: 93296 - DNA, 34406 bp, Homo sapiens
agcctcagctctcttatcttctgtttccatatctgctgctaatttctcacctgctgccttagccttacttctctatttgcatgatttattcctgctacacattttttccatctctgttgcaatattttccgtgccccctgcttactttctttctttcttttttttgagatggagtctcactctgtggcccaggctggagtgcagtggtgcgatctcagctcactgcaacctctgtctcccgggttcaagcaattctcctgcctcagcctcccaagtagctgggattacaggcacccgctcccacacctggctaattttttttttttcttgagacggagtctggctctgttgcccaggctggagtgccgtggcatgatctcggctcactgcaacctctgcctcctgggttcacaccattctcctgcctcagcctcccgagtagctgggactacagcggcccgccaccacgcccggctacttttttttgtattttcagtagagacgaggtttcactgtgttagccaggatgatctccatttcccgaccttgtgatccgcccgcctcggcgtcccaaagtgctgggattacaggcgtgagccaccgcacccagcctcctgtttaattcctgtaactgctacccttctcccactcgctgcctcctttctctgcttataaccacatatgtcacatgtcctgtgtctatgcccccactgccctgtctggccactctgcaaatcatttcccctacctgctgccttgtttctgtacttgctgccacatttctcttaccaaccatctgcatctcccactgtcttttctttatgatgctaattccttccacgggatgcttcttttttgttttcagacagggtctcgctctgttgcccaggctggagtgcagtggtgtgaacatggttcactatagcctcaacctccctggctcagtcaatcctcccacctcacctcctacaggcgtgggccaccatgccaggctgattttttaattttttgtggagatggggtctcactatgttgcccaggctgatcgtgaactcctgcgttcaagcagttttcttgcttagcctcccaaagtgttgagattagaagtgtgagccacctaaagcaggcccttttttattttcagagacggggtcttgctctgtcctccagcctggaagggagtggtgcaattacggttcactgaagcttcgatctcccaggctcaagcaatccttccaccgcagcttcccacgtagctgggaccacaggcacaaggtatcacatcccggctaatttttaacttttttgtaaggacagggtttcaccatgttgcccaggctggtctcaaactcctggcctcagcctaccaaagtgctgggattacaggcgtgagctactgcacccagcctgtaatgattctcttactgttcatgctgccacttttcttccccatgatgccttgtttctgttcctttcatcacatatctgtcacctgcgacctctttcctctatccataggcccattttgtagtccacagcctccttccttccttccttgcttccttccttccttccttccctctctccctccttccctccctctctcctttttctttctttcttccatttttttttgtttgtttttgtttttgacagggtctcactccggtcacccaggctggagtgcagtggtgcaatcatggctcactgggctgggcgcggtggctcacgcctgtaatcctagctctttggggggccgaggcgggcggattgcctgagctcaggagtttgagaccagcctgggcaacatggtgaaaccctgtctctactaaaatacaaaaaattagccgggcgtggcagcatgtgcctgaggtcccagctacttgggaggccgaggcaggagaattgcttgaacgcgggaggcggaggttgcagtgagtcgagattgtaccactgcactccagactcagcgacagagtgagattctatctgaaaaaaaaaaaaaaaaaattatggctcactacagcctccacatcccatcctcccacctcagcctcctgagtaactgggatcacgagcacgcaccatcatgcctggctaattttttgtatttttagtagagacagagtttcgccatgttgcccaggtgggtcaggaactcctgggctcaagctatcctctcacctcggcctcccaaagtgctgggattccaggcatgagccaccgccctcggccacgccacacatttctaacatagcccatcctctgtccgtgccccagggctgcatttttctagccactgccgtgtttctaagacttgctgtctcacttctgcctctgccacatttctccagttggctgttttcctccctgagaccatggctttggttctgggcctgctgccacagcagtggagaagcagccccgctcctcgccgacctggctttttgctgcctggagcctcgctctgaggtccctccccctcccagctgttgtctgcccttttgctgggggggggggggggctattcttaggcccccagcacgtgggaagcagctgccctcaggaagcgactgggctgttctgggttcccttagggacacagtcggacctgaatggattccagaccccaccccaaaccagaggctgtgaatgagtaaaggaaccacagtgcctctccatccccagcctggacctgtctgtcccttagccctgccgcctgatggctttctccttggacaacagcgtgccgcctgatggctttctccttggacaacagcgtgtctctttccgtcttcaccctggggccctggaactccccctcctctctaatccctgatctgcccatctcagactctgtcctgtgggtctgtccactgacctctcctctcttccccgatattccatgcttctctctccttctaggactggctttctgaaacatctggtggcctctcttctgtccccagtctattactcttgcctgtggctccatccacccttctcccttggtctgcctgtccccctcactctccaagcttggctgttagtaacaataatgacgatgatcataacaatgacaatcaccgcccacacaatgtgctaccttcatgccaagaactctactaaccactttgtccttattaactgtttcctcctcccagcaccgctagaaggtagacgctattagcatgtccattagccaaggacacacaggcagcaagtggagggtgaacttgaacttcaagctccagaatcctgctccttcctgacctcaggcccacttctccccagctctgcctggctggctggcattcttttctgagacagagtctcgctccgtcgcccaggctggagtgcagtggcccaatcgcagctcactgcaacctccgcctcccgggttcaagcgattctcctgcctcagcctcccgagtagctgggattacaggcacccgccaccacacccagctaatttttgtatttttggtagagacggggtttcgccatgttgaccaggctgtctttcgatcttgctctctttctctctgggtctgaggaccttggcctcttggatctccgtctcagtctgtctcatacttgccatctgtctgtccattcgcccatgtctgggatccacccacccacttccaggccctgcatctgtctgggtgtcctatcacgcctccttcctgtgtccaagcctgcctcgctctctggctggggctgtccaccctgcaccctctccgtctgtggctcccaccccgatggcaggctgtccacccgcttctgccctgggctgggccaygtcccaccttgcagcccttgctgttcatggaatccagtgtcctcttcagggccggggtgggggcctccagcagttccacctgggtcctsacgccctgctccgtgtacggccccaccaggaagtagttgtcgccccattcgtcccctgtcaccttcgccttcgtctgcagcaccgtgtagatgccacccactgtgggcccaagcgtgtgagggcaggccccggccgaggtccatagttctggggcctggggtggggtgggcyggggatgtagggggcactcaggccccagacctctagctcagggggaagaggggactgggagcccatagtttggagtaggggttggaagcttggatgaggggaacacgagggctggagggcagtcctcctgggtctaagggagaagggggctggggtcaggaccctgaaggaggagggggctcaggctagacttctgggtctgagagagaaggggctgggtgccgggaccccttggtctgaaggaattaggcactggggctctaaggatggcagagctgaggactgactacccggactcaggttcccgagttcccagctcacaggagctgggtttaaatcgcagccaggctccaaaacccagtgagggagaccccctcatggccaatccagcttctcaccattgcccaagagaagcctgcatggtcattccctgcccccagggaccttgctgacctgcctcccaatttcctctccctgactagggacaccagcatgcagggctctgcctctcccatgaccctatcccagacccaggagccccagcccccagcctcctcccatcctggagcccaggccctggcgatacccggctgggtgttcacgggccccctctcctcctgggagacacagtccctttctcctccaagacccagcaaagcaaccccccagaccctgctctttgaggtgtgagattggcttgttcctggggatttcagccccagccttctccaaggccagaacctcagctttctgaagcccaagacacagaaatgcaggctcctagcccctcccatcctagggcccagcctctgactaacttaggacttcccagccttcccctattccagtacgcatgtgtcccaggccatgggctcctctactcctaggaactaatagctcaggccctcagctccttcaaagcccaggcattcattacagtctccagcccgtcccatctttattcttaagcagccagatcctcaggtcctcccaccgccgctcaggcctcctatctcccagtcagctctctctcaaatctggagttttatcccctagaccatgctgttagggtcataggtctgaaaccccggcagcttcccaggtttgcacgcagaaatcccatccccccatccccttccctgttcaggacccaggtatctagtctctcggaagcctgcctccaggacctaggagtctcattttagcgccctcttccctaggacccagaacccgggcttccagcctcctttcatcttaagtcaaacgaaccatccctctcccacccacctccggcttcccagcccctcctcaaggacacagcctccttgcccaggtcacaagggttcccctagtagccccgtcctcctacaactcagagttccgggcccccatccactactgtccttctcgtcaagggccccgacgcctggcgtgctcacccttgttagccacctcccaggccacttcgaagagcactgcgttctccaggtcgaattcatcctcccagtcctccagtcctggcagtgaggacatggacaaagtgcggtttaaaggcatggctggcgcaggaaggggkgctccggggatctccaggtagggaccccggaggtgtctagggaatgcaccaggtagggtgcggggccgagtagctggtgcccgacgggaagcttgcaagacgctcrgcttcctattgcaagaccgcacccctgccccgaagcgttgggacctaggcagaaggaggccgcagcgtcactgagcccactggcgcccctgcagtgaaacctcgcagccgccaggaggcggtggccgccccccccagccagcgccattggcccacgcccgggggcggggatttccgcgtgtccycattggtggaacgggttggagtcgctgtgtcccggccccgcctcggccgtgagacctccagggggcggagcttgccgctgcgctttacggaaacgagtggccttcagytctgtcaatctggagctggaggcctcaaagtggggaggaggaggagggtgggataaagaggaaaggagcgtggaggacgtgtggttactcaaagaacagctaagaattttgcaatcggcctgagcggggcggtggtggggctgagcaaaaggaggaggagccaggagacattgggaatggacccaggagttccggacgcccgtcttccagcgcagcctcggtgggagggcggggcmtaaagtcccgccacgcccccacaatatttacatatttatgaggaaccatcgagatctttgaagaaccagctagcctagaggagccagaacatctcgctccycgcgcgtttccgtttccgctaggactctggcrgttggtgagcatcatggcaaccgttgtaagtgtgggtgcatggagggtgaggagcgagctagcagtctcgagtttgagagaggaggatgctggaggccctgactcctgggtctgagggaggrgggatctgggggttcagactcctgggtctgaaagaggaggaagctcggccacccagatctgggggagaaggggacatgggggctggacttctggatctgaggcggggagggggctgggatcccagaatctcgggtctggccccatcatgctataggaactccaactttcaaaatcatcttggcgcaacggccggttccgcagtccttggcgccagtgtgtgatgaggagggttgtaggaccttgcgcttcgagccatttgggagccttggattgttagtggtgccaatggcacttgagttccaagctggaagcacaggcaggtacctgttcagtgtgtctgagagcgcgagggcgcctagtgagcctttagtgggaagaaattgtcgaggaacaagagagtcttagtggagaggactgaaggattagggacccagaaatcgggatcttgtcatgctaccgttttggccattttcatatttccagtatttcacacgggctacgtctcagtgtaaatgctcaataaattatcacttgaatatttgaatgaatgaatacatgtgaatgaaggagaggccaggaaacttggcctggcacctgctcaattacctgaataaagaagcgattttggcctggcgtggtggctcatgcctgtaatcccagcactttgggaggccgaggcgggcggatcacttcaggtcaggagttcgtggccaacattgcgaaaccccgtctctattaaaaatacaaaaattagccaggtgtggtggtgcaggcctgtaatcccagctactcagaaggctgaggcaggagaatcgcttgaacctgggaggcagaagttgcagtgagccaagatcgcgccactgcattccagcctgggcgacaaagcgagactctgtctccaaaaaaaaaaaggtaatgtgacctgaacttagggactgggctgggcttacaggtgcctcaatttccatgatgagcccagtcaagatggaggaagggagggggagaaagttgttggtagctggggatgagatttgagtctgttgctgtcaccagggcaaggaggaggaggaggtggatagggaagtagaagaggaaggctatgaccagaactaccgtggagaaagtattggaagtatgaggggacggtgtgtgctgagttttgaaatgaccttggttttcatgggaacagcgggcagcaaggttttggagagacttatgatgaaagagaaagtctttataggagacagtccttggtaaggggcctgtttatgttgagagagctacatttgggattcctggattcatgtcttttttgtggggtggggatgcctagtcttctgcttgtagtctgggggtaatgttctatgctcctgggttccagcttcctataggagacggtaggtgggaaggttcacacagtgacagggaaagcttgtgaccattgatggccagaaagtctaaacgattggctccagagggaggaggcttcctctgggctggataactgcatgtcctctctaggggaagaagagaagaaagacctgtgggctgggcacagtggctcacgcctgtaatcccacactttgggagtccgaggtagaaggattgcttgagcccaggaatttaagactagccctggcaacatagcgaaaccctgtctctacaaaaaaataagaaaattaggccgggtgcggtggctcacacctgtaatcccagcactttggggggtcgaggcgggcaggtcatgaggtcaggagtttgagagcagcctggctaatatggtgaaaccccgtctttattaaaaatacaaaaaaaattagccgggcgtggtggcacatgcctgtagtcccaactactctggaggctgaggcaggagaattgcttgaacccgggaggcgaaggttgcagtgagccgagatcgcgccactgcactccagcctgggtgacagagtaaggctgtgtctcaaaaaaaaaaaaaaaagaaaagaaaagagaagaaaattagccaagtgtggtgggacacacctgtagtcccaactacttgggagactaaggtgggaggattgcttgagcctgggaggtggaggccacagcagtccagcctgggggacaaaatgagatcttatctcaaaaaaaaaaacacaaacctgtgggaaggaaggagacctggggatgggtggcctcggttagcatgctagcttcttaggcttccttttccttattagaaattatgaactattccaaagtgtcagaaaataatgtaacagacatgcaaagatccaccatccaggattgtttttttgttttttctttttttcaagacagagtctcactctgtctcccaggctggagtgcagtggtgtgatcttggctccctgcagcctctgcctctctcccatgttcaaatgatcctcctgcctcagcctcctgagtagctgggactacaggtgcgcgtcaccacgcccagctaatttttgtatctgtgtgtgtgtgtgtgtgtgtgtgtgtgtgtgtgtgtgttagtgatagagtcttgctctgatgcccaggctggagtgcagtggcgcgatctctgctcgctacaacctccgcctcctgggttcaagcaattctcctgcctcagcctcccaagtacctgggattacaggcacctgccaccacgcctggctaattttttgtatttttagtgtagactgggtttcaccatgttggccaggctagtctcraactcctgacctcaagtgatccacctgccttgacctcccaaagtgctgggattacgggcgtgagccaccgtgcctgacctaatttttgtatttttagtagagacagggtttcaccatgttggccaggctggtctcgaacccctgacctcaagtgatttgcctgcttcagcctcccaaagtgctggtattacaggtgggagccactacgcccagcctgttgttttttttttttcttaatagctttattgagatagaattcacgtactacataattcacccatttaaagtatacagctcagtgttttctagtatattcacagacttgtgcagccatttccacagtcaattttagaacattgtcgtcaccccaaaaagaaaccccatgcctcttacctgtcaccgctaatccttccatacctcccatcttcagttctaggcagccactaatctttctctgtatatggatttgcctattgtggctacttcatatagatggaatcataccatatgtgtctttcgtgtgtggcttctttcagtcagtataatgttttcaaagttcatccacgttgtagcatgtatcagaactccattcctggccgggcgcggtggctcacgcctataaccccaacgctttggggtgccaaggcaggtggatcacctgaggtcaggagttcaagaccagcctggccaacatggtgaaaccccatctctactaaaaaatacaaaaaaatattagccaggtgtggtggcggacacctgtaatcccagctactcgggaggctgaggcagaagaatcacttgaacccaggaagcagaggttgtagtgagccaagattgcgccattgcactccagcctaggtgacagagtgagactatgtctcaaaaaaaaaaaaaaagaaaagaaaaaagaactccattcctttttatgactgaataatattcctttgcacaaatagaccctgttttattttgccattcatcagctgatggacatgtgggttgtttctatcttttggctgttgtgaatagtgctgccgtgaacactcgtgtccatgttttgtgtggacctctgggggggtcctgaattgtcccgggtggtgtttactcacctccctcccccatgtgagaaggggtggtagctggctcctctctgtggagaactgtcaacatgggaagmctcggtatattcttgttgaatgagctcagcactttagagtatcacttagcaaaccacagacattgagtcccgaggtgaacaagagagaacaggccgtgcccttcatgggactcatgtccactggagcagagaatattgatccatccatctccctcgggaatgtgagatcacacagggagatcgggctcccagggaggcctttcatctgtctgaatgtctagaggtcctagaactagcctggcagggctgttggacagaaagggcctcccctagggggcagcacttgatctaattcagtgagagggcagggagagcagtctggactcaggggccagcatgtgcaaggcctggtggttgagaactggggccgcctggtacaagggatgctgggaaattagcaggggccagagcatgtccagctccatgcctgctcctcattggtgtctgtccttatggagctcacagttattagaaatggggaggacttgtctgggcacggtggttcacacctgtaatcccagcactttgggaggccttggtgggcagatcacttgaggtcaggagttcgagaccagcctggccaaccccagtagagatgggcgaaaccccatctctattaaaaatacaaaaaaaattagccaagtgtggtggtgtgcgcctgtagtcccagctactcaggaggctgaggcgggagaatcggttaaacccaggaggcggaggttgcaatgagctgagatcgggccactgcactccaacctgggcgacagagcagactccgtctcaaaaaataagaaaaaaaaaaaagaaatggggaggacttagccgggcacagtggctcacgcccataatcccagcactctgggaggccaaggctggtgtatcacttgaggccaggagtttgagaccagcctggccaacatggcaaaaccccatctctactaaaaatacaaaaattagccgggtgtgttgatgcgcgcctgtaatcccagctagtcaggaggctgaggcagagaatttcttgaacccaggaggcggaggttgcagtgagccgagattgggccactgcactccagcctgggtgacagagcgagacttcatctcaaaaaaaaaaaaagaaacagggaggatttcattcattcaccaaataaccaaatatgtgctggaccctgaggaccaagctgtcgatgagacagacagtccttgtcttcctggggctcaaccaaccagccattaggcagtgacaggcaagaggggtgggggtgactggtgcctgtcccatcgcctgcctgtgaggggwaggagtggaaaggaccatctcatgggagggacagaggaggggttgrtgaaagctgggaccacactagtcctctgacacatcttcttgcacccccagacagccacaaccaaagtcccggagatccgtgatgtaacaaggattgagcgaatcggtgagtgagttgggtcaggaataggacctaagccctgcctgccatgtgccctgacagagcaaacctattgaggacccctaagatggagagggaggtggcctgcacaccaactgtgcccccactaccattcccccactcgccctatctaatgggggaggaggatcctcagttccagagttgggtcagatgatgcactggggaccaggctgctatcctggctatcctggtggggttcccgggtatgtttgcctggaagtcatagatatttactgggtgctttactgggtttggcctcgtatacccagtacacactgtggggtgagttccctgagggcagggacgaggtcgtgtcattcctagctgtgtccctagcacaggacctaacagagcagatgatcaagagataaccattgaatgcacgagtttgcgtcctgtggagccctcgcagtagccgcatgaggtgcatattgtaactgttagctgagggaactgattttcaggacagctaaatcactggccccggctcacacagagcaggaagttgagacgcagtgaggccagcagggtgcgctctcacaaagagctttaccggcagggaagtgaccgcattcattcatgcagcaggctcactgattcagggcatccgagaaaggcagtaagggcttctggctgtgaagatgggttttagaagcccagtgctggattcctggagcttagctctgccactttcccaccatgtggccagggactagttcctctctgtgcctcagtttccttatctgcaagacgaagctaagatagtttacctcatcagttaatgtaagattcagtaaggtagttcatataaagcattttgggtctgtgtgccaacactgtttcatctattaaaagtgctggggcactgggtgcagtggctcatgcctgtaattccagcactttggaaggccaaggtgggyggatcacctgaggtcaggaatttgagaccagcctggccaacatggtgaaacctcgtctctactaaaaatacaaaaatttgctgggcgtggtggcgcgtgcctgtaatcccagctactcgggaggctgaggcaggaaaattgcttgaacgaggaggtggaggttgcagtgagccaagatcatgccattgcactccagcctgggtgacaagagtgaaactctgtctctcaataaataaataaataaaagtgccgagactgggtgctgtagctcacgcctgtaatcccagcactttgggaggccgaggcgggtggatcacctgaagtcaggagtttgagaccagcttggccaacatggtgaaaccctgtctctactaaaaatacaaaaattagccaggcatggtggtgcatgcctatagtcccagctactagggaggatggcttgaacctgggaggcagaggttgcagtgagccaatatcgtgccactgcactccagcttgggtgacagagtgactccatctcaaaaacaaacaaaaagtgccaagtatggccgggcatgatgggtcacgcctgtaatcctagcactttgagaggtggagtcaggaggattgcttgaatcaggagttcaagaccagcctgagtcacatagtgtgatcctgtctctaaaaaaaaaatmaaaaaattagccggcagtggtggtccatgcctgagtcccagctacttgggagaactgcttgaaccaaggaggttcaggatgtggtgagatgtgactgcaccatgcactccagcctgggtgacagagtgagacgctctctcaaaaaataaaaataaaaacatttttttttttttttggagacggagtctcgctctgtcgcccaggctggagtgcagtggcgcaatctcggctcactgcaagctctgcctcccgggttcacgccattctcctgcctcagcctcccgagtagctgggactacaggcgcccgccaccatgcccggctaatttttttgcgtttttagtagagatggagtttccccgtgttagccaggatggtctcgatctcctgacctcgtgatccgcccgcctcggcctcccaaagtgctggaattacaggcatgagccaccgcgcctggccaaaaaacaataaaaaattaaaaaaaaaaaaaaaggatgaagagccaagcaccgcttgtgagctgaggacccagtagagactagctgcacccaggagcctcccttggggtgctcacagtcaagcactggggtcagcaaatctttccttattttattttatttttttttttgagacggagtctcattctgtcccccaggctggagtgcagtggcgcaatcttggctcactgcaagctccacctcccgggttcacaccattctcctgtcagccttccgagtagctgggactacaggcgcctgacaccacggccgtctaattttttatatttttagtagagacgtggtttcactgtgttagccaggatggtgtctatctcctgacctcgtgatccgcctgcctcggcctcccaaaatgctgggattacaggcgtgagccaccacgcctggaccctagcaaatctttcttaaagggtcagatggtaaatccttcctctgttgaaactactcaactctcctcttgcagtgcgaaggcagccacagacagtatataaatggcagtgttccaatacaaagattttttggttggttttttgttgttttttttttgagatggagtctcactgtgttgcccaggctggagtgcagtggggcgatctcagttcactgcaacctccacctccctggtttaagtgactctcatgcctcagcctcccgagtatctgagactacaggtgcatgccaccacgccaggctaatttttgtattttttagtagagacggggtttcaccatgttggccaggctagtctcgaactcctgacctcaggtgatctgcttgcctctgcctcccgaagtgctgggattataagcgtgagccaccgtacccagctccaataaaattttatttgcaaaaacaggtggctggcctccaggctgaggtttgctcaaccctcatctaatgtaaagcatgggaatcccatcttcccctctcgctggctgtgtggctggggcatgggacctaacctctctgagctccctccccattcatatcaataggttctgggactgttgccattttgatactcagaagtgctttcagggtgatagcagccagggctcttgtttcattttattttgttttactgagacaggtcttgctctgtcatccaggctagaatgcagtggcacaatcttggctcactgcaacctccgcctcccaggttcaagcaattctcctgcctcagcctcctgagaagctgggattacagtcatctgccaccatgcccagctaatttttgtatttttagtagagacagggtttcaccatgttggccaggctggtctcgaactcctgacctccagtgatccgcccgcctcggcctcccaaagtgctgggattataggcaggagccactgcgcccggccccagccagggctctttttttgcaggatcatatggaataaactgagaacatgtgggtgctgtgtaaaccataaacatgaagtaattgtgatcmttagcccttgtggttagatcttagtacaattatgtgcttaatcaggcctcagtgacttttgtttaactaggatgcatcctcagagcagctccagttmattgagcatttaccacattcagccatcttcctagggaggtgccaatttgggatatccttyccatgtgccccttcattcccccaacccctgctccctactcccacccacccctttgacaaagaaggaaaccagggctcagaggggtcaggccacatgtgcagcaagctggctagtaactgagtctttgttctttcccttcatgtaggtgcccactcccacatccggggactggggctggacgatgccttggagcctcggcaggtagagcagaggaggctggggtgtgagggcctctccatgaaggtcttgggtagtgggtacccagggtcctggggagtgtggggactatgttacggtcttctggacctttggctacatacccataaacttcaaccacatgtgggttttcttggtactaaagaattgattaggctaggtgtggtggctcatgcctgtaatctcagcactttgggaggccaaggtgggtggatcacctgaagtcagagtcaagaccagcctgaccaacatggtgaaaccctgtctctactaaaaatacaaaaattagccgggcatggtggtgcatgcctgtaattccagctactcaagagcctaaggcaggagaattgcttgaacctgggaggtggagkttgcaatgagccgagattgtgccactgccctccagcctgggtgacatctcggaaaaaaaaaaaaagaattgggagtgggtagcaattgctttgccaccttaaaaaaaagttagactgggtgcaatggctcacacttgtaatcccaatactttgggaggctgagatgggaagattgcttgagcctaagagcttgaggccagcctgggtaacatagtgacacctcctttctacaaaaaattttaaaaattagctggacatggtggtgcacatttgtggtcccagctactcaagaggctgaggtggaaggatctcttgatccctagaggtcaaggctacagtgagccatgattgtaccactgtacttcagcctgggtgacagagcgagatcttgtctcaaaaaaaaaaaaaaaaaaaaaaaaagcagggaaagcttttttggcttttcctagaagtcccagctagtaatgtctgcttccatctcactagcttcctgatgtggtagaaatgccatggtagccccacaggaaatcacctcatgtgygcctcccacccacaggcttcgcarggcatggtgggtcagctggcggcacggcgggcggcyggcgtggtgctggagatgatccgggaagggaagattgccggtcgggcagtccttattgctggccagccgggcacggggaagacggccatcgccatgggtaagaaacctcccagggcaggaactctcctgtttcctgctaaataactcctcctgtgtaagtcagggtcaggatgagccgcctttaacagatgacccaaaatggcagtggcttaaacactcaggattcattcttgcccatggaagaatctagaggtaggccatttggggcttattaagcagttccaggaagtcttccatcttcctgcctcaccatcctctgcacttggttccagtcaagaggacgccatgttccaagagggctgccagagctccagccttcccactcataacccaggcagcaggaagaaaggagttgccatgaggatgaaccccctcgagttggcttcctttaaacagtcattggaaatcctccatgcttctgcttatatctcattatctcattgactagaatgtaatcatatgatcacactctgcttcaggggaggctggcacattaaatgttttttaaaatttcataatttggaccatttttgccttaagaaaatgaggattcttctgttgggcaaaaggttgttgtaaaaataaaaaattaaaaaaaaaaaaacaggaaagaaaatgagggttctagaactaaggaagaaggggaaggtgggtattgaggagtcacccagcagtctttgttgcagtccgctagtggtttatgatcttttcactcccagctgttcctcttcttccttgttgaactcctatttatccttcaaaaccctacttcagcatctctgccccattgaagcttttcctaacccactgctcttcccactcactcccacctctgtgctgaggctggggccaggcagggagaatcagagtaacagccaggtcttcagtgaagataaagcagtgcctgttggggtgctcggactggacactggggacccatagatgagttagaccaaggcctgacttcaaagagctcctggtctggaggaggtggtcatggacacgatcccttccaaggcgacatgtgttacaatgcaggtagcatgtgacagaggaggctcctgaccttggtaggaaaacggggcatgtggtggcatttgttgctagaggcttccagagaagcggatacctgagctaagcctagtaggatggccaggaggctcctgggcggacactggggacagcatgtccaggcccagaatgtggcacacacagtaacttccttccctccatcctttctgctttcctactcttcttcatttttttttttttttgagacagtttcactctgtcgctcaggctggagtgcagtggtgtgatcttcgctcactgcaacctctgcctcctgggttcaagtgatcctcctgcctcaacctcccaagtagctgggattacagatgtgtgccaccacacccaactgatttttgtatttttagtagaaatgggatttcaccatgttgaccaggctggtcccgaactcctgacctcaggtgatccaccccsctgcctcggcctcccaaagtgctgggattacaggcgggagcctgtagactttattttttaggcatgttgtgactgtgcccggcctcgcctttcctcttcttgtgtctcccgcaggcctcctgcaggccaaaccctgtgctgggcagcactggggtgaggctagcctcgccctggcggggacgcttcttagtctagtgaaagaggcagagaggacccctggtgtccccagatggcatgggccgtgctcgtccactcagccctcagcagatacttgctgagttctgtgatgagggccattgtgtatccgcaaagaggactaagaacaggtcccacttgacactgggcaggagggtgtggtgtcagcctgtctgaaagggcgtgccccacattggaccaaaccttgtggccagggaactggaaggaaaggtctggcgttcagagctattgctggagacagacctgcttcctgccagccaccccaggccaccggcggtagagcgtcctgccctgtgccagtttcaggctgcgcaaccgtgttactgctgagcaccagtgcctgcctgcctgcctgcccatagtcactcctaagcagggtgtcatcccatgctggcacgtgttctgttatcatccccattagacagagggggagactgagkctcagggagcagttcagatcgctcaagatcccacggcgccacctgcacttaagtggtggatctgggatgggagccgaggcagtctgccttcatcacttgtagctatcgtgtgggctccttggccttcgtccctggtccccttcgtccagctctgaggctaaacagctcgtagaggctgggagactgaggtgtggcgaggttctagggtgtaccctctgggcaatgtgggattctaagccaggcctgccggagcaacctgccctgcctggcttctcactcactgtctgcctcrtggctgaaccccgctctccagttccccctccccagcgctctgctcagctcggagccaagtccttacatgtaggatggcactgaaccctctttcctggggtgggagaaaagctagtttgccacagagcaggtgtcggggacctggtgccagagcggcttcacctacacagactgcctccttcccaggcatggcgcaggccctgggccctgacacgccattcacagccatcgccggcagtgaaatcttctccctggagatgagcaagaccgaggcgctgacgcaggccttccggcggtccatcggcgttcgcatcaagtaagcgggggacccgaggcgggtgycagaccccagagcctgggagcaaccccrcaccccgggcggctcgtcctttgtcccagagctcatggaaggttgtgattcccragggtccaggtgtcaggctgtctcctcagatctgctctctggctagggaggagacggagatcatcgaaggggaggtggtggagatccagattgatcgaccagcaacagggacggtgagtctgtgtgagtctgtaccctgctgaggccacctccagcgccagggttggagagagtagatatcaggtctgcactgaggtcagaatcccatggaatgttctagctgcagactagagccatgtacatgcctacagtaggaggtcagttaacttgacaatggcttatccccttatgaaggacattatgggcaatagaaactgaggcggtaaaataatgagagagatctgttagtgagttcccaacagacctcaaaacccaacagacttcaaaactcgttccgtggccgaaaggcatgtcctgtccatcttacatgatacaggtgatttgctctctcttttttttttgttttcgagacagagtctccctctgtcccccagactggaatgcagtggtgcaatctcggctcactgcaacctctgcctcccaggttcaagtgattcttctgcctcagccttccgagtagctgagattacaggtgtgtgcatgccaccacgcccggctaatttttgtactttcagtagagacggggtttcaccatgttggccaggctggtcttgaactcctgacctcgtgatctgcccaccttggcctcccaaagtgctgggattacagccgtgagccaccatacctggcctctttttttttttttttttttttttttacaatttctgttttctcctttttgcatagctgtgttttctgattttgtgatcaacaaaaacactttttatttgggtataaaataggaatgtcaaagtgtgacatttggcaattttgcgagacctcgggcctatgttgtttttgatagactttattttttaggcatgttgtttgtttactatttttattttttatttttattttattttattataattttttttttgagatggagtcttgctctgttgcccaggctggagtgcagtggcacaatctcagctcacggcaagctctgcctcccgggttcatgccattctcctgcctcagcctcccgagtagctgggactacaggcacctgccaccacgcccggctaattttttgtatttttagtagagacggggtttcactgtggtctcgatctcctgaccttgtgatctgcccgcctcggcctcccaaagtgctgggattacaggtgtgagccactgcaccctgcctgtttactatttttattaagagctttattgagttttggccaggcgcagtggctcacacctgtaatcccagcactttgggaggctgaggtgggcgatcacttgagatcaggagttcgaaacgagcctgactaacatggtgaaaccctgtctatactaaaaatacaaaatggctgggcgcggtggttcatgcctataatcccagcactttgggaggccgaggcgggtggatcacctgaagtcaggagttcaagaccagcctgaccaacatggtgaaaccctgtmtctactaaaaatacaaaaaattagctgggcgtggtggtgggtgcttgtaatcccagctacttgggaggctaaggcaggagaatcgcttgaatctgggaggcagaagttgcagtaagccgagatcacaccattgcactccagcctgggcaacaagagcgaaactccatctcaaaaataaataaataataaaaacacaaaacaattagctgggtatggtggcacacatctgtaatcccagctacttgggaggctgaggcaggagaactacttgaacccgggagatggaggttggagtgagctgagatcacaccactgcactccagcctgggcgacagagcaagactctatctcaaaaaaaaaaaaaaaaaaaaaaaaaaaaaaaaaaaagagctttattcaccaggcgcagtagctcactcctgtaatcccagcactttgggaggccgaggtgggcagatcacaaggtcaggagatcgagaccatcctggctatcacagtgaaaccccatctctactaaaaatacaaaaattagccatgcgtggtggcgggcgcctgtagtcccagctactcgggaggctgaggcaggagaatggcgtgaacccgggaggcagagcttgcagtgagccgagatcatgctactacactccagcgtgggcgacagagcaagactccgtctcaaaaaaaaaaagaactttattgagttttaattgacatacagaaagctgtacacattgcaagtgtccagtatggtccgttgggacatacatgttcagccgcggagccatcaccgcgtcaggctggtgagcgcaccgtatgtcttccctggagagcttccttgtgttgtgcccattttgaagctgtggaagcagaggccagagcagagccagaagcttatcaacactgggggcactggggcaacatcagggccctctctgagccccatccctggcttgtcyccactctcagggctccaaggtgggcaaactgaccctcaagaccacagagatggagaccatctacgacctgggcaccaagatgattgagtccctgaccaaggacaaggtccaggccgggtgagcagtcaggggccatgccaggcagccagggggatgggcgagcttgggcccattcctttccttaccctaccccccatccccctgtagggacgtgatcaccatcgacaaggcgacgggcaagatctccaagytgggccgctccttcacacgcgcccgcgactacgacgctatgggctcccaggtgcggccgggactcccgggatcccstcgcccccagcactggggtgttttcatctcctccatcacccccttgacccatggggtctggatcttcctgttaccctgactgtttgtcctggtactcctgggtcttccctgtaaccctaggacagcagggcccctcagcctggcactatagcttcgcatggccacatgtggcctgtggcttctraggtcctccgggagcccccgtgaccctcagcgctctggaatgtccctagtcctgactacctcctgggcctggggtttccagatgaccccatttagcctcccagctccatttcctggagctccagtctcccccagacagagggctttaggggcccccttcatgcccttccctgccctgtctccrccgttcttcccccacccccgccccatagaccaagttcgtgcagtgcccagatggggagctccagaaacgcaaggaggtggtgcacaccgtgtccctgcacgagatcgacgtcatcaactctcgcacccagggcttcctggcgctcttctcaggtgaggcccctcctgccctgccctgccctgccctgccccaggcctagcagcctccctcgggctccctctgttcctgagctccgagtgtggcccacctgctccacgctgtttcctgtaactccggcccgtggctgcctctsttctccamctgcaagtcygctccgtccccacccctgctggtgctgtgatgggtgtggccctgccctctcccctcctgtgttctctgcctctgttcctcctctttggggatgtttcaggctcctcatccctccttgctttgctccccttcctccatccctggcatcatccttctctgtcttagccacactctggccctggaacccgcctcctctctggcttccctgatgcaacctgtgcctcccataggtgacacaggggagatcaagtcagaagtccgtgagcagatcaatgccaaggtggctgagtggcgcgaggagggcaaggcggagatcatccctggagtgaggacccaggacatggccggggcgggtggtggggtggaggtgggccggggaagtggggacgcgggtggtgactctcacacacaccccaatccaaggtgctgttcatcgacgaggtccacatgctggacatcgagagcttctccttcctcaaccgggccctggagagtgacatggcgcctgtcctgatcatggccaccaaccgtggcatcacgcggtgagccggctacaggggcctctggggaaaacaggatgctctgggcagtgggtgtggtcagagggtcaatgggagcctgtgttgacaccgggtcagggagggacgcgtgactgcagtgtgcgctctttgcttacaaaaggcgggtgggaggcagctctgcttcccgaggaagcccagagactgtgttcttgctgcctttctgtcttgctgctcctttagcccccaaggctgcagtyttcaaactgcrtgccgaggcaccccagggtgctgcaggaaactcacaggagtgctgtgggatgttttctagtcttgagggaagcacagtgacatctgttagacataacataaactacgattgttcagtcacttcgacccagcaactccattaayagaactcttagcgttgtgtttggcctaaggatgccagggacagattcccatgacacagagggtaccgtgctctgctgaagcctgggaacctcrtctcccaggtgttgccagcaccctgtgtagctgggattacgggcacctgccaccatgcccgctggctgtcttctccacctcgccacattttggcccgcaggaagcaggggggtgtggagggcaggcagcccccataggctgtgatccacaggctgcaccccaaccttgcacccccattccattgcccggcactgcttgggctcagtgctgtacctggtggcaaagaaggctgggtactgtcagctccagccctgcagccttgggcccagctgaaactgggcggttgggatgggcatcacaaaagggaagaagcgggcaccctacagaggatgctgggccgctgggcctggctctgtgtttggctcttttaactccttggatccgcagaagaagctcagaaggtagatatcacctcagccccattttatagggcaggacagtgaggcccagtgacttgcccaggtcacaagtctagaaggtagcagggcygtaatttggtctctggatggctggacactggaagagacccccagggctgatggtgttttcacagaaactgcaggtcagggcctggggactgcccaggggcacctcctgtgggaggcagcagctacgggcagccctgattgttcgtagactctgtatctgagaatctcgcttgctaagatttatttgtaatccccaaataaatatctgccctgctttcggcaacaaattcaagtcacctgacacccactttcccagctgagtgtgaacgaggcaacactgcctgctcccttagcgctcatgctgtaaataagtgtccttgttgtattctatttagtgctacgtttgtcacttttgttctttgagacagggtcttgctctgtcgcccaggctggagtgcagaggcacgatcatggcacactgcagcctcagtgcccaccacacacacacacacacacacacacacacacacacacacacaccacccctgggactcaatcagtcctctggcctcagcctcctcatcagctgggaccacgggcatgcaccactatgcctagctaatttctgtttttgttttgagacggagtctagctctgtcaccaggctggagtgcagtggcacgatctcggctcactgcaacctctgccttctgggttcaagcagttttcctgcctcagcctcctgagtagctgggattatgggcacccgccaccatgcccagctaattttggtatttttagtagagacagggtttcaccatattggccaggctggtctcgaactcctgacctcgtgatctgcccacctcagcctcccaaagtgttgagattacaggggtgagtcaccgcgtccggcctaattttttttttttttttgtagagatggtgttttgccatgttgcccaggctggtctcaaactcctgggctcaagcaatccacccgcctcagcctcccaaagtgttgtcactttttttgtgccttttttttttaaactttttggggccatttgttggtgatattgccatttaaagtgtcccctgtgcacagtgttgaagtgctgtctagtatcctaagtgcaaggaggctgtgaagcctgacggagaaaatgccatgttacagacgcttcgctgagcccaagttagaatgctgttgacacgagctccatgttagagaataaacagtgatgttacataacaaacacatggaaatagaaacacacatacatgaggccaggcgcggtagctcacacctgtaatcccagcactttgggaggccgaggtgggtggatcacgaggtcaagagaatgagaccgtcccggccaacatggtgaaaccctgtctgtattaaaaatagaaaaaactagctgggcgtgatggcgtgcgcctgtagacccagctacttgggaggctgaggcaggaggatcggttgaacccgggaggcggaggttgcagtgagccgagatcgcgccactgcactccagcctcgcaacagagcgagactccgtctcaaaaaacaaaccaaaaagaccagaaacacacaaatgaaaatacgcatagacccagattatatatatatggattgatgaaaatactgtaagccgaggctcgagagagcctaaccctgtattccagtaggagcagtggctcaggatcagctaattggagtgttcacgatgactttctagaacctcactactgtgaataaggggaactgactgtatcccctggcaccagccctgggctggccccgctgcagcagggaacaagacaggtgcagtcccctcctttgtgaagctttgtgtcgagcacgggagtgggaccttgatccagtaatcctggaggcagagatctagcttaaagcagcccagctccgcggaaaggtgcccttgggggactgacgcagctgtggaaggctgcgtcatcaggggtgatgtcatcatgtgacaggagacgcgagctaaaggttaagtggtgttgggcccagtgagtgggtggcgatgggaggtgagagtgttcccagcaaagggaatgaagagggaacatgcccctgacagccccctctttctgcctcttcctcagaatccggggcaccagctaccagagccctcacggcatccccatagacctgctggaccggctgcttatcgtctccaccaccccctacagcgagaaagacacgaagcagatcctccgcatccggtgcgggcaggaccaggccgtgcgcctgagacgcagggctggggtctaccctgtttgacaaatgctgacactgaggtccagcggagtggcatggtggctgggcctacaggagagagggctgagcgggcacccagacrgtggcctccgatccgggagcaggagccacggtgggaaagggaggcgaggtacccgtgactggtgttggggccagcgccctgggggtggtcaggaggcctcggttttaggtccagcccagcccctgtctccgtggctcttctagcctcagcattctatggttctaagatgcaggcgccacatattcccagtggggaagggccagagggttgctgtggccacttctgctgcagtcagaggctgggccccggctgagccacccctgtcccccactgcttgcaggtgcgaggaagaagatgtggagatgagtgaggacgcctacacggtgctgacccgcatcgggctggagacgtcactgcgctacgccatccagctcatcacagctgccagcttggtgtgccggaaacgcaaggtcagccggccgaattagccagcagggccagatggcggcagtgagtgacacagtacttcaggggcttccagggttcygatttcatcctagaatgtacgttttcagacgcagggaattttcatccctcaggttggcttctgtatcatccagcctggcctatagtaggtrtcagtaaatctctcttgacttaagtagatgctgttaggtccaccttacagataaagaaactgaggaatgaagaggctgggcccacaacaaggagatggccaggcaggatttgaacccaggcaatctggcccagaatgccctcccctcacatgccacactctgctgcctagagcatggaggtggcatacgctggggtctgtgccttgagcctcacggagaggggcccaactgaggactcgccctccccctccagggtacagaagtgcaggtggatgacatcaagcgggtctactcactcttcctggacgagtcccgctccacgcagtacatgaaggagtaccaggacgccttcctcttcaacgaactcagtaagaatccccaccccgcacctgcactgccagagccaacctcagagggaggaagagggagctcggcgtagaaggctcaggccctgccacctgggcgacactgaccatgtggccytccttctccccacagaaggcgagaccatggacacctcctgagttggatgtcatcccccgaccccaccctgttttccaccagagttctgacactgtgactctgtataaaatggttgggaagctgcacccaccctgtgtatgtgtggttgccctgagcccacagaaagacacckccagagtgcrgattgagaagcctttattgtgggaggatcggggtgtcagggctccaggagtcgggatggacttggaaggctgcggggagggtctttagaggaagaggaggcctgagagttgggggtggtcacaggtcaaggggtggtctttgggacccccacagtcagaggtgctgcggcggcagggtccacagcgacagctgagagccacagggaaggagaccacggggtccacgccacgcgggcagccagggagccggatggactcgaagcgcacatcacggtaggtgcacaccacctgaggcaggggcggcaggaccgcctgcagcacgcgcatctggaggccgtgtgagtgggggaatgagcatgtgcctgaggccagcgcctcagctgagctcccaagctgaccccacaggtcctggactcaggagcccaggaagccctctgttcctgccttcccacaccccattccccaaccgcaggccagagaggcagaccacccttcctcccccgctgcctctgtgggtctggccctgaggtggcagcatctgcccctggccccgggcagctcaccatggtggggcagtagccggcacagatggtggtgttgacggtgatgcacacggggcagccctccttctcgacagccaggatggcattgatggggtggcaccatggccgaagcggctccctggatgcccatgccccgcccatgctcagcagcagcaacagcagcagcccctgggacaaggacactgcttcacccaggtctgagaccgcagccccgagtcctggccttcccatcccgcgtggtacaccacccacaaagacccagagacccttcctggcatctcctattcaggacccaccacccggacacctgcctttcagagcccaccccacagcccagaggacctgagatgccccaacatttcagatccccaccctcaggaactgccccacctgaagcttactgggggtcatgcccctccagaaagaggcctccttccacagctcacacgggtctgccccttctcatgccagtgatggcctggaaggaggtggaaggtgcccaggggccctgtagtcttacctggagcatctccatccttggtgcatcccctgcctcgtgtatctggctatatacctcggggttgtgggggcggcaaggccaccaggaggtgataggatgctggggtaacctggacactaatccccccgggggcgagaggtgcacatggccagggaggcgcaggagtggctcagcagagtgccccagccctctcccctcagtggtctagcgccagaggtgaggcagagaccacggtgaagtgacctcagagactcagttgtcgagtgctagggactagtcgagcctggaagcacagggagtagggtgtaggaaggcctgcctctgccaattgtggggtcttgggagccaggaggaggccatgacccgagaaaggtgctggactgaagcctcaaccctccacttgaggctttcctgcaccacagtccaacctaacaggaggggcgctgcttcggacttagcttctgcccagtgagagagggtctccccgtgactgtgctgccagggaagccacttgacccagatgcccccaaggagggattaagcccgagccccacctctcccttagggacctccgcccaccctaccctcaagccaggatgcccggagcgtccccggaagtgggtgtggttcaggtgatttaactcattatttaatacgcccgcagggtgcgtgtcttgcccccggggccacagcctgcaaggacattatctggacttagtcccctctccgtgatgccgcagctgagtgggtgtctgggctagtcccgcccccacgttgccaatagacgtaatgagtgcgactcaggctgggtccggaacccttcctagtgagcggaggtcccgagctccgctcggcagcgcggccctgggggcgggtctggggtggggctggccctgacggctcacaccagcgccggcttcaagctgccatagctggagttctcggtactgtaggctttcggcacgctgtagatgccccgcaggggcttccagtgcgggccgccccagggcgcctccagcgggcagaagcggtcgagccgccggagcgggtgcagcagggggctgtaggactcctgagccagagacagggctccccggtgcggcatggccgaggtcaccgggctgacgcgcggcacgcggacccgcggtggtcggggcggccgggaggagcgcggacagggcggccgctgcgggccgtggctccagacctggggcgtctcttcgaagctccagtaggtcagggagtccttgcgggggtatccggacagctccgtcctgtgggagcagggcgggatggtgaggatacagctggatccttggggacgagtttcagacctcgggatctaaggagtctgcacattcaaactcctgcatttccaggcgagcaccccttaggaaggacgcgacccggcacgcgttgcctgcgttcctgggtcctcgaggtacttaacgtcctggaaactgagctttcgcatcctagggaagtaaaaggggactttcgcttccttgggaaggagtatctgggggctcaagtaccgaaggaggccctgccctcagatccggaatcccctcgagccgctgtgcaggcttcctgtccctaccgcggttcctgagaggtgacactaaggactcctgggtgcttaaaaaaaaaagggaggggctgaggcctgaactttggttcttgctgctacagaagtcgaggctgagaccaccggctcagggaatgggagccagcccaggggctcggcgtgcaccggccacggcgggggctgtgcaggaggcggtgccgagcgagagcccggcttacttgggatagaaccgaaagtcccgcgccgaggtggtcagatagagctggcggcggtccaggacgccccggtcggatactgtgaaaggccggccagacagctcggggttcttcgtccaggcaattagagcctgagcaagattgggggaggaggcatacccaagacatagatttcataccccatcccaagccctgggtcccgagttcagaatccctctccttcggcctcgacagccatgacggccacggccctcacaccccgccccagggttagagcccttcctgccacccacgccagggaacttcagcttcctttctcatacccgaacccttcccagcctcacctccctaaatccaagcaccttctgctgttcaaggaactcaaacccaagcccccagccaccaaaaacaacctccctggttccgctctgtcttaaaccgtcttggtgtggccactggagctgagctgcatcttgggcagcaactccaagttacctctcccaactcccacctgaccccgtctcagaatattctagtctcctccccacccacagcccgccgtctagctccgcagcagcttaggagccctgaaggtgagtttgtagtccctggtccttctggcctggcctaatgcccagcccctcccccggctcctctaacctcgcgatcccgccccagaccctttagccacgccccaaagccgtgattccttctggccccgccccaggctcccggagctccgccccgtctcgccggcgccggcttccacccagacacctgggaaggacccccgcggtggtggtctgcgagttgtgggggctggggcccgaagtattccggggcgcgcgggtccccgctgggagagccagtgtactgcgccctcgtctcgctgctctggtactttgtggtcagtgggaggcgccagccgcggtgtctgagctgcggaaaggcgacccagagactcacgtgaaggagcaggggactcaaatgcagtcccccgccctgtcccctgcggactccggcactccccaaactttaccttttctcctaaatccttgatccccacagtccgcgtggggtctgcaggctctggggctctgggctgggcgcagggcccgccatgggtcttgggcacgtaggccgagccagaggttgtctcccatctgctgaggacctcgtcgaaagcccagttgtgagaatcctgctttgcaacttggggtagagggtccgcgaccgtggactggagagaaggcgccgcacatcagctagaaagactcaggagtccctatcaccccccaccccaaactctgacctcttccagtcggcccccagccctttcctctgcagtccctggcattcagcttccctggtgcctcctctctcagacccagaactccaggaccctcctccttcagagaggagtccaagctcccaatccgctttatttagcccctatctttctgggtctccaggcccggcagggctgcagcgtagggtccgctcacctgcaccgtgggcggggtgaagggtatgggtgggataatgcggtgggaaaagtagctgctggtgagatggcagttgggcctggatccaggtacctcggttgcagagatacgacagcccggagccagggtgccactggccatggttccacccccactccgtagccaagcaggagctggcttattgtggttgttgccccaggtgacagaacccgcccacccagaacctagtcaatcaagggcctgcaggcacctggatggatggaatgagaaagagacccagagacagggaccccaagaggggtacaaagaaacacaaggagggggaatggagactcaaagataggagggtggaaagggaaggagaagttcagtatttcagagacccagggggtgggggagagagaaacccaaaaagagggacagggacctggaggtgtcagagatccagacagagagacagagacccctgcgctgcacctagcaactcaggacatccatgagaaacacccccctttcttccagggcccagatgctcctggctgcttcctccctctaccaggcctgcccacctcagggtaacgatttccatacatccccggggctccccgaccctccctgcatgcacgtgctgaagtaatcagcactagcattggctgtcctgcctgcctttgattggcttgaaaagttccacctgggtaggcggggtgtggaaacagggaggcacccacagagaagtgcaccggaccatagcgaaaaacatgggctttgatgagtgagaaagaaatacaagagaggagagagacagggaggaagacacagaccacgctggaaacggagctattagtactcacccagaggctagagccaccggaagttagagacagagagaaaggcggcaaaaaagagcaaaatcagagatggtaacaaggagatgtagaaacggaggcagccacacccctccctgccgaggggcctggtctgtacagattggtggagggggtgcctatgtcctttgctcaaagctggacctgagagagagagagggggagagaaagtgagagagagagagtgtgtgtgtgtgtctgtgtctgtgtgttggcaacacatgtggggagatgggtaataggtaaagggctattgtgaagtcctgtggtctgtcccagacagagagaaagagagagagagagagagagacagagtgtgtgtgtgtgtgtgtgtctgtctgtgtgttggcaacacatgtggggagatgggtaataggtgaagggctattgtgaagtcctgtggaccagagagagagagagagagtgagtgtgtgtgtgtctgtatgtctgtgtgttggcaacacatgtagggagatgggtaataggggtcataggtgaagggctactgtgaactcctgtggtctgtccctggcttcccttgtcatttcttcaccatatagagcttttggtcaccgggcacgatgactcactcctgtaatcccagcactttgagaggcagaggcgggcagataacttgaggttaggagtttgaaaccagcctggccaacatggcaaaaccctgtctctatcgaaaaatataaaaagtagccaggcatggtggcgcacacctgtaatcccaactaaggcaggagaatcacttg

SEQ ID NO: 93297 - DNA, 28442 bp, Homo sapiens
  misc_feature (1)...(28442): n = A,T,C or G
nnnnnnnnnnnnnnnnnnnnnnnnnnnnnnnnnnnnnnnnnnnnnnnnnnnnnnnnnnnnnnnnnnnnnnnnnnnnnnnnnnnnnnnnnnnnnnnnnnnnnnnnnnnnnnnnnnnnnnnnnnnnnnnnnnnnnnnnnnnnnnnnnnnnnnnnnnnnnnnnnnnnnnnnnnnnnnnnnnnnnnnnnnnnnnnnnnnnnnnnnnnnnnnnnnnnnnnnnnnnnnnnnnnnnnnnnnnnnnnnnnnnnnnnnnnnnnnnnnnnnnnnnnnnnnnnnnnnnnnnnnnnnnnnnnnnnnnnnnnnnnnnnnnnnnnnnnnnnnnnnnnnnnnnnnnnnnnnnnnnnnnnnnnnnnnnnnnnnnnnnnnnnnnnnnnnnnnnnnnnnnnnnnnnnnnnnnnnnnnnnnnnnnnnnnnnnnnnnnnnnnnnnnnnnnnnnnnnnnnnnnnnnnnnnnnnnnnnnnnnnnnnnnnnnnnnnnnnnnnnnnnnnnnnnnnnnnnnnnnnnnnnnnnnnnnnnnnnnnnnnnnnnnnnnnnnnnnnnnnnnnnnnnnnnnnnnnnnnnnnnnnnnnnnnnnnnnnnnnnnnnnnnnnnnnnnnnnnnnnnnnnnnnnnnnnnnnnnnnnnnnnnnnnnnnnnnnnnnnnnnnnnnnnnnnnnnnnnnnnnnnnnnnnnnnnnnnnnnnnnnnnnnnnnnnnnnnnnnnnnnnnnnnnnnnnnnnnnnnnnnnnnnnnnnnnnnnnnnnnnnnnnnnnnnnnnnnnnnnnnnnnnnnnnnnnnnnnnnnnnnnnnnnnnnnnnnnnnnnnnnnnnnnnnnnnnnnnnnnnnnnnnnnnnnnnnnnnnnnnnnnnnnnnnnnnnnnnnnnnnnnnnnnnnnnnnnnnnnnnnnnnnnnnnnnnnnnnnnnnnnnnnnnnnnnnnnnnnnnnnnnnnnnnnnnnnnnnnnnnnnnnnnnnnnnnnnnnnnnnnnnnnnnnnnnnnnnnnnnnnnnnnnnnnnnnnnnnnnnnnnnnnnnnnnnnnnnnnnnnnnnnnnnnnnnnnnnnnnnnnnnnnnnnnnnnnnnnnnnnnnnnnnnnnnnnnnnnnnnnnnnnnnnnnnnnnnnnnnnnnnnnnnnnnnnnnnnnnnnnnnnnnnnnnnnnnnnnnnnnnnnnnnnnnnnnnnnnnnnnnnnnnnnnnnnnnnnnnnnnnnnnnnnnnnnnnnnnnnnnnnnnnnnnnnnnnnnnnnnnnnnnnnnnnnnnnnnnnnnnnnnnnnnnnnnnnnnnnnnnnnnnnnnnnnnnnnnnnnnnnnnnnnnnnnnnnnnnnnnnnnnnnnnnnnnnnnnnnnnnnnnnnnnnnnnnnnnnnnnnnnnnnnnnnnnnnnnnnnnnnnnnnnnnnnnnnnnnnnnnnnnnnnnnnnnnnnnnnnnnnnnnnnnnnnnnnnnnnnnnnnnnnnnnnnnnnnnnnnnnnnnnnnnnnnnnnnnnnnnnnnnnnnnnnnnnnnnnnnnnnnnnnnnnnnnnnnnnnnnnnnnnnnnnnnnnnnnnnnnnnnnnnnnnnnnnnnnnnnnnnnnnnnnnnnnnnnnnnnnnnnnnnnnnnnnnnnnnnnnnnnnnnnnnnnnnnnnnnnnnnnnnnnnnnnnnnnnnnnnnnnnnnnnnnnnnnnnnnnnnnnnnnnnnnnnnnnnnnnnnnnnnnnnnnnnnnnnnnnnnnnnnnnnnnnnnnnnnnnnnnnnnnnnnnnnnnnnnnnnnnnnnnnnnnnnnnnnnnnnnnnnnnnnnnnnnnnnnnnnnnnnnnnnnnnnnnnnnnnnnnnnnnnnnnnnnnnnnnnnnnnnnnnnnnnnnnnnnnnnnnnnnnnnnnnnnnnnnnnnnnnnnnnnnnnnnnnnnnnnnnnnnnnnnnnnnnnnnnnnnnnnnnnnnnnnnnnnnnnnnnnnnnnnnnnnnnnnnnnnnnnnnnnnnnnnnnnnnnnnnnnnnnnnnnnnnnnnnnnnnnnnnnnnnnnnnnnnnnnnnnnnnnnnnnnnnnnnnnnnnnnnnnnnnnnnnnnnnnnnnnnnnnnnnnnnnnnnnnnnnnnnnnnnnnnnnnnnnnnnnnnnnnnnnnnnnnnnnnnnnnnnnnnnnnnnnnnnnnnnnnnnnnnnnnnnnnnnnnnnnnnnnnnnnnnnnnnnnnnnnnnnnnnnnnnnnnnnnnnnnnnnnnnnnnnnnnnnnnnnnnnnnnnnnnnnnnnnnnnnnnnnnnnnnnnnnnnnnnnnnnnnnnnnnnnnnnnnnnnnnnnnnnnnnnnnnnnnnnnnnnnnnnnnnnnnnnnnnnnnnnnnnnnnnnnnnnnnnnnnnnnnnnnnnnnnnnnnnnnnnnnnnnnnnnnnnnnnnnnnnnnnnnnnnnnnnnnnnnnnnnnnnnnnnnnnnnnnnnnnnnnnaatgtcatcaacatctccagcctggtgggggcaatcggccaggcccaggcagttccctatgtggccaccaaggtatggcagcccctaccccttccttccctccctactccttcccatgggccttggctttgagtccagacaacttaggagccagacctagcaagatcttggccctagaaagtctcacacctaactccyagatgcagcacccaggcataactgcctgtgacagatttctgttttttcttttcttttctttttttttttttaaagatggagtctcgctctgtcaccaggctggagttcagtggtgcaatctcagctgcaacctctgcctcctgggttcaagggattctcctgactcagcctcccgagtagctgggactacaggcgcatgccaccgcacccagctaattttttttgtattttttagtagagacggggtttcaccatgttagccaggatggtctcgatcttctgacttcatgatctgcctgccttggcctcccaaagtgctgggattacaggcatgagccaccgcacccagcagatttctgttttttcttttctttctttctttttttttgagatggagtttcgctcttattgcccaggttggagtgcaatggtgtgatcttggctcactgcaacctccgcctcccgggttcaagtgattctcctgcctcagcctcccaagtagctgagattacaggtggctgtcaccacgcccagctagatttttgtattttttagtagagacgagatttcaccatgttggtcaggctggtctcgaactcccgacctcaggtgatccacccacctcggcctcccaaagtgctgggattacaggcatgagccactgtgcccggctaactttctttttttcttttcttttcttttcttctttttttttttagatagggtctcactctgtcacccaggttgcagtgtggtggcatgatctcagctcactgcaacccctgcctcatgggttcaagcgattctcacgcctcagcctccccagtagctgggattacaggcgtgcaccaccatgtccggttaatttttgtatttttagcagagatggggttttgccatgttggccaggctggtctcgaactcctggcccaagtgatccacccatcccggcctcccaaagtgctgggattacaggtgtgagccactgcacctggccttcctgtgacagatttctatgccaagtttctcccaagaaaccaagcctggtgcctctgaaggcagccttcaaggagggcatgacttccccattctgatgcccccctggctggcaggagacaatggatggcagggaccccatgtcccggggactgaactttcttccccgctccatttcctgcagggggcagtaacagccatgaccaaagctttggccctggatgaaagtccatatggtgtccgagtcaactggtgagctgctctgagcaggcggagagcctcctggggggactggggtgactgggagtgatcccaagtggttcgagacagattgctttgatcccccctctcccttcctctagtatctccccaggaaacatctggaccccgctgtgggaggagctggcagccttaatgccagaccctagggccacaatccgagagggcatgctggcccaggtagaagtggggttcagatccaggtggtagaaggtggcatgggggtggggggcatggcgatcaagtggggctcctcttgacctccttcccccctcttttctccccagccactgggccgcatgggccagcccgctgaggtcggggctgcggcagtgttcctggcctccgaagccaacttctgcacgggcattgaactgctcgtgacggggggtgcagagctggggtacgggtgcaaggccagtcggagcacccccgtggacgcccccgatatcccttcctgatttctctcatttctacttggggcccccttcctaggactctcccaccccaaactccaacctgtatcagatgcagcccccaagcccttagactctaagcccagttagcaaggtgccgggtcaccctgcaggttcccataaaaacgatttgcagccagaaggaggaggatatcgttattatttatttcccatcctttagacgagtccttctgccccacttagcccttgcaccccagacccacaagttgcctcgaccctgaaggactgcagctccccccgccccccaaccccaggccttgcagcaagcaggtgcctgatgttgctagccctgtcgctgtcgccaggggctcctgggaagggtagagcggtttggcttcaccagcgcgctaactaaaggcccgcaggggagagtaaattaagcgctaattaggaggtaatggaggrggagacgcagaaggccctcttactcttggccctcagggaaaaggagttttcctctcactgcctgtagaataggaaggtggctggcaagaaaagtccaaagggaagagaaagtagggggttgagacatctggatcagagggaggaggggctgaaactcctgggttttggtccgcagggcactgggggacgcagactccccagctggacccagggggggggcagggcccgggtgcgctggcgtcccccaggtgaggggtggagctgcagggctgctgcggattggctgtggccgggggggcgtgtgcaccaaccgctgattggccgcggcgggggcgggagctgtcagtgggccccgaccctacagcccggggctggcgggtggggcaggaggactggggcggagcgcagaaaaacagggcgacgccctgtgagggaagggtcccgcggtttggctgtttgggcctgtggctgttaggggtggcaggatagtgacccggggacaggacttgggggcactgtgggggtagaatttggagacagagtgtcccagggtaggattgccgagacacgatggccgagggatacgattttttttttttttttttaatttgagacggagtctcactctgtcgcccaggctggagtgctgtggtgcaatgtcggctcactgcaacctccgcctcccgggttcaagcgattctcctgcctcagcctcccgaatagctgggattacaggcccccggcaccacgctcgactaatttttgtatttttatgtatttatttttatttatttatttattttgagacggagtctcaccctgtcacccaggctggaaatgcagtggcgcgatctcggctcaccgcaacgtccgcctccagggttcaaatgattctcctgcctcagcctccctagtagctgggattacaggcgcacaccaccacacccggctaatttttgtatctttagtagagacggggtttcaccatgttggtcaggcgggtcttgaactcctgaccttgtgatccgcccacctcggcctcccaaagtgctgggattacaggcgtaagccaccgtgcctggccttaatttttgtatttttagtagagacggggtttccccatgtcggccaggctggtcttgaactcctggcctcaggtgatccacccgccttggcccccaaagtgctgggattacaggtgtgagccaccaagccaggactttttttttttttttttttttttttttgagacggagtctcactctgtcgcccaggctggagtgcagtggcatcatctcggctcactgcaacctctgcctccccgattcaagcaattctcctgcctcagctttccgagtagctaagattacaggcgcccgccaccacgcccggstaattttttgtatttttagtagagacggggtttcatcatgttggaccaggctggtctctaactcctgacctcaggtaatccgcccgcttcggcctcccaaagtgctaagattacagacctgagccacttcgcctggcagggaccgtatttcaagtcctgccctcccaccagcgcctgcgccccgcagcagtgtccggctccctgccgacgccctggagctgggacggcctggggcgctggtcggccgccttcccccagaaggaggcgtgagcggggcgtggccggaacgtctctcttcggagccgcgccccgggcgggcacagttacgcgccgcacggatcatggccgcagccgctctggggcaggtgggttcgcagccccgcgccggggtctgggaaataaccgggggaggcgcacttccgggaagaccactggcctgcagccggtccgactcggcgccgctcctcccgccctggggttccgctgcagggcgcggaggaggatggcgccctttggaaaggagcacgaggctttaatggggtgagggggagcaggtagacgcggatgaggtggggcaagtaattggcggggaggtaaaaaaaaaaaaaaaaagggaaacatggtggaggaccctgtaatgagggaggcgtgggggtggggaggttgtgatttggggagcggagccctggggtgcggtggggcatcagcctgtgcgggagctggaataaaggggcccagacctccagggccgggtgcaggtgaaggcagagttggacctcaagtctcagctctgggaattggactcaaggtcctattttcttggaatgaaagttgaaaaaaataagagatggggattgctgtgcttcccaaactcctatctgaagctttgcacctggattggaaatcgaggcagcgtctcatggtcaaagtgacagatgctgcaggctggctgagacgatcccttctgactgtgcgatgtcaaacagcagcagcgtttcccagagtctatgatttcagagaacaaggtttctcagtgaggaaggaaacagccaaagaaaggggtcattacaagccttcacagctgcggtgtaaccttgggagaactgtctgttaactttacacctgactttatttgagtctcttatcctagctgatgaatgtcagggcagaatttcacttttttcggctcttagtgactgatagggatagtcctgggatacctggggtatgtgggcaatctgggctttagtggtgacactcctggactgtggtggggcagtactgggctttgacaggtccacttgggactgatgtggaccgtctcatcatggcacagttctggtgtcatagaatggccctgaactcatgatgggacattcctaggctctgatgaagatagagatatcctgtaatggagataattgggctgagtcctcagctgtgatggggacagtcccggggtgtggagaggacagtgctggaccatggtagggacagtctggaaggtactggcctagacagcaacatagggatagtcctggggattgaaaaagacaacaatgggatttttttttttttttwaatttcagacctggtgaataggaartaagccctgatatttggcagagacaatgctggttataatggggaaaagtgctgggctttggataggggacattcctgagctgtttgggacagtacttggctctgctggggaccagttctgataagttacaggcacaatctggacttgtgatgtggagcatcttgggccatcatagaacagccctggtctgtgatgggggagagtcctgggctataaagggggcagttctagacgtgatggggtcatgtgtgggctgtgacaagggcagactgcggtatgatggggtctctccggggccgtgatatggggacagtcctggagtatggagggcactgctgggctttgacagtgacactcctggtctttgatggtgatactcctgggctgtatgggacataatggaggttctatcacattatagagacctgccctgtgaacccccaaacgtactttatttctttgtctcgtcttttctttttgaccgagtcttgctctgttgctcaggctggagtgccgtggcacgatctcggctcactgtaacctccgcctcatgggttcaagtgactgtggtgcctcagcctcccgagtagatgggctcaagcgatccacctgcctcagattacaggcatgagccaccatgctggtctttttttttttttttttttttttttttttttgagagacactctatcactcatgctggagtgtagcagtgtgatcgtagctcaccacagccttgaccagtaggtcaaggtgatcctcccaccttagccttctgagtaactggaattacaggtgtgtgccaccatacctggctaatttttaaattgtttgtagagacagggtcttgctatattgcccaggctgatcttgaactcctggcctcatgcagtcctcccacctctgtctcctaaagtgctgtgattacaggcatgagctactgagccagctgcctactttctttctttgttttttttctttttaattgagacagagagtcttgctctgtcgcccaggctggagtgcagtggcaccatctcggctcactgcaacctcygcctcctgggtttaagcaattctcctgcctcagcttcccaagttgctgggactacaggcgcccgccaccacacccagctaacttgtattttctgtagagacagggtctccctatgttgcccaggctggtcttgaacacctggcctcaagctatcctcctgcctcggcctcccacagtgctgggattacaggcgcgagccactgcgtgtggcctctttctatgattagatctattttggcatctcttgtttcttggcgtcaatttctgtttttgtttttttttttttctgtttgtgcgcccctttctgtgtttctttttctcatccttcctcttccatctcttactctctttttttcatcttggctctgagggcagctctcctgcccacaggctggctgtcgcactgtgtttgtstctctcatactgtgggtgtcctatccctctgggcagaagcatggctgcaaggctgagcagtctagatgtcgccacccaaaggcaatctggggacccacgctctgatcaccccggaatccctggagcctcacaccagcaagaccacgctgcaggcccatctcccagcaactcacctagcgacaagtgaccacgcccattcacgtccatcttccagaatcagtgccaactcacccagctcacagggcaggccaggccaggccactctgtctctctcaacctcacgccccaacgcctccccacagggctggggaaagaggccttgtgaggtcaaaggtcaccagagagggcccagcctgctggacacagccagacctgctcttcctactcccctctgggaggacccgcctgagcctcatgcagtgaggactgcagtggctccccaggcccctgtagctgcccctcagccccaggggctgaagggaattggagtcactgccaaaatgggtttgtatttcaggtaatcagagcccagttgatcgaataccttcagagaataagcacctgtactcctgggtctggcggaggaggggctggggaactggactcctgggtctgagggaggaggggtggggcctgtactcctggatgtaagggaggagggtctgaggcctggactccagggtctgagggaggaggggctgggggcccagacttcgggtctgagggaggaggcagctagagtctggactcttacttaggtctgarggaggcgggcctggggtctgcacccctgagctctgggggagcaggacctgtcggtccttggtcttctaaggcctgtcagcacttgggtacccggaggccttcacttacctgtgtgccttccctggttgttttcttgtctgagctgatytccaggctgcgaccaaaggtctctggggtgggaggcgcttgcgtttgactttgccgcagcatggaggagggggcgggagctgactcagctctttccagcgagccctcgtcagggcagggaggggacttggcctccttcaggaccacctgccccgtctagaatggactgaaactgggacagaacaggcaggccagtgggacctccaagtgcaggaggtggcgagcgagctgccagggcccctgctgtgccccactcaccccctctctcacttctttctccacccagatctgggcacgaaagcttctctctgtcccttggcttctgtgtggtcccagaagatatgcctcctccagtttcaaggtgaaaggagggaactcgatgcttggctctgagagaggagggggctggcagctggttttgggcatctccaaaaggtccacagcccagagatggcagtgagtggtggtagcttaacagcctgccattgggccgcagacaagggatgaaactgcatgtcccagaatcctccagggtgacaggtccttcttctctatgggtctgaggcccagggcttcatgggagttgtagtttttcagctgggaggttgtggccagattctaggatacccctgtctttcctcaggctgcagacctgcagctggaaatgacacagaagcctcataagaagcctggccccggcgagcccctggtgtttgggaagacatttaccgaccacatgctgatggtggaatggaatgacaagggctggggccagccccgaatccagcccttccagaacctcacgctgcacccagcctcctccagcctccactactccctgcaggtggcatggcggccggcctctctccctgtccctgtctgcatctcctcctccttgctgtgtctcttgccaggtgtacctctcttggtttgtttgttgtgtgtttctcctttctgtgcattcaccatttgttttctgaggccttccatgctccaggctcatgcttggtgatgctgggttccccgagatgagcagacccggttccttcacttggaaaaccccatgctgtgggcataactcagtatgatctgtgctctgatggaggccctgtggaggccagtagagacccccagcctcacttgaaagaaagcatggcttcttctggcatagagggaagcttagagggggatggtgggagaggtgacagggtgatggtaggaaaggggacagccggggggctggcgggagagggacagccaggatgatcgcgggagaggggacagccattggggggggagatggtgggggagggcacagycagggggatggctggagaggggacagccaggggagggatggygggagaggggacagtcaggggagggatggcgggagaggggacagccaggggagggatggcgggagaggggacagccaggggagggatggcgggagaggggacagccaggggagggatggcgggagaggggacagccaggggaggcatggtgggagaggggacagccaggggagggatggcgggagacggacagccgggggagggatggcgggagacggacagccgggggagggatggcaggagagggacagccgggggagggatggcgggagagggacagccggggaagtgatggtgggagagggccagccgggggagggatggcaggagaggagacagcccaggggggatggcgggagaggggacagttggagatggcgggaagggggacagtcggtgggggatggcaggagtggagacagccaatccaaaccccaaacgggagtagagcctggtacatttgggagaaattgcggtgttggagcatggttaaggaggctgaaaatgtcagggccatggaggagctgaggggctggggccttgtccaagggtgctgggagccactgagggctctgaggaagggaggggcagggccatgtctgggtatagtaagagccctctcaggccatgtggagggcaagagttgcaggctaggaagccgggctggtgaccaggtagaccttgggcctgtccccacatggggacccaggaggaggagcggctttgtggcacctggtgagcctgagatactgtgaagtttctaggagacagatccaggaggcatttggttttaggacttatagctgcggctgaaagcaaggtcttcagaaggaaactttggttgagacaagatttaagtgagcatcttacagctccagtaactggttagcaggttggctgattttagtcctccagggcacagttctgtggcatgaagacttttattccattcctttctttcctttccctccctccctctgttttttcctttcttccttcctttccagaattttaaggttttgttttttcccctctcccctcccactctggacatctaagcaacaccagtcgattctgtacagagcacacacacctccaatcacagccagacactcctgccagtacataagcgtgatgggcaggattccgcctgctgagcccccaggaagctggttacttggagaccaccacacacttctcccttcagcccagcacagcagttgtcctctggctggggacccagtactttttcttcagytgagtgagagcagaggaagcctgtggccctggcagacagaacgcactgctgtgatcccgygggtccagggggcggaagggggaggatgagggagtaggacaatgctgtccctatgtcacccacactccagggcatgtgtggattgcaggccgaccacgtgtattattttttattttattttttcttatttatttatttagagacagagtctcactctgtcccccaggttggagtgcaatgatacaatctcgctcactgcaacctccgcctcccgggttcaagtgattctcctgcctcagcctccccagtagctgggattacaggcgcccgccaccacacccggctaatttttgtatttttagtaaagccagggtttcaccaygttggccaggctgttttcgaactcctggcctcaagtgatctgcccacctcagcctcccaaagtgctgggattgyaggcgtgagccaccatgcctggccttattttttattattgtggtactaatacgcatacataataacacacagcatcaaatgtgggattccaaccattttatttgtttgtttgtttgtttatttatttatttatttatgagatagagtttcactcttgttgcccaggctggagtgcagtggcacaatcttggctcactgcaacctctgcctcccaggttcaagtgattctcctgcctcagcctcctgagtagctgggattatagacatgcaccactattggctaatttttgtatatttagtagagacacggtttcaccacgttggccaggctggtctcaaactcccgacctcagatgatccaccgcctcatcctcccaaagggctgggattactggcgtgagccacggcgcccagcctccaaccattttaaagcccataattcagtggcaggcaatgttatgcaaccatcagcaccatcaaggttcagaactgtttaatcccccatacctattaatcagtacccattgtccctcaccccagcccatgacaaccattagtctgctttctgtctttgtctacctgtatttgtttatttattatctttaaataatagggatggggtttcaccatgttacccaggctggttttgaactcctgagctcaagtgatccacctgcttcggcctcccaaagtgctgggattacaggcgtgagtcaccaagcctggccacctgcatttttgttgttgttgttatgactctttttttgagaaagggtcttgctctgtagcccaggctggagtgcagtggcacgatcttggctcactgcagccttgacctcccaggctccagcgatccacctgcgtcagccttccaagtagctgggactgcaggtgtgcaccaccatgcccagctaatttttattttattttatttttttttagggatggggtcttgttatgttgcccagggtgatctcagatttctaagctcaagtgatcctcctgcctcagcctcccaaagtcctgggattgcaggcatgagccactatatccggtgtatccgggctcttttacctgggttttgttttgttttgtttttgagacggtgtcttgctctgtttcccaggctggagtgcagtggcatggtctcagctcactgcaacctccgcctcctaggctcaagtgatcctcctgcctctgcctcccgagtggctaggactacaggcacacaccaccttgcccagttaatttttaaatcttgtgcaaagacaggatctcactttgttgcccaggctggtctcgaactccwggcttcaagcaattctcccaccttagcctcccagttctggggttacaggtatgagccatcatactgggcctggaaattcttctctataccttaaagcttaaagagctttttccatctttcttgcagcctcatgctgtatcatcctaacaatgcacctccttaggcaatcccctactgttggacacttaggttgtttccagtctattataaacaattttgcaataaagaatctagtacagggccggctgtgatggctcacctgcaatcccagcactttgggaggctgaggcaggtgggtcacctgaggtcaggagttcaagaccagctttgccaacatggtgaaaccccatctctactaaatatacaaaaattagctgggtgtggtggcgggtgcctgtaatcccaggtactcgggaggctgaggcaggagaattgcttgaacccgggaggcggaggttgcagtgagccgagattgcgccactgcactccagcctgggtggcagagtgagactccatctcaaaaaaaaaaaaaaaaaaaaaaaaggaatccagtacacacgtcccttctttagtcacttgtttaagtgcaaatgtatctagaggctcaatttcgggaactgtaggtcaaaggatatgtatgcttgtaatcttgatacgtatcgccacatctacatctacagggtgtgtcagtttccacacccaccagcagagcctgtttccataccttggacaacccttgtccaagttttagatcttttccaatctcccatgtggttttaaaggtatctcaaactaattttaatttgcatttttctccctagtgattaatgaaattgactatcttctcacgagcttaagggccacctgtatttccttttgtgtgaactgtccatttgctaggctgatttttctatcaggttaggttttaaaaaattcatctggggctgggaagaagaggcagggggattgcttgagctcaggagttcaagaccagcctgggcaacatagtaagaccctatctgtacaagaaattggaaaaaaaaaaaaagtccagtcgtggtggctcacgcctgtaatcccagcactttgggaggccgaggtgggcgcatcacctgaggtcaggagttcaagaccagcctggccaacgtggtgaaaccccgtctctaccaaaaacacaaaaattagccgrgcgtggttgtaggcacctgtaatcccagctacttgggaggttgaggcaaaagaattgcttgaacctgggaggtagaggttgcagtgagccaagatagagcacttcagcctgggcaacagagtgagactccatctcaaataaaataaaaaataaaattcccaatccaagatataaaacagttatttttgtttccttctatagcttttatggtgtaatatatatatatatattttgtttagacttttaatgcacctggaattttttctggtgtgaggtgtgaaatagagattcaacgtagtttttctctagatggatatttggttatctattccattattcagtctgtccactcatatagcagtgtcactctgttttaagtattgtagatttataatgttttactacctgatatggctactccctgcccctgccccatcttgcccctcatttttgtggtggtggtttttatccccccaaaatattgtagctagttttgcttgtcttccattcatttatctattcattcatcaaaaacccactatgggaaaaaaaaaaaaagtctggctgggtgcagtggctcacccctgtaatcctagcactttgggaggctgaggcgggtggatcaactaaaaatacaaaaattagctgggcgtggtggtgggcgcctgtaatcccagctacccaggaggccgaggcacaagaatcacttggacctgggaggcggaggttgcaatcagcagagatcacgccactgcactccagcctgggtgacagagtgagaccctgtctcaaaacaaaacaaaacaaaacaaaaaaacactctgtgccaagcrctgcctaccctggtgcatgggactgcaggagaggctgtctggtaaacgtgtcaagggtaatccctgccttccaggctcttccactctgcagtggagcagatgctgaacaagcaaacttggaaccatggggcagtgatcagggacagagtctccagaaaaaaaaaactaggtcccaggctggagtgcagtggcatgatcgtggctcactgcagtctcaaactcccaggctcaagtgatcctcccaccaccttccaaatacctgggactccagtcacgtgctaccacgtctggctaattttcgtattttttggtagagatggggtcttgctataatgcctgggctggtcacgaactcctacactcaagtgatcctcctgcctcggcctcccaaagtgctgggattacagtgagccactgagcccggtcgtgtcctttgctttctagagtctccgtgtgtctctacctgtttgtctccctgtctatatctgtctctctttttctccatctctctgacccagctgctaaatctccccggtgctctcctcttggcctccatctttcagttgtctgtgtctttgtgtatctgtctctgtctgtcttggtgtctctcatgactgtctggagaagtctctgagcctccccacccgcgtgtccccgcagctgtttgagggcatgaaggcgttcaaaggcaaagaccagcaggtgcgcctcttccgcccctggctcaacatggaccggatgctgcgctcagccatgcgcctgtgcctgccggtgaggggtcccggtccaccggggtggggaggagggctggggccggggcagcaagggccccttgactcattcagaatcccacccagagtttcgacaagctggagttgctggagtgcatccgccggctcatcgaagtggacaaggactgggtccccgatgccgccggcaccagcctctatgtgcggcctgtgctcattgggaacgaggtgggcccaactccagggctgggaagctgggctgcgggggttggattctgcagggcaggggtggggtcctggaggcctgggcctggggacgggaagggactgggggcctggactcctgacgctgtccctttgcccgtcgcagccctcgctgggtgtcagccagcccasgcgcgcgctcctgttcgtcattctctgcccagtgggtgcctacttccctggaggctccgtgaccccggtctccctcctggccgacccagccttcatccgggcctgggtgggcggggtcggcaactacaagttaggtgggtaagtagcacccccatccccagaacgactggcgcactgggcgttggagacacagggaccagcgtgcgtgctttcggccatgcctctggatgtcacatgaaggtgacatcatcagcaccgtgcagggctcagtgctaagtgacctccctggtccctgaaaacaaaccatggaaggaaggaggaggggattatttttcagatggacaaaaaggctcacagatgggaaggcattgggtggaggtcagtggggaaaccaggactggtccctggaagcctccaggagtgaagcttacactcagctcattggcttctcgccccagaagcctcccctgatcccccaggctgggctgcgctccccatacccagctcccacagtcgtttgagcctccaaagcccctcacccccgtgtggactttctgtgtaaatctgtctcccagtggcctcagctcagcagggcaggaaggagacagctgggtctcctgggcaaccaaggcagagggtgggcactggcgtgttgggacaggaatgtggccccagctgggggtgcattcaggtcctttcagccacatcctgtgaggtctcctgagggccaggccctgtgctggcagragctggggacacagatgagtcagccccgagccctgcyctcctgggtctcccaggctggtgggagccccagtattcggagctgcatgttctctggtgaggtgacccagggcattgtgaaagccttcacagaggccagaggcggtggctcacgcctgtaatcccagcactttgggaggctgaggcgggcagatcacgaggtcaggagatcgagaccatcctgattaacacagtgaaaccccatctctactaaaaatacaaaaaaaaaaaaaaaaaattagccgggcttggtggcgggcgcctgtagtcgcagctactcaggaggctgaggcaggacaatggcgagaacccaggagacagagcttgcagtgagccgagatcgcgccactgcactccagcctgggcgacagagcgaaactccatctcaaaaaaaaaaaagaaaggtttcrcagaggaggcgacccttcaactaggtctgacgaggagggaggagggggtttcctgggtacaaaagtcagcaaactgtttccagtcctgggaaccatgtgtacagggacagaaggaataggatcacagaagatgttcaggttacaaaaataagtttgggttttgaaaaatgcttagcaagtattcattagacccaggsaggcctggaaygccggaaggaggctagggtcttgtcctggggcactggggagccaygggaggcttgttagcagctgaggggagaggctatctctgggagagagactcagaaagtcatccaggtagcccagttcactgggggagtccagggaaggtccagcacccagcctggaggtctggaaacacctctcgaggaggtgacaacagaaacggttttggagccaggcgcggtagctcacgcttgtaatcccagcactttgggaggccgaggtaggcggatcacttgaggtcaggagtttgagaccagcctggccaacatggtgaaaccccgtctctactaaaaatataaaaagtaaggccgggcgctgtggctcactcttgtaatcccagcactttggggggctgaggcgggcatataaatataaatgtraatataaattagccggacatggtgctgcatgccccagttactccagttactcaggaggctgaggcacgagaatcgcttggacccgagaggcggaggttgcagtgagctgagatcgcaccactgcactctagcctcagcctgggcgacagagcaagactctgtctcaaaaaaaaaaaaaagaaaaaaagaaaaaaagaaatggttttgaatgacagctgaggatttggtcagtatgaaatgggtgagggctgggcgcggtggctcacgcctgtaatcccagcactttgggaggctgaggcgggcagatcaccaggtcaagagaggctgaggcaggagartctcttgaacctgggaggcggaggttgcagtgagccaagatcgcaccactgcactccagcctgggtgacagagcgagactccgtcttaaaaaaaaaagaaaagaaaagaaagaaaagtgggaagagacaggagagaggggacataaccatttagggtcctgatgccaaatgaaaagtcaaggattccatctcaggggaactggggagccctgtgagagctgtgagcagggagacgggagagagtaggatgagcctcctctggggctgggctggggaaggatggggctcccttgccccacccaaccagrctgccctccaccaggaattatgggcccaccgtgttagtgcaacaggaggcactcaagcggggctgtgaacaggtcctctggctgtatgggcccgaccaccagctcaccgaggtgggaaccatgaacatctttgtctactggacccacgaagatgggggtaagcccacccatgayccagcccgaaccctggtggaagtgggtggcaccatcattcctggcaggttacaggccccagggattctgggatgggggaagggggtggctcttaagacggcggtgctagggggtgagaggtaacatcttccaccccttacacctgccctagtgctggagctggtgacgcccccgctgaatggtgttatcctgcctggagtggtcagacagagtctactggacatggctcagacctgggtgaggacatggcatcttctggtgaygggcgccatgtgccaggggccagggcatcagagggctgggactggggcacactggcatgtctctgccccttctcctgggtctgtctctcccgttgggcctctgtctttctcactatcctcagggagggagaggtggaggtctgcagcagggcaaccctctggggacacgtgtctctgccaactgccctgcagggtgagttccgggtggtggagcgcacgatcaccatgaagcagttgctgcgggccytggaggagggccgcgtgcgggaagtctttggctcgggcaccgcttgccaggtctgcccagtgcaccgaatcctgtacaaagacagggtgaggcrgggctgccattgtgggtgggagggaaggaggggaggggcttggtcctcaccgcaccttctgtcccagaacctccacattcccaccatggaaaatgggcctgagctgatcctccgcttccagaaggagctgaaggagatccaggtgagctgcagggagctggggaatgggctgggagcttgttccctggagaagttggtgtcccatgagcccctggactaacagccagcctccttcagtagtaccaggaacagataatggcctttcttattgaggccctggagagtgggctttcygtgctgctctgtggcctggaaaaccccttggggctaaatcaccctttcctgggagctcccggagccctggatatgtcttcagctttggaaaccccttcctgtgatcctctgcggctcctgggtgccctggtaggagaaaccccctctccgtgggcctctgaggcccctgggtgccctggtgggagaaactccctccctgtgatcctctgctgccccgggtgccctggtgggagaaaggccctttccatgaatcactgagaccttagccagccctctggccatctcagaggttggcctcccaagattccctggagccctgggctatccctttggccggagaaagcttcctcccatgagcctctggaccttggcccctctctggcaccagactgtttaatcccataaatctctgggggtattcccatcttctgggccaagatctctttcccaagaatctctgggctcctttcccagacctagagctacatttctgtaaacttttgtgcatcaggacctagaactacacatcctctgactatctgggctttctgagctgaaagtgactttttccaagagccttagaggcctggccataattcctgtcttcagaactacatctcccggaagcctctgcgccgccttagccttgattccccgttcccatcattgttggggccctctgggaagtggactacatttcccgtgagccgctggggcacagctccgtaggcactcggcctggaacaccccagggcctactgggagttgtagtgcagcttccacctcacgcactgcctccgttgttccgcagtacggaatcagagcccacgagtggatgttcccggtgtgaagctgcaggctgtgctccagatccaccgacccgtrgcatctcgtcacgccagcactcgcctccctaccaatgaytcacctgaagtgcaatacgaaataaaaggccagcgggcggcgtctgggtctctggcgcccccatgtggttgcgamactcccaaagccgtaagggccgacccaggcatcttggcccccagcccctcgtcgcgggttcaggtccgcccattactccttgtcgtgcggtcaaggatacaccttggccccgattccggatctctccgttctcaggccagacccctggtgctgccgttgatttttttttctctgtctttgctgcaattttgaaataaaatgccaaagaacacacattgtcgggcttcttcagtgacgtgactctggggctttaacccaggaatcctgcttcctcagcccattttattctgaaggactcagtcatccgagcccccagtgttctgatggtttctccaacctgggggagcatttcatgtctccggcactgaacttactatctgccccccaccaaccagctcctcccctactttcccgtctcccagtctctaggccggacccctaggtgctgcatccttttctctcaaagcccacgaggccccgatccctgttcctcctgcccccgactctgctgtccgttcccccgcctctttgtcccctaggccctggcctcagctcagctgctgtcttctactggcacccttgttccagcctgcagtctgctacctggcccaaagggtcttttctacacccagacgtggcccagtgccctcagccaggactgtagtcacgggaccctagtgggtgtggagtgaggcacgatactctcacctgctggagggattaaacgtggaagagtttagactgggtatggtgactcccacctgcaattccagcactgtgggaggctgaggcgggaggattgcttgagaccaggctgggcaacacagtgagatcccatctgtacagaaaatacagaaaattaaccaggtgaggtggcatgtgagtatagtcccagctactccagaggctgaggtgggaggattgcctgagcccgggaggttgaggctgcagtgagctgtgattgtgccactacactccagcctgggtgacagagcaagactgtcttgaaaaaaaggccaggcactgtggctcatgcccgtaatcccagcactttgggaggccaaggtgggcggatcacctgaagtcaggagttcaagagcagcctggccaacatggtgaaaccccatctctactaaaaatacaaaaaaaccagctggacgtggtggagggtgcctgtaatcccatctacttgagaggctgaggcaggagaatcgcttgaacctaggaggcagaggttgcagtgagcagagatcatgccactgcactccaacacacacacacacacacacacacacacacagacacacacacacactttattttatttttttcttgagacagagtctcgctctgtcgctcaggctggagtgcagtggcatgatctcgactcactgcaacctctgcctcctgggttcaagcgattgtcctgcctcagcctccccagtagctgggactacaggcgtgcactaccatgcccagctaatttttgtatttttagtaaagatgggagttttgccatgttggccaggctggtctcaaactgctgacctcaggtgatccacctgcctcggcctctcaacatgctgggatgataggcatgagctacccaacctggcccacatataccttttcatattataattgttatgtggaggtgtagagaaagccaggcattcggatggacgaggcacatcctcttgcagattcgaattcacagactgccttggttatcggctggctgtgtgacctcaggtgtggtgcttaatctccttgatccaatttgctggagggacaccctgtgggactattctggcaaacatgatctgtggcctatccagcagccatcggcgttgacactgaaagtccagttttttacggcrtcagcagacccattaccacatcctctcatttcccattgtcaatgatccctcaaggaaaggttagaggccaaggggatcctaagggaaacttgcctggaggcctctgggaagctttcttcccttgataaaacaatccatgtgctcacttcggcagcacatatactaaaattggaatgatacagagaagactaggatggcccctgtgcgaggatgacacacaaattcgcaaagcattccatatttttttgtcctcagcaaactaacacaggaacagaaaaccaaacaccggtctgagcacagtggctcacgcctataatcccagcactttcggaggccgaggtgggcagatcacttgaggtctggagttcgagaccagcctggccaacatggtgaaaccccatttctactaaaaatatgaaaatgagccaggcatggtggcacacacctgtactctcagttactcgggaggctgaggcacaagaattgcttgaatctgggaaatggaggttgcagtgagccaagatcacaccactacactccagcctgggtgacagagtgagaccctctctcaaaaaaataaagaagccgggcgcggtggctcacacctgtactcccagcactttgggaggctgaggcaggtggatcacgaggtcaggagatcaagaccatcctggctaccatggtgaaaccctgtctctactaaaaatacaaaaaaaaaaattaaccgggcatggtggtgggcgcctgtagtcccagctactcgggaggctgaggcaggagaatggtgtgaacctgagaggcggagcttgcagtgagccgagatcgtgccactgcactccagcctgggtgacagagcgagactccatctaaaaaaaaaaaaaaagaaaaaaagaaaaccaaccaaacaccgcatgttctcatttataagtgggagctgaacaatgagaacacaaggacacggggaggggaacaacatacactggggcctgttgcagggtggtggggagggaaagcatcaggataaatagctaatggatgcggggcttaataccaggtgatgggttaacaggtgcagcaaaccaccatggcacacgtttacccatgtaacaaacctgcatgtcctgcacatgtaccccagaacttaaaataaaattaaggctgggcttggtggctcatgcctgtaatcctagcactttgggaggccaaggcaggctcgtcacctgaggtcaggggttccagaccagcttggccaacatgtggaaacactgtctctactaaaaatacaaaaaatagactgggtgaggtggctcacgcctgtaatcccagcactttgggaagccgagatcaggagatcgagaccagcctagccaacgtggtgaaaccccatctctactaaaaatacaaaaattatccgggcgtggtggcgcatgcctgtaatcccagctactcgggaggctaagacaggagaattgtttgaatccgggaggcagaggttgcagtgagccgagatcacgccattgcactccagcctgggcaacaagagcaaaactccatctctaaataaatacataaatgaaataaaaatacagaaaatcgccaggcatcatggcgcatgcctgtaatcccagctacttggaaggctgaggcaggagaaccacttgaacccaggaggcagaggttgtaatgagatgagatcgtgccactgcactccagccagtgtgacagagcaagactctatctcaaaaagaaaataaaaataataaaattaaaaaagaattcacaagcgtcacccctacatatatatatacacacatgtatatctataggctggagtacagtgacgcattcagtgtactgcagtaatcactgcagcctcgacctcccagactcaaacaattctctcacctcagcctcccaagcagctggaatcacaggcatgtgccactatgcctgcctaattttttatttttatttttgtagagacaaggtctcaatataatgcccaggctggtctcaaactcctacgctcaagtgatccgcccatcttatcctcccaaagtgctgggattacagtcatgagccactgcactgagcctaattttattattttttattttttgtagagacaaggtcccactaggctgatctcaaacgatccttccaccttggtctcccagtgttgaggttacaggcacgagccaccacccccagcctaagagactatcatcaatgattttttttttcttttttcttttctagagcaggtacaatgtaatcaattattattattattattaagaccgagtcttgctctgtcgccaggctggagtgcagaggcatgatcttggctcactgcaacctctgcctcctgggttcaagcaattgtcctgtctcagcctcccgagtagctaggactacagttgtgtgtcaccacactcagctaattttttttttttttttgtatttttagtagagaagggattttatcatgttggccaggatggtctctatcgcttgacctcacgatccacctgcctcggcctcccaaagtgctgggattataggcgtgagccaccgtgcctggccatcaatttattattatgatgatgatgatttttgagatggagtctcagtctgtcacccaggccagagtgcagtggcgcaatcttagctcactgcaatctctgcctcctgggttcaagcgattcttttgcctcagcctctcgagtagctgggattacaggtgcccgccaccaagcccggctaatttcttttttttttttttttgagatgcagtctcactctgtcacccaggctgcagtgcagtggcgccatctcggctcactgcaagctccgcctccagggttcacgccattcttcctgcctcagcctcccgagtacctgggactacaggcgcccgccaccacgcccagctaaattttttgtattcttagtagagacggggtttcaccgtgttagccaggatggtctcgatctcctgaccttgtgatccacccgcctcggcctcccgacgtgctgggattacaggcgtgagtcaccgcgcccggccttttttttggtatttttagtagagatggggtttcaccatgttggccaggctggtctggaactcctgacctcaggtgatccgcccgcctcagcctcccaacgtgctgggattacaggcgtgagccaccgtgctcagcctcagtgatttttgagaatgtgaaggggtcttgggaccaaagggttcaagaactgctatccatgagcagtgctgggcacacagtgagtaggtgtgagtgttggcgctgcagctcactttggaaaataactttgtgttggtgcctcatgcctgtaatcccagcattctgggaggccaaggcaggaggattacttgagcccaggagttcgagaccaccctgggcaacatagtgagaccccccctcctctacaaaaaataaaaaaattagctgcatgtggtggcgtgtgcctatggtcccagctattcggtaggctgagataggaggatgggtttaggccaagaattccaggttgcagtgagctgtgttcatgccgctgcactccagcctgggtaacagagcaagaccctgtctcaaaaaaaaaaaaaaaaaaagaaagaaagaaagaaagaaaaagaaaaaaaagagtccaattctgtgagaaaatgaatatctgcaaagaataattttttttttttttttgagatggagtctcgctctgtcacccaggctgcagtgcagtggcgccatctcggttcactgcaagctccgcctcccgggttcacgccgttctcctgcctcagcctccccagtagctgggactataggcgcccgccacgacgcctgcctaattttttgtatttttagtagagacggggtttcaccatgttagccaggatggtctcgatctcctgaccttgtgatcctccagcctcggcctcttaaagtgctgggattacaggtgtgagccaccaggcccagccagattgaatctttaattataatttaattatataagacttagggtactataggccttcatggctttagaaaacatttttcaaaatatttaaagacattttcatgcttaaggatgtcttcattttaaaataacaaacaggactaggcgccgtggctcacgccagtaatcccagcattttgggaggccgaggtgggtggatcacctgaggccaggagtttgagaccagcctggtgaacatggcgagacccctgtctctactaaaaatagaaaaattagccgggtgtggtggcgggcacctgtaatctcagctactctggaggctgaggcagga

SEQ ID NO: 93298 - DNA, 16583 bp, Homo sapiens
tgggtgtggtggcgcacgcctgtaatcacagctactcgggtggctgaggcaggagaattgcttgaacctgggaggcggaggttggagtgagccaagatcgcgccactgcactccagcctgggtcacagagcgagactccgtctcaaaaaaaaaaaagaaaagaaaagaaaaaagtgaggcccagtgggaagccaggaccctcggaccacgtgaggggaggtgtagagggggttgtccgggccaaggaagacaaaacagctgccatgtcttccctcagacactcacacatgctcattcttatcctcctctggaactctttattatctcaagtaagaaaaataaaaaaataaataagataaataacctaataaataaagaggagatgtcatagtaaacagcctctggcttcaggaagcrtagctggggcttcggccctgggaaggtcccaccatgctcagagggtccgaggagcccacatcggggggctggggggccaggattccgggtggctccgggrgtgcsgggggcaggcctggtagtggcaggaagcgagctggtcctcggggtgcagggtcccggtgtggggacttgttccctggcaggtgcagcgggaggccrtgggcttcggactggtaaacattgtatccgtcctcaagaagcagctcccggaagctgcaggcctcagggtcaaagtggagctaggggacaaaaacaggatcagagacagggttcctctgttttcctgatgtaagacccaggatccaggccccagccctgcctccctcagacccaggggtccaggcccccagcgcctcctccctcagacccaggggtccagaccctagtytctcctccatccgacccaggagtccaggcccccagcgcctcctccctcagacccggggttccaggccccagcctctcctccctcagacccggggttccaggccccagcccctcctccctcagacccaggggtccaggcccccagccyctcctccctcagacccaggagtccaggcccccagcccctcctctaggaaacaaaacagcaaggcaggttttgttttttaccccagggctctcctgcagggacctgcctcccagttcagacttcacagagaacattccagccctcggagccatcagtgctctctcaggccaggcggggkgtctccctagcactcaaggtcctggtcactttactggccatggcttccccgagtgtccctgtgcccagcatgagccgtgcacacaggggccgtgtgggcaggagcaggggttactgaatcacgagactcccaataacctgagcctcaggccgctccagcatccacacatcacatgattgaggtcactggcgccccggcctgggcctcagtttcctcatcttgcaaacactgatgacaacttcaacctccaaatgttgcagctgggggcgtgcagagcaaatagaatcaagtctggctccgggggggatgagcaagacaaggcaccccaggctgtgagggcgacatataggaggagcatggtgggtggtgaggagggtcctggaaactcaccgatccatacaggkycccatctggccgctggcacaggaacctggatgtcttgactcccaagatttgaataactcccggcttcaaggctttcagctgcaggagacctaaggggtgaaagcgataaggtggttcgaggacctctcccacccgggactgtcccaccacccgactctgtcccaccatccggctctgtcccagccctgggagtccaagcccacagcctacctcctccctcagacccaggagaagcccaagccaaagccccctcccaactcagacccaagagtccaggaccccagcccttcctycttcamacccaagagtccagacccccagcccctcctccctcagacccaggggtccagacccagcccctcctccctcagacccaggggyccagatccccagcccctcctccctcagacccaggagtccagatccccagcccctcctccctcagacccaggggccaaggcccccagcccctcctccctcagacccaggaatccagacccacagcccctcctccctcagacccaggctctggcccacactcactttcggggctctggtcagcagcgccccccaccgtcccatcctccctgatctccaggtgggcttctgtctgctgggcatcatctgtgtagaggtacygctgccggacttggcccccgaattgcaggagaggactggagtcagggatggggtgtgcctggcaggctcccagcagaagaccagccagcacagaaacccacagtcctgagtgctcgaacccggtctcgtccgagtccatcaatggctcgggtcctcaggtgatctccggggtgtgagctcggagaagctgagtggtttagaattggtgccagattccagttgtccaggtgagtagactcaggtggcctgagtgcctggctcctctttcggctggatcctcagctgacagaacacccttgttttttgggatagatgcagaagctccagaatttatacccagacaggcccgcccaatcaccctccctgcgcctgaaccatgatatttgacccatttggcaggagctacagaattccatcgtggcaagggcagcctgaatggatgatgtaacctggggtcctttcaatggagggccagactcctgggtctaggggatgagggaggggaggatcgggttagctgggacccaggtgaaaggggctgggggcccacattcctgrgtctcagasagaaggatctggggtctcaagcacctgagtcggagggaggaggggtgctgggctcctggaaaaaccacctcttggaccatctatgcagatcacgcagaacaagagaaatttctgcgccccatctgaatttctaagtttggggggagggcgtgatctgacactgaggttccttgatcctcagcaaggcggcaattgctgtatgaaagaagcgaccgcatctgagacacaagtatcctgccttggaagcctctcacctggccgtgggccaacctcaacctcatctgtccctgctcagatgctcagaccctggacatcccagcctcctcctccctgatgcaatcctggtgtttctttcaccagagaagccatcccaggcccaggcaggtgctcctgaaataacctggggggaggggtggctgaaagtccctgactggagttggcagccaagccaggccctggagtgggcacccagagggaagacaggttggctaatttcctggagcccctaagggtgcaagggtaggccttctgtgtctgagggaggagggctggggctctggactcctgggtctgagggaggaggggtggggggcctgkactcctggrtctgagggaggagggkctgggcctgtactcctggatctgagggaggaggggctggggaacttgggctcctgggtctgagggaggagggagctttggtctggactcctgggtctgagggagtaggggctagggatctggactcgtgggtgtgaggaaggaggggctggggtcctggactcctgggtctgaggaaggaggggcagggggcttggactcctgggtctgaggaaggaggggccgggagcctggactcctaagtctgagggaggagggtctgggggcctggactgctgggtgtgagcagaagggtctgggtgctgggagtcccgagcctggggagatgatggttaaacttctgggaatcaagtcaaactcctgagtctttgacattgatgtatcttgaatgggagggtcagtctgtggggaaggattacccaggtgccgaggcaagagactgaaggcacaaactgtttcagtataataaagaaaatagttagaataagaatagttatcatacaaattagatatagagatgatcatggacagtatcaatcattagtgtaaacattattaatcattagctattacttttattctttgttgtataactaatataaccaggaaacaaccggtgggtatagggtcaggtactgaagggacattgtgagaagtgacctagaaggcaagaggtgagccttctgtcacaccggcataagggcctcttgagggctccttggtcaagcgggaacgccagtgtctgggaaggcacccgttactcagcagaccacgaaagggaatctccttttcttggaggagtcagggaacactctgctccaccagcttcttgtgggaggctgggtattatctaggcctgcccgcagtcatcctgctgtgctgtgcttcaatggtcacgctccttgtcctcttgcattttcctcccgtactcctggttcctctttgaagttcgtagtagatagcggtagaagaaatagtgaaagcctttttttttttttttttgaggcggagtctcgctctgtcccccaggctggagtgcagtggcgtgatctcggctcactgcaatctccgcctcctgggttcacaccattctcctgcctcaccctcccaaatagctaggactacaggcgccctccaccacgcgcccggataattttttgtatttttagtagagacagggtttcaccgtgttagccaggatggcctccacctcctgaccttgtgatccgcccgcctcagcctcccaaagtgctgggattacaggcgtgagccaccgcgcccgcccgaaatagtgaaagtcttaaagtctttgatctttcttataagtgcagagaagaaaacgctgacatatgctgccttctctttctgcttcggctgcctaaaagggaagggccccctgtcccatgatcacgtgacttgcttgaccttatcagtcatttggacgactcaccctccttatcctgcccccccttgtcttgtatacaataaatatcagcgcgcccagccattcggggccactaccggtctctgcgtcttgatggtagtggtcccccgggcccagctgttttctctttatctctttgtcttgtgtctttatttcttacaatctctcctctcctcacaggggaagaacacccacccgcaaagccccgtagggctggaccctacgttagcctgccctgctcggggttggcgatgctggaggtgggccttggaccagagaaaatgctttaattaggtgacaagcgggcagaggcctttgtctctggcgccggcagccacggcccccgctgacggcgtgggaaacagaccctgttccactccggtctccagccttggaatggttgccttcgtgcagtgcaggtctggaaagtagcagtttggcacgggaccctagaattccccaaaaggagtgactaggggctgggattctggaatttgagtgtggacggtgaggcggggggtgtgggagatcggagaccctggtgggcgcgggagcacctgcaggctggaggccctcgcgcgctccggcggcagcctggcaaacaggttctccatcccccaggaggacgcggcagagggcggacgatcgctccactcgccgggaccaggtgcgggggccctgcccagccgctggggcgtggccaggctcgaagcacccaggtgtcgggggccgactctaagccctggcaccggaagagagagggcggcggattggacctcccggctccagcattgcaactgggcgctccgtctcctggtccacgcaatgatgctgcggctgctcagaagccaggtagcctgccctgggtgaagccttcgcgcaggtcaatgacggggcggaggggcagggcgcggtcccctgcatccccgatctggggagcggtgggcccaggggccatcgccttagcccctggcgctggggctcggcgccaagtgacgggcggggctccaccttccagccatccgcccggcccgggagggcggacgctgcgagactcccggccgcgccctctccttcctctcctccccaagccctcgctgccagtccggacaggctgcgcggaggggagggctgccgggccggatagccggacgcctggcgttccaggggcggccggatgtggcctgcctttgcggagggtgcgctccggccacgaaaagcggactgtggatctgccacctgcaagcagctcgggtaagtggggactgccccactcagttgttcctgggacccaggaacaactccttcagaaccaggaggtgcacccccaacctcttctccaggtcttcctaaggccctaggaatctccgccacctccccagccattactcctccaggaaccaagatgctccttccgctcctgaccctccagcctctcttgttttacttgaactatcgtttcccatcaccacctctgtggtggattttgcgcctcacagacaggtactcctgagaaacaggctggtggaagagtccagtatcagcggaacttacaggaggggagactcgagattccttcaggaaaggtgtaggaacctggaccactttctttttttttttttttttttttttttaagacagggtccctctctgtcgcgcaagctggagtgcagtcagcggtgctatcgcggctcattgtgagctccggggatcctcccgccttagcatccggtgtagctgagaccacagacatgtgccaccatgccaagctaattttatttatttttttttggagacggagtttcactcttgttgcccaggctggagtgtaatggcatgatctcagctcaccgcaactcccgccccccgggttcaggcgattctcctgcctcagcctcccgagtggctgggattacaggcatgcgccaccatgcccggctaattttgtattttaagtagagacagggtttctccacgttggtcaggctggtctcgaactcccaacctcaggtgatccacccaccttggcctcccaaagtgctgggrttacaggtgtgagccaccgcgcctggcccatgccaagctaattttaaaatttttttgtaagagtgctctgttgcccaggctgatcttgaactcctgggctcaagggatcctcccatctcagcctcccaatatgctgggattacaggtgtgagccacagtgcccagccaaaccatggctatcttgaaaaccacttgtcttccagtccccatgccccgaaattccaaggctctcatccctgaaacctaggactcaggctctccctacctcagccccaggagtctaaacctttaacttcctctttccctgggactaaggagtgctgcaccccaggcgcctcccttaccccacatccctcctcagcctcccctcctcagcctcaghgcatttgctaattcgcctttcctcccctgcagccatgtggctccggagccatcgtcagctctgcctggycttcctgctagtctgtgtcctctctgtaatcttcttcctccatatccatcaagacagctttccacatggcctaggcctgtcgatcctgtgtccagaccgccgcctggtgacacccccagtggccatcttctgcctgccgggtactgcgatgggccccaacgcctcctcttcctgtccccagcaccctgcttccctctccggcacctggactgtctaccccaatggccggtttggtaatcagatgggacagtatgccacgctgctggctctggcccagctcaacggccgccgggcctttatcctgcctgccatgyatgccgccctggccccggtattccgcatcaccctgcccgtgctggccccagaagtggacagccgcacgccgtggcgggagctgcagcttcackactggatgtcggaggagyrmgcggacttgagagatcctttcctgaagcwctctggcttcccctgctcttgsactttcttccaccatctccgggaacagatccgcagagagttcaccctgcacgaccaccttcgggaagaggcgcagagtgtgctgggtcagctccgcctgggccgcacaggggaccgcccgcgcacctttgtcggcgtccacgtgyrccgtggggactatctgcaggttatgcctcagcgctrgaagggtgtggtgggcgacagcgccyacckccggcaggccatggactggttccgggcacggcacgaagcccccgttttcgwggtcaccagcaacggcatggagtgstgtaaagaaaacatcgacacmtccyagggcratgtgacgtttgctggcgatggacaggaggctacaccgtggaaagactttgccctgctcacacagtgcaaccacaccattatgaccattggcaccttcggcttctgggctgyctasctggctggcggagacactgtctacctggccaacttcaccctgccagactctgagttcctgaagatctttaagccggaggcggccttcctgcccragtgsgtgggcattaatgcagacttgtctccactctggacattggctaagccttgagagccagggagactttctgaagtagcctgatctttctagagccagcagtacrtggcttcagaggcctggcatcttctggagaagcttgtggtgttcctgaagcaaatgggtgcccgtatccagagtgattctagttgggagagttggagagaagggggacgtttctggaactgtctgaayattctagaactagcaaaacatcttttcctgatggctggcaggcagttctagaagccacagtgcccacctgctcttcccagcccatatctacagtacttccagatggctgcccccaggaatggggaactctccctctggtctactctagaagaggggttacttctcccctgggtcctccaaagactgaaggagcatatgattgctccagagcaagcattcaccaagtccccttctgtgtttctggagtgattctagagggagacttgttctagagaggaccaggtttgatgcctgtgaagaaccctgcagggcccttatggacaggatggggttctggaaatccagataactaaggtgaagaatctttttagttttttttttttttttttggagacagggtctcgctctgttgcccaggctggagtgcagtggcgtgatcttggctcactgcaacttccgcctcctgtgttcaagcgattctcctgtctcagcctcctgagtagatgggactacaggcacaggccattatgcctggctaatttttgtatttttagtagagacarggtttcaccatgttggccaggatggtctcgatctcctgaccttgtcatccacctgtcttggcctcccaaagtgctgggattactggcatgagccactgtgcccagcccggatatttttttttwaattatttatttatttatttatttattgagacggagtcttgctctgtagcccaggccagagtgcagtggcgcgatctcagctcactgcaagctctgcctcccgggttcatgccattctgcctcagcctcctgagtagctgggactacaggcgcccgccaccacgcccggctaattttttttgtatttttagtagagacggggtttcatcgtgttaaccaggatggtctcgatctcctgacctcgtgatctgcccacctcggcctcccacagtgctgggattaccggcgtgagccaccatgcctggcccggataattttttttaatttttgtagagacgaggtcttgtgatattgcccaggctgttcttcaactcctgggctcaagcagtcctcccaccttggcctcccagaatgctgggtttayagatgtgagccagcacaccgggccaagtgaagaatctaatgaatgtgcaacctaattgtagcatctaatgaatgttccaccattgctggaaaaattgagatggaaaacaaaccatctctagttggccagcgtcttgctctgttcacagtctctggaaaagctggggtagttggtgagcagagcgggactctgtccaacaagccccacagcccctcaaagacttttttttgtttgttttgagcagacaggctaaaatgtgaacgtggggtgagggatcactgccaaaatggtacagcttctggagcagaactttccagggatccagggacacttttttttaaagctcataaactgccaagagctccatatattgggtgtgagttcaggttgcctctyacaatgaaggaagttggtctttgtctgcaggtgggctgctgagggtctgggatctkttttctggaagtgtgcaggtataaacacaccctctgtgcttgtgacaaactggcaggtaccgtgctcattgctaaccactgtctgtccctgaactcccagaaccactacatctggctttgggcaggtctgagataaaacgatctaaaggtaggcagaccctggacccagcctcagatccaggcaggagcacgaggtctggccaaggtggacggggttgtcgagatctcaggagccccttgctgttttttggagggtgaaagaagaaaccttaaacatagtcagctctgatcacatcccctgtctactcatccagaccccatgcctgtaggcttatcagggagttacagttacaattgttacagtactgttcccaactcagctgccacgggtgagagagcaggaggtatgaattaaaagtctacagcactaacccgtgtctctgtagcttttttggagccagagccactgtgtatgtgtgtgtgggtttgtgtgtgtgtgtgtgtgtgtgtgtgtgtaagagagtggaggaaaaggtggggtacttctgaagacttttatttttttttaattaatttattttttttcagagatcgagtcttgctctgtggcccaggctggagtgcagtagtgtgatctcggcccactgcaaactcccacctctcggattctggtgcctcagcctcccaagtagctgggactacagacgttcgccaccatgcccagctaatttttgtatttttagtagagacggggtttcaccatgttagccaggctggcctcgaactcctgacctcagacaatctgcccgcctcggcctcccaaagcgctggaattacaagcgtgagccaccgcgccgggccctgaggatttttattactcgtgattgggagtactgtccctacttagatctgacagccccttgttgctggacttgtgtgagttgtggtccctgtttttctggttccctgtttctatcacacaggagagagagaccttccaggaccctaacgtctgagcccccagttgctcactcctggactgtcagtattggcccccagtcctctcctcccactgggacctccgcgtgggcagaagaggcggaggagggagcggattatcactgaactacatttcccggaaagctatgaggttggcagcgtcagtcagctacagagaaagaggccccagggcattttgggagttgtagtcttagggctaaaatgtccacttcgtggctcgacagccgtttccaaggaccgcggtgggggcggcagcggcctggggggccggatctagcccaaagcctgggtcctggggcaaggggaggggaggaaactgaaggcctgagtccggtccttgactctggaagccagagtagtcaggaggcttcctcttccctagatgctgggaaaattctagtccaaaaaggctgcagcctctgtgacgtcatggagcgatgggcgggacctccctttgttgcagtccaatcagacagagttgagtttctgggtggggccgaggaaaaccccaaggaatatctataaaggaattcgggcccctacgtgagaagctcggagggggtggtttcaggagttccttgtggagaggggatcgtccgtgactcagaccccgtcgaaaagctctcgatttcacgcaaccaaccttaccctcgtccccaacacaatccttgattttacccctgggaaaattagcgtaggtggtcatgaccccggcttcctctttaaaagccctcagaacctggaccgggctcctcaatgaaccctagtgttagaggccacaaatcgggaaycaaggtcggggagcggctgtttagggtgcatcactgttcaggatgcatcggggctcctttttctaagcggaagkgtgcgccctgcaaattgggagcccgttagttttggggaagggtgaacaagggccccctaggtctagaggaccgcatggagtctcgcttaagtgttagtggggtcctcagttctaggaatctggtatgtgttttggttttgaaggagttccgagtttgataatatcgtggttgggtctgtgttagatgtttattggtttgggcattgaatcttcagcttgaggttcaacaggttttggggggctggcgggggagtgcctcggtgttgctcttaagggttggagttcaggctcacgtcaatctggggacttggaaaattccacagtttgggattttgggaaggggcgcatggggttgggagattccaggttcagagtttggggacttatgagtgattcctgtttaatagtttttctgatctctcagttgggggattcagtgagaaccctaaattttgggtcccctggattggggctcagtttcacacttcggaggcatttgatgaaggacataggtcctctttatttggagatttcctgaagatcctcttttcgaggtttgcggaccccatggataggcggcccagtgggatttcttaagatggattttggcttttctccgtttagcgttctcctgctctcggtttggggtgagagcacccttcctaacggtcttcgggaactgtgcgcgccggctgcaatggggccgcattttaccctcctgtgtgcggcgctggccggttgcttgcttcctgccgaggggtgtgttatatgtgacccgtctgtcgtgctggcgctaaagtccctggagaaagattacctgcctggccacctggatgcgaagcatcacaaagccatgatggaaagggtagagaatgccgtgaaggatttccaggaactgtcgcttaatgaggatgcctatatgggggtcgttggtgagggcaggggggaccacggacccctgggtcctgggaaaggagggagataagaccaggggaaggaagaggctgacagcagggtctccgggattcgggaatggagaaggctgagatgcagattccgaggttccccgaggctagtaaatactgttttccctatcctcggctggcaattttatgtaataaaactacaactcccagaaggcaacgggcggctgagtccttaaccaggcctatctttgcccagtggcctcatgggtattgtagtttctaagattaggcgcgccaatgagacagtaaggctggaatctggggttatatctcctctgacagatgaggccacactgcaaaaggggtcctggagtttgctgaaggatctgaaacgcatcacagacagtgatgtaaaaggtaaatgcatcaagggggtgggagtcccgaatctctcagagaagccagcgttagtgatgcctggtctcttggtcagatactaggctgtggacccagaccgcctagattccaatgcctgctctgccacttcctagctgtatggccttgagcaaaggactttgaagctcccttggctttaaaatgcttcctcagttgttcagtttaaatgtgtattgctggccgggcacggtagctcaggcctgtaatcctggcactttggaaggctgaggcaggcagattacttgagctcagtagttcaagaccagcctggccaacatggtgaaaccttgtctctacaaaaaatagacatatgtatacatattagctgggcatggtggtgtgtgcctgtagtcctagctacttggggggttgaggcgggrggattgcttgagtccaggagtttgaggcttcagtgagccacgattacaccacacactccagcctgggtggcagggtaagaccctcccccatcccccaaaatatgcattgcctagcccagcagctggcattatgttagacggtcagttgtagcgccctttcctgagaaggccaggaagtagactgccagactctgcaggcagaagtaaacttccaacacctcacacgtgggattgggggttcctgtgtcttcccaggcgatctcttcgtgaaggagctattttggatgttgcacttgcaaaaggaaacctttgccacctatgttgctcgattccaaaaagagggtgagagaagatgggagtcggtgtcccccagctcctctttccactatccaagagtccttgtctccagccccttacttctccaagcccagttcctcagcttccccaactrcctcctccttcagacccaagtcttttctccctcgaacccaaaagcccaaagcccagctcttcccccaaccccctcttccatcgtctttcatttagaaatctgactctgtcatctctttcttgctctctttttttctcttttgacacagcttattgtcccaacaaatgtggtgagtctggattacagaagttaaccctcatcctgccctctgaatagtcaacctccccactcgcctttttggatcctggtggttttgtcattctctgccttggagaggttcctgggtctccagtattctttctgcaccatggatttcttggggagcaggtcatattctacttacactcttttttttgagacagtctcaccctgtcacccaggctggagtgcagtggcacgatcacggctcactgcaacctccacctcccaggttcaaactattctcctgcctcagccccctgagtagctgggattaccggtgcccgccatcacacccagctaatttttgtattttcagcagagacggggtttcaccatgttggtcaggctagtcttgaactcctgaccttgtgatccgcccgcctcggcctcccaaagtgctgggattacaggagtaagccaccgcatccggcctctacttacaatctttactgagccttgttggagcccacttactacttacctgcgtcctggtcctgtgccttcgtctgaccatctaggaatgtcatagatgacctggccccagcccttagccctgacctctccttttagccatgccccttagtgggcaaatacaagccttgaccctgcccctccaggtgtgatgttgcaaactctgatctggtgcaagaactgcaaaaaggaggttcacgcttgtcgaaagtcctacgattgcgggggtgagagaactggacccagcaggaggaattggtgcaggtggggtggggcgagaggagaggcagtctagagagagcctagatgggggtgtgggggcagtagacaagaaaaggtagggtttaggccaggtgcagtggttcacacctatagtctcgcacttcgagaggctgagacgggaggattgggaagccaggagtttgagaccagcctgggcaacatagcgagactctatctctacaaaaaaatttaaaaattagtcaggtgtggtgttgcgttcctgtagtcccagctacttggaaggctgaggcaggaggattgcttggacccaggagttggagactgcagtaagctatgatcataccactgcactccagcccaggcaaaagagtgagaccttgtctaaaaagaaaaaaaagaggccgggcgcgctggctcacgcctgtagtcccagcactttgggaggccgaggcaggtggatcacaaggtcaggagttcaagaccagcctggccaagatggtgaaaccatcgtttttgtactaaaaatacaaaaaaattagccagacatggtggtgggcacctgtaatcccagctactcaggaggctgaagcagagaattgcttgaactcaggaggcgaaggttgtagtgagataagatcgcgccactgcactccagcctgggtgacagagtgagacttcatctaaaaaaaaaaaaaaaaaaaaagagagagagaaagaaaagagaaaagacgaggttacaacaaatgtaaaggattaggggagggtaaagaaccgtgaaggaggcccggcgcagtgcctcatgcctgtaatcgcagcactttgggatgctgaggcaggcagatcacctgaggtcaggagttccagaccagcctgtccaatatggtgaaaccccatctctactaaaaatacaaaaattagccaggcgtggtggcaagcgcctgtagtcccagatactcaggaggctgaggcaagagaatcgcttgaacccaggaagcggaggttgcagtgagccgagatcgcgccaatgcattccagcctgggcgacagagcgagtctccatctcaaaaacaaaaacaaaaacagaatcatgagtgtcccatggtcatcccccacccccagagcggaatgtggaagttcctcaaatggaagacatgatcctggactgtgagttaaactggcatcaggcttcggaaggcctcactgattacagcttttacagggtgagggcctcaacttctgtaacccttgaactccctagactacaatacttgtgttctggatctatgggcctgcacccacgattctcatgacccaggagggtggtctattaggtgtggtctctacagacctctggggaccccgtgccctgaccagtgacaccctggacactcacctcccacactgaggccctgtgatcttc

SEQ ID NO: 93299 - DNA, 13205 bp, Homo sapiens
gggtcctgccggccctgcctcaggtggtgtgcaactaccgcgatgtgcgcttcgagtccatccggctccctggctgcccgcgcggcgtgaaccccgtggtctcctacgccgtggctctcagctgtcaatgtgcactctgccgccgcagcaccactgactgcgggggtcccaaggaccaccccttgacctgtgatgacccccgcttccaggactcctcttcctcaaaggcccctcccccsagccttccaagtccatcccgactcccggggccctcggacaccccgatcctcccacaataaaggcttctcaatccgcactctggaggtgtctttctgtgggctcagggcaaccacacacacacaggatgggtccagcttccaaaccattttatacagagtcacagtatgagaactctggtagaaaacagtgtggggtcgggggatgacatcgcaactttactctacattgggaaagaaacagaccttaaaattttccagcttgatggccaggtgcgatggctgatgcctgtaatcccagcactttgagaggccaagacaggcgaatcacctgaggttaggagttcaagaccagcctggttaacatggtgaaaccccgtctctactaaaattacataaagaaattagctgggcgtgtaggcgggtgcctgtaatcccagctactctggagggtgaggcaggagaatcgcttgaacccgggaggcggaggttgcagtgagcggagactgtgccattgcactccagcctgggcaaaaagagggaaagtccgtctcaaaaaaaaaaaaaattgtccagtttgagtgggacatgaggttctgactaactcgccgtccccctggctaggatcagggggttattcgtcattgagagcccttgagtagggtcagcaaaatccaacagaagggccccagaagcatgattcagggaggaacagtaagtgggattgtgggcctggctgcagaaggcagcctcaggtttccttgtctgaagaatgggctcgtgggatgagataatgagggttgaggaggcagaggcctagaccaaaagctatttttttttttttttttgagatggagtcttgctctgtcccctaggctggagtgcagtggcatgatctcagctcactgccaccttcacctcctgagttcaagtgattctcctgccttagttgggattacaggtgtgcgccaccatgcctggctactttttatatttttcgatagagacagggttttgccatgttggccaggctggtttcaaactcctaacctcaagttatctgcccgcctctgcctctcaaagtgctgggattacaggagtgagtcatcgtgcccggtgaccaaaagctctatatggtgaagaaatgacaagggaagccagggacagaccacaggagttcacagtagcccttcacctatgacccctattacccatctccctacatgtgttgccaacacacagacatacagacacacacacactcactctctctctctctctctggtccacaggacttcacaatagcccttcacctattacccatctccccacatgtgttgccaacacacagacagacacacacacacacacacactctgtctctctctctctctctctctttctctctgtctgggacagaccacaggacttcacaatagccctttacctattacccatctccccacatgtgttgccaacacacagacacagacacacacacacactctctctctctcactttctctccccctctctctctctcaggtccagctttgagcaaaggacataggcaccccctccaccaatctgtacagaccaggcccctcggcagggaggggtgtggctgcctccgtttctacatctccttgttaccatctctgattttgctcttttttgccgcctttctctctgtctctaacttccggtggctctagcctctgggtgagtactaatagctccgtttccagcgtggtctgtgtcttcctccctgtctctctcctctcttgtatttctttctcactcatcaaagcccatgtttttcgctatggtccggtgcacttctctgtgggtgcctccctgtttccacaccccgcctacccaggtggaacttttcaagccaatcaaaggcaggcaggacagccaatgctagtgctgattacttcagcacgtgcatgcagggagggtcggggagccccggggatgtmtggaaatcgttaccctgaggtgggcaggcctggtagagggaggaagcagccaggagcatctgggccctggaagaaaggggggtgtttctcatggatgtcctgagttgctaggtgcagcgcaggggtctctgtctctctgtctggatctctgacacctccaggtccctgtccctctttttgggtttctctctcccccaccccctgggtctctgaaatactgaacttctccttccctttccaccctcctatctttgagtctccattccccctccttgtgtttctttgtacccctcttggggtccctgtctctgggtctctttctcattccatccatccaggtgcctgcaggcccttgattgactaggttctgggtgggcgggttctgtcacctggggcaacaaccacaataagccagctcctgcttggctacggagtgggggtggaaccatggccagtggcaccctggctccgggctgtcgtatctctgcaaccgaggtacctggatccaggcccaactgccatctcaccagcagctacttttcccaccgcattatcccacccatacccttcaccccgcccacggtgcaggtgagcggaccctacgctgcagccctgccgggcctggagacccagaaagataggggctaaataaagcggattgggagcttggactcctctctgaaggaggagggtcctggagttctgggtctgagagaggaggcaccagggaagctgaatgccagggactgcagaggaaagggctgggggccgactggaagaggtcagagtttggggtggggggtgatagggactcctgagtctttctagctgatgtgcggcgccttctctccagtccacggtcgcggaccctctaccccaagttgcaaagcaggattctcacaactgggctttcgacgaggtcctcagcagatgggagacaacctctggctcggcctacgtgcccaagacccatggcgggccctgcgcccagcccagagccccagagcctgcagaccccacgcggactgtggggatcaaggattyaggagaaaaggtaaagtttggggagtgccggagtccgcaggggacagggcgggggactgcatttgagtcccctgctccttcacgtgagtctctgggtcgcctttccgcagctcagacaccgcggctggcgcctcccactgaccacaaagtaccagagcagcgagacgagggcgcagtacactggctctcccagcggggacccgcgcgccccggaatacttcgggccccagcccccacaactcgcagaccaccaccgcgggggtccttcccaggtgtctgggtggaagccggcgccggcgagacggggcggagctccgggagcctggggcggggccagaaggaatcacggctttggggcgtggctaaagggtctggggcgggatcgcgaggttagaggagccgggggaggggctgggcattaggccaggccagaaggaccagggactacaaactcaccttcagggctcctaagctgctgcggagctagacggcgggctgtgggtggggaggagactagaatattctgagacggggtcaggtgggagttgggagaggtaacttggagttgctgcccaagatgcagctcagctccagtggccacaccaagacggtttaagacagagcggaaccagggaggttgtttttggtggctgggggcttgggtttgagttccttgaacagcagaaggtgcttggatttagggaggtgaggctgggaagggttcgggtatgagaaaggaagctgaagttccctggcgtgggtggcaggaagggctctaaccctggggcggggtgtgagggccgtggccgtcatggctgtcgaggccgaaggagagggattctgaactcgggacccagggcttgggatggggtatgaaatctatgtcttgggtatgcctcctcccccaatcttgctcaggctctaattgcctggacgaagaaccccgagctgtctggccggcctttcacagtatccgaccggggcgtcctggaccgccgccagctctatctgaccacctcggcgcgggactttcggttctatcccaagtaagccgggctctcgctcggcaccgcctcctgcacagcccccgccgtggccggtgcacgccgagcccctgggctggctcccattccctgagccggtggtctcagcctcgacttctgtagcagcaagaaccaaagttcaggcctcagcccctcccttttttttttaagcacccaggagtccttagtgtcacctctcaggaaccgcggtagggacaggaagcctgcacagcggctcgaggggattccggatctgagggcagggcctccttcggtacttgagcccccagatactccttcccaaggaagcgaaagtccccttttacttccctaggatgcgaaagctcagtttccaggacgttaagtacctcgaggacccaggaacgcaggcaacgcgtgccgggtcgcgtccttcctaaggggtgctcgcctggaaatgcaggagtttgaatgtgcagactccttagatcccgaggtctgaaactcgtccccaaggatccagctgtatcctcaccatcccgccctgctcccacaggacggagctgtccggatacccccgcaaggactccctgacctactggagcttcgaagagacgccccaggtctggagccacggcccgcagcggccgccctgtccgcgctcctcccggccgccccgaccaccgcgggtccgcgtgccgcgcgtcagcccggtgacctcggccatgccgcaccggggagccctgtctctggctcaggagtcctacagccccctgctgcacccgctccggcggctcgaccgcttctgcccgctggaggcgccctggggcggcccgcactggaagcccctgcggggcatctacagcgtgccgaaagcctacagtaccgagaactccagctatggcagcttgaagccggcgctggtgtgagccgtcagggccagccccaccccagacccgcccccagggccgcgctgccgagcggagctcgggacctccgctcactaggaagggttccggacccagcctgagtcgcactcattacgtctattggcaacgtgggggcgggactagcccagacacccactcagctgcggcatcacggagaggggactaagtccagataatgtccttgcaggctgtggccccgggggcaagacacgcaccctgcgggcgtattaaataatgagttaaatcacctgaaccacacccacttccggggacgctccgggcatcctggcttgagggtagggtgggcggaggtycctaagggagaggtggggctcgggcttaatccctccttgggggcayctgggtcaagtggcttccctggcagcacagtcacggggagaccctctctcactgggcagaagctaagtccgaagcagcgcccctcctgttaggttggactgtggtgcaggaaagcctcaagtggagggttgaggcttcagtccagcacctttctcgggtcatggcctcctcctggctcccaagaccccacaattggcagaggcaggccttcctacaccctactccctgtgcttccaggctcgactagtccctagcactcgacaactgagtctctgaggtcacttcaccgtggtctctgcctcacctctggcgctagaccactgaggggagagggctggggcactctgctgagccactcctgcgcctccctggccatgtgcacctctcgcccccsgggggattagtgtccaggttaccccagcatcctatcacctcctggtggccttgccgcccccacaaccccgaggtatawagccagatacacgaggcaggggatgcaccaaggatggagatgctccaggtaagactrcagggcccctgggcaccttccacctccttccaggccatcactggcatgagaaggggcagacccgtgtgagctgtggaaggaggcctctttctggaggggcrtgacccccagtaagcttcaggtggggcagttcctgagggtggggatctgaaatgttggggcatctcaggtcctctgggctgtggggtgggctctgaaaggcaggtgtccgggtggtgggtcctgaataggagatgccrggaagggtctctgggtctttgtgggtggtgtaccacgcgggatgggaaggccaggactcggggctgcggtctcagaccygggtgaagcagtgtccttgtcccaggggctgctgctgttgctgctgctgagcatgggcggggcatgggcatccagggagccgcttcggccayggtgccrccccatcaatgccaycctggctgtsgagaaggagggctgcccmgtgtgcatcaccgtcaacaccaccatctgtgccggctactgccccaccatggtgagctgccyggggccaggggcagatgctgccacctcagggccagacccacagaggcagcrggggaggaagggtggtctgcctctctggcctgcggttggggaatggggtgtgggaaggcaggaacagagggcttcctgggctcctgagtccaggacctgtggggtcagcttgggagctcagctgaggcgctggcctcaggcacatgctcattcccccactcacacggcctccagatgcgcgtgctgcaggcggtcctgccgcccctgcctcrggtggtgtgcacctaccgtgatgtgcgcttcgagtccatccggctccctggctgcccgcgtggygtggaccccgtggtctccttccctgtggctctcagctgtcgctgtggaccctgccgccgcagcacctctgactgtgggrgtcccaaagaccaccccttgacctgtgaccacccccaactctcaggcctcctcttcctctaaagaccctccccgcagccttccaagtccatcccgactcctggagccctgacaccccgatcctcccacaataaaggcttctcaatcygcactctggcggtgtctttctgtgggctcagggcaaccacacatacacagggtgggtgcagcttcccaaccattttatacagagtcacagtgtcagaactctggtggaaaacagggtggggtcgggggatgacatccaactcaggaggtgtccatggtctcgccttctgtggggagaaggagggccacatggtcagtgtcgcccaggtggcagggcctgagccttctacgccgagctccctcttcctccctctgaggttggctctggcagtgcaggtgcggggtggggattcttactgagttcgttgaagaggaaggcgtcctggtactccttcatgtactgcgtggagcgggactcgtccaggaagagtgagtagacccgcttgatgtcatccacctgcacttctgtaccctggagggggagggcgagtcctcagttgggcccctctccgtgaggctcaaggcacagaccccagcgtatgccacctccatgctctaggcagcagagtgtggcatgtgaggggagggcattctgggccagattgcctgggttcaaatcctgcctggccatctccttgttgtgggcccagcctcttcattcctcagtttctttatctgtaaggtggacctaacagcatctacttaagtcaagagagatttactgacacctactataggccaggctggatgatacagaagccaacctgagggatgaaaattccctgcgtctgaaaacgtacattctaggatgaaatcagaaccctggaagcccctgaagtactgtgtcactcactgccgccatctggccctgctggctaattcggccggctgaccttgcgtttccggcacaccaagctggcagctgtgatgagctggatggcgtagcgcagtgacgtctccagcccgatgcgggtcagcaccgtgtaggcgtcctcactcatctccacatcttcttcctcgcacctgcaagcagtgggggacaggggtggctcagccggggcccagcctctgactgcagcagaagtggccacagcaaccctctggcccttccccactgggaatatgtggcgcctgcatcttagaaccatagaatgctgaggctagaagagccacggagacaggggctgggctggacctaaaaccgaggcctcctgaccacccccagggcgctggccccaacaccagtcacgggtacctcgcctccctttcccaccgtggctcctgctcccggatcggaggccaccgtctgggtgcccgctcagccctctctcctgtaggcccagccaccatgccactccgctggacctcagtgtcagcatttgtcaaacagggtagaccccagccctgcgtctcaggcgcacggcctggtcctgcccgcaccggatgcggaggatctgcttcgtgtctttctcgctgtagggggtggtggagacgataagcagccggtccagcaggtctatggggatgccgtgagggctctggtagctggtgccccggattctgaggaagaggcagaaagagggggctgtcaggggcatgttccctcttcattccctttgctgggaacactctcacctcccatcgccacccactcactgggcccaacaccacttaacctttagctcgcgtctcctgtcacatgatgacatcacccctgatgacgcagccttccacagctgcgtcagtcccccaagggcacctttccgcggagctgggctgctttaagctagatctctgcctccaggattactggatcaaggtcccactcccgtgctcgacacaaagcttcacaaaggaggggactgcacctgtcttgttccctgctgcagcggggccagcccagggctggtgccaggggatacagtcagttccccttattcacagtagtgaggttctagaaagtcatcgtgaacactccaattagctgatcctgagccactgctcctactggaatacagggttaggctctctcgagcctcggcttacagtattttcatcaatccatatatatataatctgggtctatgcgtattttcatttgtgtgtttctggtctttttggtttgttttttgagacggagtctcgctctgttgcgaggctggagtgcagtggcgcgatctcggctcactgcaacctccgcctcccgggttcaaccgatcctcctgcctcagcctcccaagtagctgggtctacaggcgcacgccatcacgcccagctagttttttctatttttaatacagacagggtttcaccatgttggccgggacggtctcattctcttgacctcgtgatccacccacctcggcctcccaaagtgctgggattacaggtgtgagctaccgcgcctggcctcatgtatgtgtgtttctatttccatgtgtttgttatgtaacatcactgtttattctctaacatggagctcgtgtcaacagcattctaacttgggctcagcgaagcgtctgtaacatggcattttctccgtcaggcttcacagcctccttgcacttaggatactagacagcacttcaacactgtgcacaggggacactttaaatggcaatatcaccaacaaatggccccaaaaagtttaaaaaaaaaaggcacaaaaaaagtgacaacactttgggaggctgaggcgggtggattgcttgagcccaggagtttgagaccagcctgggcaacatggcaaaacaccatctctacaaaaaaaaaaaaaaaattaggccggacgcggtgactcacccctgtaatctcaacactttgggaggctgaggtgggcagatcacgaggtcaggagttcgagaccagcctggccaatatggtgaaaccctgtctctactaaaaataccaaaattagctgggcatggtggcgggtgcccataatcccagctactcaggaggctgaggcaggaaaactgcttgaacccagaaggcagaggttgcagtgagccgagatcgtgccactgcactccagcctggtgacagagctagactccgtctcaaaacaaaaacagaaattagctaggcatagtggtgcatgcccgtggtcccagctgatgaggaggctgaggccagaggactgattgagtcccaggggtggtgtgtgtgtgtgtgtgtgtgtgtgtgtgtgtgtgtgtgtgtggtgggcactgaggctgcagtgtgccatgatcgtgcctctgcactccagcctgggcgacagagcaagaccctgtctcaaagaacaaaagtgacaaacgtagcactaaatagaatacaacaaggacacttatttacagcatgagcgctaagggagcaggcagtgttgcctcgttcacactcagctgggaaagtgggtgtcaggtgacttgaatttgttgccgaaagcagggcagatatttatttggggattacaaataaatcttagcaagcgagattctcagatacagagtctacgaacaatcagggctgcccgtagctgctgcctcccacaggaggtgcccctgggcagtccccaggccctgacctgcagtttctgtgaaaacaccatcagccctgggggtctcttccagtgtccagccatccagagaccaaattacggccctgctaccttctagacttgtgacctgggcaagtcactgggcctcactgtcctgccctataaaatggggctgaggtgatatctaccttctgagcttcttctgcggatccaaggagttaaaagagccaaacacagagccaggcccagcggcccagcatcctctgtagggtgcccgcttcttcccttttgtgatgcccatcccaaccgcccagtttcagctgggcccaaggctgcagggctggagctgacagtacccagccttctttgccaccaggtacagcactgagcccaagcagtgccgggcaatggaatgggggtgcaaggttggggtgcagcctgtggatcacagcctatgggggctgcctgccctccacacccccctgcttcctgcgggccaaaatgtggcgaggtggagaagacagccagcgggcatggtggcaggtgcccgtaatcccagctacacagggtgctggcaacacctgggagacgaggttcccaggcttcagcagagcacggtaccctctgtgtcatgggaatctgtccctggcatccttaggccaaacacaacgctaagagttctattaatggagttgctgggtcgaagtgactgaacaatcgtagtttatgttatgtctaacagatgtcactgtgcttccctcaagactagaaaacatcccacagcactcctgtgagtttcctgcagcaccctggggtgcctcggcatgcagtttgaagactgcagccttgggggctaaaggagcagcaagacagaaaggcagcaagaacacagtctctgggcttcctcgggaagcagagctgcctcccacccgccttttgtaagcaaagagcgcacactgcagtcacgcgtccctccctgacccggtgtcaacacaggctcccattgaccctctgaccacacccactgcccagagcatcctgttttccccagaggcccctgtagccggctcaccgcgtgatgccacggttggtggccatgatcaggacaggcgccatgtcactctccagggcccggttgaggaaggagaagctctcgatgtccagcatgtggacctcgtcgatgaacagcaccttggattggggtgtgtgtgagagtcaccacccgcgtccccacttccccggcccacctccaccccaccacccgccccggccatgtcctgggtcctcactccagggatgatctccgccttgccctcctcgcgccactcagccaccttggcattgatctgctcacggacttctgacttgatctcccctgtgtcacctatgggaggcacaggttgcatcagggaagccagagaggaggcgggttccagggccagagtgtggctaagacagagaaggatgatgccagggatggaggaaggggagcaaagcaaggagggatgaggagcctgaaacatccccaaagaggaggaacagaggcagagaacacaggaggggagagggcagggccacacccatcacagcaccagcaggggtggggacggagcggacttgcaggtggagaasagaggcagccacgggccggagttacaggaaacagcgtggagcaggtgggccacactcggagctcaggaacagagggagcccgagggaggctgctaggcctggggcagggcagggcagggcagggcaggaggggcctcacctgagaagagcgccaggaagccctgggtgcgagagttgatgacgtcgatctcgtgcagggacacggtgtgcaccacctccttgcgtttctggagctccccatctgggcactgcacgaacttggtctatggggcgggggtgggggaagaacggcggagacagggcagggaagggcatgaagggggcccctaaagccctctgtctgggggagactggagctccaggaaatggagctgggaggctaaatggggtcatctggaaaccccaggcccaggaggtagtcaggactagggacattccagagcgctgagggtcacgggggctcccggaggacctcagaagccacaggccacatgtggccatgcgaagctatagtgccaggctgaggggccctgctgtcctagggttacagggaagacccaggagtaccaggacaaacagtcagggtaacaggaagatccagaccccatgggtcaagggggtgatggaggagatgaaaacaccccagtgctgggggcgaggggatcccgggagtcccggccgcacctgggagcccatagcgtcgtagtcgcgggcgcgtgtgaaggagcggcccarcttggagatcttgcccgtcgccttgtcgatggtgatcacgtccctacagggggatggggggtagggtaaggaaaggaatgggcccaagctcgcccatccccctggctgcctggcatggcccctgactgctcacccggcctggaccttgtccttggtcagg

SEQ ID NO: 93300 - DNA, 140211 bp, Homo sapiens
  misc_feature (1)...(140211): n = A,T,C or G
aacgctgtgttataaaaattaaggaaacagaggaaatatttgtggggtaagccaagattttccttagacagcaattttggatctattccaatagaaatatgagggcaatgtgactccaaaggtttttgccgttgaacacaacttgggaatgctttagcccagaaaatctatgaagcagctgttagcaaatacctacctaatacagtcattttaatcagaaaaaaaacctcataaaatatctaacctcaaaaaatgaaacttgtgacatctataagataaactattgtaaaactaacgcctcctagacggtaagcaatttgatctacggtgcagcacagatagcccaaaagttggttaagcgccgcagactgtctcaacgataacagttttaacaattttagttctgctgcagctgatctgaggccaccaatatttctgtcagtaattcaatcagaagccacttggctatttaacttccttccctccttaacccaaaaacgtatacaacaaagttcattcattttttccccattctgtctttcataagagaggtgacagaatcccacgtccagttcatccaaagatagtatcaagttattgaaaggcaacttaaaataaggaagaaggaaggtacagaacatatttatgttttgtgtactttctcacctttcaaaaaagtgatcatttttgtgagttctaattctcacattggctttgagtatcagttctgtgtaagcataagtagccaaaaaataaagatgaattcatgtaattgcccacaatagatatatttgaggaattttcaagaaaagatgcaaatatgcaatgagatgttgtttctgatgaaattcttcacaaggtgataaaatatataatcctattcagtagagaaaagtttgcttgaagtctgttctttctttgcctaaagtctggtctggaaatcctgaaatgataatcagaaggaaaatgctttttaaatggaataatttgtaacctagtactagattgatgattttgaggaagtgaaaagttgtcctttttttttttttttttgagacggagtctcactttgtcacccagtctagaatgcagctgtgtgatcttggctcactgcaagctctgcctcccgggttcacaccattctcctgcctcagcctcctgagtagctgggactacaggtgcctgccaccacgcccggctaattttttttatatttttagtaaagacggggtttcaccatgttagccaggatggtctcgatctcctgacctcgtgatccacctgcctcagcctcccaaagtgctgggattacaggcgtgagccactgcacccagccaaaagttgtccttttaaaaaatgagatagagcagattctgatgcccatctgatagctccatcactatagaaatatttagggcaacagattggcgaggctgtgtccttcaagcagactgacccttgaagagttctgaaaggcacacaacaggaagtgccctggatctaaatgatggtgaccaccggtctcactgcatagtttgggatctactaaagttattcagtgtgcttggctctatatcactttgatgtttttctccatatactcggtcgttggctttcttagttcattttacatttactgagtactccttagacgctgtgggtaccagaatgaatgagccacaaatgtcgaccttaacaagatcatagtctgtgcttcctattgatggtccaagatgttctcatcaagaaaaacagccctctttgttttgtctgtgttatagctgagaatactgtactgaactaggagatgtttttctcttgggaatgatcatgtctcacagtataactagcacagaattacattaacaagtttactcaacaataagaaccatatttaccatttattcagtggttgttatgagatgctggtaaacttactctctcggagtttctgttacttcacttggtacagcttaactttccagtttccctgcatcacagcacagcttcctgtaacagtttgttacttctggttctttgccagtccagcacttttcaacttaatgtttcactcttgcaataacttcctatctgacctttcttctctctccaacctatcacatatagtgtcaatggactagtactctgatttcatcctgccattaacctgatcagaaaattccagagattgcccatttcctgtaaactcttatgactagacagaaactcaccccacactatgcctccccttacttacccaatctcacctcttattacaccaagttagttgtacctcaaacatcttgagctttcttgactctgtatttgctcctgcatttcttcctgttggaaagtctttccctcctaccttcatcctcccacttcaagttcagcttaaattcagctcctttcttctgaagccttccccaactgctattgctcacatcaattttctgaaatgagtgtctactgtcagtatagttctttaggacttaatcccatactgacttggattgttatttaactgattcccctctgcaacttctttttctaactagattttaaactacccagggaaaagaggctcaccttaaaagttgcctttgcgtctcctcctagttttaggcagttgttatgcatacatttgatgctcaacacatgtaagaaataagtgtggattgaatgaattaccactggctccaagcatttttttccctttcctttatagctggtgcctgccttcttaagtccttaagttctgtatttagccatctcaatgtttttcaaacctttctaaccataaccaataggaggaaattgcttttatattgtgacctgatgtacatgtgtatgaaaaattcacaaaacaatacgtgtaagtacttactctgtgtcatgtattctgctgttttctattctattttttaaaatacagatcatgacacactaaactgatttcaccaccaggtggttatacttacagtattgttggggctcagaaatcaacatcccaagtatagtgttttgacatgctgaactgaagaagccgcaaaatctctctggcctcccctctttgctccaccatctctcccaaagcacaagatgaagttgaagttcctttatctgcccaagatctagacccatcaaaaggaataattgtttttccttcccttcctgtaagaccaagaatgtaatcacacctaatagaccctttgacaaaataacatacaagttaattaatctctgttccctgatccattcatcttccctagtaacttcctcaacagaattcctcttctccccactcccataacctgttttgccaggatggtatattagcttgtcaaccacttagggggttggcaatcactctatgattctccccatgtgcacactgtgtgcacattaagtttatatgccttttctctaatctgcctttttcaagttgatttttcttcaaatcttcagagggccaaggggagagctttcccttgacccctgcagtataaaaacgctctcctatcttatgctccttgtaagaacatgaggtgtatagtactgctcttaaaaaaatgcttaaaatggccgggcacggtggctaacgcctgtaatcccagcactgtgggaggccgtggcaggtggatcacgaggccaagagatcaagaccatcctggacaacatgctgaaaccccatctctactaaaaatacaaaaattagctgggcatggtggcgcacctgcagtcccagctactcggctactcgggaggctgaggcagaagaatcgcttgaacccaggagacgaagggtgcagtgagccgagatcaggccactccactccagcctgccgacagagcgagactccgtctccaaaaaaaaaaaaaaaaaaaggcttcaaacactacctgggctgctcattctgttcctgacagtttgagcttcaatttgatctttacatagttaccctgagattacttcttaccatattccaccagagcactaggaatcaagcccttccttctcccaacttcttccttttgaaatttggggcacaattaaataatgatacacaaagtattctccagatcgctatttcttatgttatcttgaaaaattttagcggcatataaataaaaatttccaggcctaatttgtaatcaaaccatttgcagatgaataaaagtaggcatggccatatttttatttttggacgtagcttaagaacatgagcactattgcctgacaatccagaatctgaatcctagctttgccaaattagtgtgagcctccatttctgcatctatacaaaacgggaataatacctacttcaagggattgattggagttaaattacagcatacaagtaaagaacttgatacaggacctgggtgctccatgaatggacacagtgctccatgaatggcagtaaggttttgtcactaaatatatctcaaaacttccttttagggtcataaagtaaggtttagccacaagaataaaagtaagatgacttttcaaatatctagctattttttgaagttggatgatttataatataaaattccatgttggttttacagatcataaatatccccaaagaaagattctatttgtggtgctggataagcattatatagtaagaaatgtctactgaaactagaagattgaggatgcatattcaacgacctgcctagtcatgctaatctcatttagatttgttcttgcttaattttttttttttttttttttttgagacggagtctccttctgccgcccaggctggagtgcagtggcgccatctcggctcactgcaagctctgcctcccgggttcacgtcattctcctgcctcagcctcccgagtagctgggactacaggcgaccgccaccacgctcggctaatgttttgtattttttagtagagatggggtttcgccatgttagccaggaaggtctcgatctcctgacctcgtgatccacccgcctcggcctcccaaagtgctgggattacatgggattacaggcgtgagccaccgcgcccggccgcttaatttttttttttttaaccacaaacgtctgtcggtgaagtgtgctttaattcagcaaaaatacagcattcaatacatatacataacacaatatgtatacggggctgcttttaaacaacgccaaacctttaagtcaaagccttgttccagttgcttgtatattccttctgagcttgtcatccacacacttttttaacctaggtcaagttactgctacgggtgtttttgattgcagaagtttggcagttagcagtaaagaactacctttttatacaaattatcttcccctgaacctgtccaatttagcacacggcaagacagaatatctcatccattcgcctagaaacacgggtccaggctgtaccaggctcaggggacttgcaacgctttcgaatcacttaatgggtgtgatcaagatttccctagccccgtctcagccatttgctaaagaagaggcctgacttgtgttgagacgaaagctcttacagcttgatggaacccaaactgggacttctggggggattaactttcagtcacatacgttcaggactgtgcgtatgcgtgtcgggagacgcgtgaaccaaagaagccacagagcccgaaaaagacctgcaacaggaggtagagaccgaggaatcggccccaagctgcagactccggagatggccagacccacagacacgacttaatcccactcccagaacggggaggagggtggcagtggacagaaacagcgttcgagaacccggcacctttccacgctcgcttcttcccggacccacaacacagaaaccccccaactcggaacggcggcggggcgcgccaggcccccctcggtccgcgcaccccctttcgtcacgtccgggggcgggccggggcgccgggggcggtcccgggtggagccggggggccgggcggggcggggcgggggtggggttgcgggggtgctttgggtgacaacggtcaataatgaaggtggctgcggcgcggcggcaggctcagctgcgccgggcgggggcggcgccggggccgcgcctgtaggactcggggccgacgccgcgggatggggacgcggcgcggggagtgaggcagtggcggcggcggcggtaagcggaacttcggcccgaggggctcgcccgctcccgcctctgtcttgtcggcctccacctgcagccccgcggcccccgcgccccgcgggacccggacggcgacgacgggggaatgtggcgctggatccggcagcagctggtaggtgcccccgcccctccacctccattcgtccgcccccgcggggcctctcggcccggggtggcggggaaaggccggcggcgcggagccgggaggccagggcgtgggcgcccggctaggccgcagcggagacgggcgcggggcccagagccggagaagccccgtgcggctcccgggctcgtctcgcctccaagcccgggccgccgaggctggcgccgagcggccggaggcggccgcttctagccggcgcttctccgttacttcttcccccttgccgctccggggctgctgtggccagaggcgggagtcccgagcggggtggcggtgcccccagaggaaacagggcgagggagctgagcgagagtaggtcttggggagatgagagaggcgtgctcttcctgcctcgaacaatttgggacgtgtttgggtgaaggggaagcgaagaacctgtcttctgcccccactcgtcacggacttctggaagcgtgtcacgatccagagctgtgttgattcccgaggaggaggctgtcgtaggtgtctagccccctcagcgagagacgtttctccccaggacctggaaaggggaaagactgtgccagctgccggtctagcttcggaaacgatacgtattgtacgatagttacgaacgatacgtactgtcgtttccttcctacctcgtcctcaccccaccccgagtgaaacttttcgagtgtgaaccttacttttttcccgttctcctcaaggcagtttgaacgacacaggtttggaaggaatagttaactctccagtattattggaacatctggacaccaccaacaaaaaatcttagaaaagggtcatttaaggcctataaaaagtgccacctttcccagaattaattcagagagaaaaatcttatctgcctcctggcagctacagcgcagaaagtacagcattaaggcagctgtgacaattaggacagaaattgcccctggctgaagaagcctaaccttatctgtgtgatgaggccggttactatttaatttctaaatcgcattaacttaatgcttctacaagttggcgttttcatttactaattctaaaggcagtggtaaaatttagtgaaacaggaactatttttgtgggacgaaagcactgataactctttttcccttctgctctagaaaagcattttaacgttaagaccaagaagtgtggtgtttcagagccagccttctgttacttcgttttgcagcgggcatcattctcaaaaaaaaaaaaaaattataaataagaactgcctaccactccctcctacaaatgttgggtctctgtttttagcattgtaaattcagatatcccagatatatgctttattaggaaaccaagctaatgatgtcattataataccatcttgtaatactttggctttgttgcagtaagctgtagcacagtaattttactcagaaagttaattattacagatttgatcttatgcttttgatttgccaaatcttcttgtatagagggctgatttacctgatggtgtttttgtgtggtaggaagatcattttaaagtggttctcttgaagcttttttaaaaatgtattgagacatcctttctcactgttaggtattttttagccagaataaaatcctggttgtataaccatgctcatcttcaagacagaaaacctggtaatgttttttaaaatggcttcaaatgaacccagctaaaaggaagggccggaagttgtgtgtggttattttacaaggcagccgtcttaacagggatggctaacgagttgaacaagttcctgtgcataaaaaatgctatctctgacatttagttgctcacctcactggttttaagttatcagatcctctaagtatgtaatcatacttgggccaatgtaggactttgtgtctctggttaagtttgtatgatcacataaattaaacatcaaggaccctggatacagagtaatgaaagtatattttgctatcccagtcatagacagctattctgattactgcaccagaaattattcaactcaggtaaaagctagtttagattatacttccagtggcttaatggattgaatcaccacgactttcagcaatgggtttattttaaaatgcagataactaggacaaattgggggaaattgacaagcaaatcctaaggacaggttggagttataagcatatttaattcgttatatgaatcccgattttcaactaatgtctcacaaaaaagtccttttattacagaaacaatgcctatgttctagtaatttctttttaattaaaaaaaagtgtgactccttatgacaaaatattttcactacttgagaagatggaaaaatcagaaagttgacagaagcttgatcttttctattgggaaagtaggctgaaaataaaaagattggaatatccttttttgtttttctttttggcacacaatgttaaagttacttgacactaagaaaattctcttatggtgtctttgtggtacagttagtattattcaaagtatactcattttcagtaccatattttatgtattaactcattagagatgacaataccttgattataattatggaaatgccattagctactcactgtattctaatatttagacctgtacggtagccattagccacaagtggccattaaaattaaaattggagccatatgtgggtattaaaattaaaatttgaattcatgtgtctattggctgccattggctgccatattggacagttcatattttcattatcacagaaaattctattggacagcaccaatttagacttttaaatgaaagtctgtgtcagtacatatttgaatgtaatactacatttttaaagcacttgctgtgtgctggtattaacagatgctgaataccggggatacaaatgttggtcagggtcacacatactctacataagtagacattggatacatgttgctgaacaaataattaatagatgaggaaagaaagaatgaatctgtagtgttgtttctgtgtttagagacaaaaatgaccaaatttaagattgactagcccagaaaacagttagaaaatgagtaattacacaaaaacagtattactaggataactgtttcttaaactgttccataaatgtaatccctttagattgtattggcgatggtggtaggaggctgctaagattgtcttctgattaactgagaaaaatgagaaggtcttaatctgaactccctcaactttctgttcttcctcacactcaccgaacttgcttatattttatactggtacttaattcttcccttcacagtcacaaggaagatgcaaccctcttttccaagataacaattccacttaagcttttgatccttttctttcattctgctgtccatactccatcagttatcattagtatgtttcttttctttctctttactttttctcttaacttgtgaacatgttcaagcctctctgctactttttcctgtacctgtaactggcaaattctttttaattttctgaaaaacagatctataaaactgtgctggctgatgtatttggaatgtggctagtttgagtagagttattcttacgtataaaatacacattggatttcaaaaacagtattaaaaaatgtaaaacctggccgggcaaggtggctcattcctgtaatcccagtactttgggaggccgagacaggcagatcacctgaggtcaggagttcgagaccagcctggccaacatggtgaaacctcatctctactaaaaatccgaaaatttgcctggcgtggtgatgggcacctgtaatcccagctactcaggaggctgaagcagcagaatcacttgaacgtgggaggcaaaggttgcagtaagccaagatcatgccactggactcyagcctgggtgacagagggagactctgtctcaaaaaagaaaaaagaaaaaagaaaaaagaactctcatttttttgttagttacatgttgagatattataatattttacatatataggtaaagtaaaataaatttttggaattttgtttctttttactttttttaaagtggttagaaattttaaagttacctacgtgacttgcatctgttgctcatgttctatttctattagtgctgctgtataacattaaaagtgaattcctgtatcctggtaagaatagtgagatcctgtctctaggaaagaaaaaaaaattagctgggcattgtggtactgacttgtagtctcagctgcttggaaggttagggtgggaaggtcacttgacccaagtagtttgaggctgcagtgagccatgatcatgccaccacactctagcctgggtgacagagtgagaccgtctgaaaagaatagtgagctcctgtttttacagaacacattgtggaagtctagatatctcacttactagactagactgtaaatatcttaggataagaaccatatcttacttgtatttatattccttacactcaagacagcagttggcccattgtargtattcacctgccaaatgttggttgaataaatgaatgagtatcagatctaattcagcatcagtttgaaaatacctgcattctctgcctcttttccaaggaatgaatgaaggaatagaaaaaggaagcactggcctagggtggtattttttttgtggataagttttaacctcaagaattaatgtttaagaacctagatctgtgagtatgtgctgctttatctctattttcagacatatattcttagatacgcagttttgcatttggttaggaagaggataaagcattagaggaaactcargtattcccagcaacactgaagtagggaccttgctccagatcctctaaagagccttatgattaccattattgtcattaaatgttttctagacctgtgctattcaacatggtatccacatatggctgtcgaaatgtaggcacttgaagtgtgtctactctgaattgagatgtgtgtgaatgaaatatgcagtggatcttgaagacttagtttggaaaaaggatgtaaaatatctcattcattttctaattgattacatgttgaaattatattgggttatataaatatacatgtatttggttaaatattaaatgctacttgtttatttttacctttttttaaatgtggaaactaagaaaattaacatatgtggcttaggccatatttctgttctacagcattgttttagattatggtaacaatatataatgcctggcataggcagattcaagaaagtttttgattctaaggactttatgactttacccaggctttttttctgtgagttttctattttcagagtgttggtctgcattatatctaagagactagaagctgcctgatagactaactgcatctggtcccttggaaataatttatcaagtcaacatcgactgctgtggggttctagatttagccatgctgtttattcttcattttgtttctgcagttgtctgagtgctgatctttctttctttctttcttttttttttttggagacagtttcgctctttcgcccaggcggagtgcagttgcgcgatctcagctcactgcaagttcgcctcctgggttcccaccattctcctgcctcagcctccggagtagctgggactacaggcgcccaccaccacgcccagctaattttttgtatttttagtagagatggggtttctccgtgttaccaggatggtctcgatctcctgacctcatgatccgcccgcctcggcctccggaagtgctgggattacaggcgtcagccaccatgcccggcccgagtgctgatcattctaagcaagataatattcataattagcttagtttttactagaaatgtgcatttttattgtttaattttaatttttttattctcaaaaggaagtaaacgtgtattttttaaaaaatatcaaaatgaaactcaagatttgagtttataaacatagttgaaagattttattctcagatattctttattttgctttttttcctggagtttctctgttataaaatttagtataagaaaaacattctaggccaggtgtggtggctcaaacctgtaacctcggcactttgggagacacacaggaggattgctttgggccaggagtttaaggccagattgggcaacatagtgagaccctgtgtctacaaaaattaaaaattagctgggcatggcggtgcctgcctttagtcccagctacttgggagactgaggcaggagtattgcttgaacacaggagttcaaggcggcagtgagctatgattgtgccagtacattccagcctggatgacagagtaagaccctgtctctaaaaaataaaaattaaaaaaaagaaagaaacaaaaacattcttgattggatatttatatgggaaatactatgagacttatttttaagccaatacttcaagttagaaattatatatataattttttttttgagataaggcctcactttgtctcccaggctgtactgcagtgatgtgatcacagctcactgcaaccccaaactcctgggctcaaatgatcctcctgcctcagcctcctgagtagctaagacttcaggcatttgccaccacacccagctaattaaaaaaaaaaaaaaattgtagaggtgggggtctcactatgtttcccaggctggtctcagactcctggactcaagcgatcctcctgtctcagcctcccaaagtgctgagattacaggtgtgagccactgtgcccagacgatgtttgtatttaatttttgtgcatatatggttataatgcattcagtaaacattcacctgtattgtgaatgacatgcattgaatttctgttacttctcagcacttgggaatggctctgagggaactgtttgactcttgggtgtgcttaggagaaaactagaacacaaatttttttgctgactggctcacttaaaattgtacaatttttaattttcgtattttcttatcctatacatggtattggcaaattcttttgatttttttttttttttaagacagtctcgctttgtcacccaggctagagtgcagtggcgcgatctccgctcactgcaacctccgccccccaccccccccagccccgcccagattcaggtgattctcctgcctcagcctcctgagtagctgggattacaggcacgtcccaccatgcccaacggattttttcgtattgttagtagagacagggtttcgccatgttggccaggccagtctcgaaccctggacctcagatgatcaatccacttcggcctcccagagtgctgggattacaggtgtgacccatcccaccaggccttcctttgaaatttttagcatgtagtttatcctccttaacattaagttatggcttatgcagataatcatacttgtttctctttaaaactattagattgtccaaaatttagatgaaataccaaattaaggatattaattagttaagctgtgtctgtctccacattttaattggaagtgaagttccccctcaggaaaggaggaagaataggatgatatgcataggtatcaatcattcattcattcacgtacattttggaaaagttaggaacagaaacagatgttgtatatatgtagcttattcttactgtgtgaagccggtaaagctggtacaggttatttttattctttctttaagcattatgttatagaaaatttcaatcacctgcaaaagtagagataatggtataatgagcccctttatggtataaagttgggcaaatggtataatttatcctttacccaacttttacagttatcggcacatgaccaatcttgttttatctattccccccacccactatcctcactccctttagtgattttgaagcaaatcccagacattatataattttacccataaatatttctgtatttatctccaaaatcgcttcttcctttccttccattctcaaattcttatttttacaagtgtagaaattttattttatgtcagttacatcagtgattattaatataagttaatgtaaaactctccccttaactcttgatttaattcagttatattaataataaaaggtacatgcataatatgtattgctaataaatttactaagaatctgtcaaattctaagcaggagatgtagttctttaaaagtcaactgctctttttctatggatacctctgtggggagaagaaatcaaagaaagacacatgaatcaaaaaatgctttgcttcaaaacatcatgttgtgcaccataaatatacagaatttttgtcaattttttaaaaaatgcattttaaaaagtgttttacttataacatgaatacatctaagtgtttggggagcaaatcgtatctccctttttgttgttgctaaaaatgatatatccagaaccatttctctcgtctttctctgccaccaccctcaactaaactactgctacctcttacctagattattgcaaaagcttcctagttcatctcattgtttctccccttctgtccttgcagtctgttttcaatatacccaccagagtgatcttattaaacaggttagatcatataattcctctgcctaagattttccaagtgcttgctcttttgttcagagtaaaagccaaagtctctgcttgatctgtatgccaacccctacacttcttccaatccatttctcatcctccatcactattctctcactctttattcacactagccttattgcaattcagaagtcccaggcatacttcagttttaggagctttgtcctgactgttactacctctacctggaatgttcttcctgcagacatctgctggctccttcgctcctttcaagtctttattcaaatattgcgttattcatgagtgaagctttttccagccattcagtataatgttctgaccctccccattacttccctgttgcctttccttgcttgatttctcagcacttaatgctatttaacctactccaaaacttgctagtctcatttatctcaggaaggaagggattttgtctgctttagttttgttctccatttaacaaaagccatttctcaactctgcatccccttttaggtgacaccatttctttctcatgtattgatgaattgagtcattttctgtaagtgaattagttttctgtgatagcatatttgttgctaggctttggaactaccaaaatgaagtaatccctgccccagccaatcttatggggggttctttttttctaatgtatattcggattgttgccaattttttcctgttacaaaaagtgttacaatgactattattgtttatttatttatttattttgaagttaaatacccagaagtggaattgctgggtcatgggtcacgtacattatgactgttactaaatattgccaaagtattttctaaaacagagttctcctttccctacatcttgctcaacactttgtactgtcagacttgaaaaaacgtaccagtctgatgggtgtgaaacagtgtctcattttgttctaatttgcattttcttgattgctggtgagatgcaggtatcctcaatttcattcayatgaatagattgccckttttccattgggtagtttggcctttcctaattcttgctatagcctggatgccaattctttgttgtatatgttgtaaatatcttctagtctgttccgtgtatttaatttagtttatggtatctttttttatacagaaagtttaaatttatttgtaggtaaatttattagacatatgatttctgctttttattacatatttgacaattcctttgttatactaggatcataaagctgtttttccagcgttttcttcaaattgttttaaaattagttttttaacatttagatctttaaagatacctggaatcaatttttgtatatggaataaggaagggaatttgttttctcccgtatagaaagttgtgtcaatgctgtttattgaatgaggcatccttcctccacgagtctgtgttgtttgccttctctgtcataagtgacacatttaggacacgtaccagcattctctttcacatactctgtcatataccagcattctctttcatataccttggtctcattctagattctgtattccatttcattcatttcttggtgcacaaataatgctctgtcttaattatagtattttaatgataagtcttggtatttggcaggcagaacccccaccttctttttttttctttttacaattatactgaactttattcttccatatgccacttacagtgtttgtctagctccatggaaaatagttctagattttgattagctttgcattgaagttaagtttcttcatattttttccctttgatgattataagctatggattgtattttcatttttatttatttttctagttatgcctatagtcattgagcatctctatacataatctacaaataacataggaatttagatttcttttttttttctttttttttcttttgagacagagtctccctctgacccccaggctgaagtgcagtggcgtgatcttggctcactgcaagctctgcctccagggttcaggccattctcctacctcagcctcccgagtagctgggactacaggcacccgccacgacgcccggctaattttttgtgtttttagcagagacggggtttcaccatggtcttgatctcctggcctcgtgatccgctcgccttggcctcccaaagtgctgggattacaggtgtgagcgaccgcacctggcaggaatttagatttcttaactccagtgttctttctcatcttctgcgttacagttgcatagtagtctgttttttctctttgaccagctttattgagatacaactcacataacatacaatttacccttataaagtatatgattcagtttttttctagtgtattcacaggttagtgtaaccatcaccacactctaattttaggatattttttcttcccaaaagaaactcgatactcattaactgtcattccccattttcccaaacctcaagcccccagcctaaatcaaccactttctgtttctagatttgcctactctgaacattttatataaatgtcatcgtaccatatatgtggtattttgtaacagtgttctttcacctagcataatgttttcaaggttcttctatgttgtagcatgtatcactacttcatttctttttattgccaaataatactcaattttatggatataccacattttttaattcatccatcaattgatggacatttgggttgtttctgccttctgggtattagaaataacacggctttgaccattcatctgtaagttgttatgtagatgtgtattttcatttgggcttatacctaaagagtagacttttattgggtcatatagtaactctgtttttaactttgtgaggaattgccaaagtgttttccaaactatctggaccattttacattcccactagcaatgtatgagggttccaatgtcttcatatccttgccaacacttacttttgtctgtctttttgattatagtcatcctagtgggtatgaatagtatcttactgcgattttggtttgtgcttccctaatgactaatgatatccaattttttttatgtacctgttggccatttgtgtatcatttttggagaaatgcctattcagatatttttgcttttttttttttcttttgagacggagtttcactcttgttgcccaggctggaatgcaatggcacgatctcagatcatggcaacctccgcctcccagattgaagtgattctcctgcctcagcctcccaagtagctggtattataggcacgtgctaccaggcccagctaatttcttttttttttttttttagtaatgatggggtttctccatgttggtcagactggtctcgaactcctaacctcaggtgatctgtctgccttggcttcccaaagtgctgggattacaggcgtgagccaccgcactgggccgcttgtttttaattgggttatttcttgtgttttaaaaaaaattcttgagttgtaagacttctttatatattctagatataagacctttatgagatgtgatttgcaaatattttctcccataatgtgggttgtagtcctacttctttttaaactcaatgttttttagcattagtttttaattaatatggtaatttttatttagcacaaggatttagtgatatcttttactcattattgtttcttgcataccacctctttcttctggatttaattttattcttgctgaataacttctttagttgtttttaagcaagagttcgtgagtggtaatgtttttatttcatagtcactattgaatgggaatttagctagatacagaattctagattaatggttactttagctctacgtattggagatactacttattccattactttctgacatttattattgctgttatgaaatatgcttttaatctaattgtcattactttgttggtaatgtctttcacattatttttaagattatctttgtccttgatattttgtaattttactgtgatgtatccatcatgttttttcatattgtttttcctgctctgcatttgcgtgtgctttcaatctgaagactatacaattcagaaaaatttttagccattttttctttaaaatattatttctcagcctttagttttctcattctagaactcttgcttgacatatgttgaagcctcttaatttgttctctatggctcttttcttattctcatctcattttctatctgtgctgttttcagcagaaattttttatttctagcttctagtccaccaattctcttgttttcactgtagtttatcctgtcttctgaatttttacttaaatgacaatttctcattttcagcatttatttattattggaccttgttcatttctgtctgctctttctgcatatgtgcctgatttgtttcataatttttcattaaaaatattattccattattcctttggagatcttaaacatacttattttaaaggtacccagctttttccaggcttctttcaaaggtgggagcaagcctggacccaagcacaatactactaattgaacctgactctagaaccatggtgcagagggggtactgctgattcttatccggctattcttatcctataggagttgaacttcaaactgcttatttccacactgagagtcccagaggctcagctcctgattacagaaatgattatcttatgttaagcttggctaagtattaatttaaaaaaaaaaaagactatctgtctttgcttttgtgaagtaaagggaacagttcaaaatgtagaccttcccaaagccaatagccaattagtgtcacagccaggacttgaacctagagagtttttccagggagtttagtagtgtggaatagaattagccatagtagggagaatgaaataacagtagcttccaccgttatctcttaaatctgcctgaaagtgtgataagactacagaatgcattaggggaaggaaagtctagcagtggtattctggagatggtggtgacaagtttgtagaggaaaaagaaaaaaaaatgatcaagagtttctagtccagccatggccattctcaaggtgaaatatattttattagttaggcctggcttatatcttaatgtgtatctcctcttacacatgttatatagtgtaaatggcaatgtgtacattgattttaaacagcgtggcaaattattttttagagttttcaaaagttttaaattccttgggagctcaaaaattattttgacatttgagaaatttgtgaccttgaaatagaaattagaattgcagcaaagagataaggtggtgcccatttttaataatagcttttatcatatccataaggaaattatgtcatacttttaaatctattaaggttatattttataatattctgtaggaaaataagtgagtcatctatgatttaatgctattttagtcaaaattgtacttattctacatattttactttttgtgcttattaaaaaggctttttttaaaaatgaagttttattcaggggaggggcgtggttttctcattttggtatttccatagttctaagcatattaccttgctcatgatacttataaattgaattataagatcaaatactaagtggcttgatatttcagaatgatcaaacattttaacttaactgagtagcaaacacgtttttctttataagtgatacacataggtattgtaagattttgctttgaagagtcttttgcaatgagtgtaattggcggataaagcttgagcacaatatagtaagtccaagtcttaatcatatgttacctagaacgttgtttcttcactttttcatctcctgaactacaaggggaatgtagatactcttgcttattttagctctccactatgctctttaaggtacgataagttcagaaacagtgagagtgaacctgattgtttactatggagagactgtaaagtagttctctaatcttgtgttttcctgttgaagttccagtgttgtaaaggaattggtttctaacttagatatgcaggagaccctcataccttgtggatccaaatctttatgcaaagttaaagggaattgatgcagtgctaacctgccaatgttgatcaacattttttttccagcatatatttgtagtattttttttttaaagagggaaaagctgaagtatcttaggaatgtattatgagaaagggaaagtcaaaatttgtaaagaatgcttttaacagttttttttagttggtagtctcccaggccatgggttccataatgatgatgtttcatgtagattgagataaagctctcagtggtctatggcaaaatgagaaaaatgaggtcagtgtaatctgtgtgtttgcataaatttatagatgtccttgtttttgagtaatttttttaacattttaaacataaactttattttagaatggtttttgattaacaaaaaagttgcaaatatagtggagaggattcctgtacccttctctcccacccagtttctcttattgttaacattttacattactgtgcagcgtttgttacaccaatattgatgtgttgttatttaactgcatactttatttgaattttattagtttttccctaatgttctttttctggtttagtttctcagactttaatttaaagtcttagattgtttcccttgctttcttttttattaatattcttggttagaaaaataaaaagttggcaaccctatgccagtttcctaatttaaaaaagttttaccgatctgtgaaatccaaaactgttccctcctataggagattaaaaaaatagaagtccaaaactctgagaaccaatgcctttggttattagaagttagtgtgataaccattaacaattaaagactaagtttcctaattacattttatttatattctattttatttcttttatttaattttaattattttattttattgagacagacttttggtctgtcgcccaggctggagtgcaatggtgccatctccgcctactgcaacctccgcctcctgggttcaagcgattctcctgcctcagcctcccaagtagctgggactacaggcatgttccaccacgcctagctaatttttgtatttttagtagagacagggttgtgccatgttggccgggccgttcttgaactcctggcctcaagcgatctgcctgccctggcttcccaaagtgctgggattacaggtgtgagccaccacgccctgcccgctctgtacactaataagcaatcctgtacacatcctttgcttgaactgtcaccattttgcttgctgggttccaatatcaagtccagccctcttttctaagctctaagcaagtatatccagttgctttccagattgttagatatccatgctagttgtctcacatttaaaacaggaaacaatcctgatttgatcttaagtatgtgagatgaaatagcttaaggcataaatcactaagatttcatcaattccatatgggcagggactaaatcatgtatttctttcatcatcattagtccttagcacattacaaggcacatagtaagtattcagtaagtattctttgattggttgctaaagtacatttttaaaaaatcgaatacaggaaaatattaaaaggcaagaattgcagatcagcagtagaattttcttagttattatgcagggtaaatgagctgctttttgaaataactgaaaataagctaaaattcttctgttttttaaaaatacattttcagccggtcacggtggctcatgcactttgggaagccgaggcgagcagatcacttgagatcaggagttcaagaccagcctggccaacacggtgaaaccccatctctactaaaaatacaaaagatagcctggcatcgtggtgggtgcctgtaatcccagctactcaggaggctgagacaggagaattgcttgaacccaggaggcggaggttgcagcgagccgagatggcaccactgcacctcagcctgagcgatggagcaagactccacctcaaaataaataaataaatttttcagaattatgttagtgtgatccagtgatgctaagtaatcatttctctgcttaaagtttaattttcatagcaatagtttaggatttactgagtcttttttttttctctttaccctgtgtagacatgctttactttctttcgaagcatatttcccaggttcttgataacacatttctgacatataaaattaattagacaattgtgcatcttcctcccaccctacttttttctacctttgtgtctattcttttctaagtgagtaggattcacctagcatctttattctttgacctcagtgcgttttttgtgctgctactgttgagaatgtttttacctatactttatcctacttttaaatctgtagttggaaatatttgttgtacagtagtttcctggtttgagtactgtctgtactgctcatgtgagataagcagcaccttctaacttgagagatagtgaatacttgtggtataacttacattttaacatccaaatacatagttgattctcaacgctgtcagacatatttcccctgttcgtatcaaatattttataaatatttcttcctttttaaaatcctgaaataaaatttaaataagttgcttatacaagtaattttttaaaaaatccacattaccaccctaattgtcatatgaaggaaaaataaatgaatacatttatattaaataaaatctatttcagtatgtaaacaatcatgactacactggacataataawcagatgctgaagtcattgtgaatgctctggctctaaaatatactgctaaaaatatattgttatggtgactcatagcattttcactggtgatgtgattttctgaaatagtaaacagcacttcataaaagttctgacaaaaagtataatctttcttcaattttcctggtaattgcattcctggaaaattcataaatccatataaaatttttttgtttatgttcaaatagaaggtttggattatttcaaagggatttttgcaaacatggcgtctggaagttgtgatgctcataggacagttcttcattggcaaggctctgcaatccattacagaatgtctaatacttctgcctcacccacccagtaactaaatgccactagcaccccccagtcattgtgaaaatcaataccaaccttatttctgaaaagttcctagaagtccaccttccttcctttggctcatccccccagaaggagttttttgaggcatacacctcttagctataatagaactagtacatacagttttctatatgagaatagcaaccaatcggaaaataataggtggatagaaaagcctgtagaacactaagtatatgattattcgggaacattatttcagtgatattattattttggttggtttgcccaatttaagttgtttatattacattgtatgtatctgataacaggaacagcatatactttcattgtaggtaagagcattatgtattttgataaacattaaaaatgtttatggcaagatgaaaagtaggacaactagattgtggtgagactggtacaaagtagttggtttttgttgttgctgctgctgttatttatttagtaatggtttcttggttcagacattactgaaaacaggtttccagcgtgtaaaattaatagcacaattgcatatcttccatccaccttttttctactttttttttgcattaattcttgtctaaataaccaaataggattcacccaggacatctttttttacttcaatacattttttaatgttgtttagaattttgtggtgtacatttgtgactggtatattttttaaatagtaaactttgaagatattgtgaaaaagatatgtttattcattgactgtgtctccagcctatttgcagagttgtagccagctgttgctgatataccaaggaggatttagaaagccattttcattgccagttttgtttatgattgttgggggagaaggaggaagctcagaagtgttttagatatgagtggaaatgtatttttacccgtttatctccaatctggatactgcagccataaaatttactagtttcactccttatccagacagtggttaactggataggcaaagaactcaaatttagtgtccttgcttatagaaaccttaaattctcccttactaaaacctgtgatctttaaatttgatctaaactaaaccttacacatttatttttatcataaatacctctgtgtttccatacatggaaactaccagtccagcatataagggatatttactatcatggttgaattatggccaaataggacttgcctgatgcagaaaatccacagtgaagtcccaaatggatgaagttgatttctaaaaattgtgtgaaatatacataatataaaagttaccattttaaccatttttaagtgtacagttctgtggcattcagtatattcacattgttatataatcattaccaccatccatctcttgaacttttttatcttcccagcctgaaactctgtactcataaacttgccattcccttccttactcaacccctggcaaccactttctgcttctgtcttatgaatttaactactcttattccttatataagaggaatcatacaatatttgtcattttctgactggcttattttacttagcataatgtccttaaggttgatccatattgcagcatgtgccaacattttcttcctttttaatgctgtataatatttcattgcctgtataataccacattttgtttattcattcatcagtagatgaacacttggattgcttccaccttttgactattgtgaataatgctgctttggacatgggtgtagaaatattcttcgagctccttctttcacttctttgaagtatatacccagaagtagaattgctggatcttatgttaattctgtgtttaattttttgagaaactgccataccattttccacagtagcttcaccattttacattccccccagcaatgcacaagggttccagtttctccacatttttgccaatacttattttctgttttgtggggtgttttgttttgttttgttttgtttttgtaataactttgttaatggatgtgaagtgttatctccttgtggttttgatttgtattcccctaatggaagttgatttgtttgaccttcaggaatggatccccaccaactgtaaaactgtaataaatagccttgataaaaataagacatatctaggaacaccagaataaaaagtttcctgctagcccctcttatactagtaatggtatatttcactctacagaaccgctttaaaattttttccatttccaaattaaataacataaaagttaaattcagtttggtagacatttgttttttattatttttattttttatttttttgaggcagggtcttactctgttgcccaggctggagtgcagtggcattattgtggctcattgcarccttgacctcctggacccaagtgaccctcctgcgtcagcctcccgagtagctggaactatagacacatgctaccccatccggctaatttttctatttttgtagagacagagttttcccatgttgcccaggctgttcttgaactcctggcctaagtgatccacctgccttggcctcccaaagtggtgggattacatgtgtgagccaccacgcctgactgacatttatttttagtgatattttatatttatttatttattcatttatttattttgagacgagttttgctcttgtcacccaggctgaagtacaatggtgcaatcttggctcacttgcaacctctgcgtcccaggtttaagtgattctcctgcctcagcctcacaagtaggtgggattacaggcatgcaccaccacacccggctaattttttgtatttttagtaaagatggggttttaccattttagccaggctggtctcgaactcctgacctcaggtgatttgtccacctcggcctcccaaagtgctgagattacaggcgtgagccactgtgcccagcctttagtgatattttaaagccaaattcagaatgtgaaactagagaatttgaaactcagaatgtgaaaactagagaatttaatccattgagtaaatattctttaaagaattaatttgtgtcagacatctaagcacatgctgcccttaagaattttacaatctgagcagagcacagtggctcacagctgtaatcccagcactttgggagattgaggaaggaggattgcttgagcccaggaggttgggaccagcctgggcaacacagtgagaccccatatctacaaaaaattttaaaagttagctgggcatggtggtgtgcatctgtagtcccagctactcagaggctgaaatgagaggatcgcttgagcctgggaagtcaagastgcagtgagccgtgaatacaccactgcactcaagcctgggtgaccgagcaagacctgatctcaaaagaatcttatagtctggagggggagatagatacagagacaagcaattagaattcagtgtaatgaaatctatactggaaccgtataaaaggtttggtgggagtagtacataacacatgccttcctttgtctctggggaatgaggggcatcagctaaagctccactgagaaggaagctcttaagctgaaaaatgaaggatgagtaggcttttcctggagccagagatgagctacctttagtaaaactttggcaaatgatttgagaatttttgagttatctttcgctaagattactctagattttatatcctacagcttgaaaaaatccagtcccaactcacccctgcactaagccagggttcttggaagaccggactggtctgatagatggcaaactaacttaaatcctgaagtgaaagttatgtaatacaaagcaaaaagctgaggtaaattataactgtttacattgtgggtgttttaaatttttctctatcaccttagtctggtctgttaacagtgtcacattatcttgccctgatggtacctttatataggtatattttactgaataggtataatttattgaaagtttatgtctaggaaatagtaattcacaattaactttgtaggtttcagtaaaagacgttaaataattcctccccagaagcattggtattttttttccctaggcattttcatgtgcctgtatactttgaaacatatagccagcaaaaatcactttctgtcatgaatgtgatctaaataaaattctgttcatttattttaataacctaatacagttttgaccctgaagctgctttttgtttttgttgttttgaggtcttttgtttgttttgatgctttttctttctgtcatagagcaaatagatcatatgtaggaatgctagaaggcgctgtgaactctaaggatgatgttttcttagttatattaaagaagtatgactaattaaattattcataactatagttttagtctcttcttagctcttttacttgtaatgcttataaaatctttgggattttaagataatgcagaggctaatatacttggcctgaaattgaaaatgttgagattcattcctaagtattgttttatgccagagacctcctgctaaaattgatatagctgtttgctgatttgatttctccaggtctcattcagtttggttacaagaggagtcccgttcaaatcaatcctgtcttgtgtattaacagtacttcccctgtctgccatcatgagactttttcccctttaaatattcacccacttttttttttgagtacctatggctttaacatatgctcacaagtccagtaagaaaaaaaaagggattttgaatttcataatttttaagaatatgatagctttcaaatagtttaaatttgtgtgcctacaatacctaaactctactttttagtagacattaacataaagccagggtggctggaatagcattgatctatctcaggtcctttgcccaggacaagataaaatcagagaagaaaggagcaggcaagcattaaggggttgagggtgtgaatgagtagcctgggataacaagagaaaatgtattatgtgccaaaggtttctgaaccttgccatgtagccttgacctagtaattagagagttcagattatatttcctttccagtgtcatagaattgctgataatgcttactagaaatagtgtgaaactatgcttgaacttcatactaaacgtgtagttacacaaataattttgttaatagtttgttttgactcctgttaaagaagataaaggtgttactgaaacataaagattctcttgaggtagttttaaatatagaatttcaagctacagaactaattacaaagcaagattttaagttaagtacttttaagcttcttttcatcatgcaaagctcatgaaacctatgtatacgcttatcagaaaaatgcacatatatgcaaatttgcacacaatttcagggattcacagaactaaagcccatttatggatcctgctctaagtcactttcttcatttttggatagttttgttcttttatttttatttagattgtggctagtttaatttgttgcagcaaagttaatattaaatactaatgaactgaagttataagtttaatttccgtaagggacatttggctgtacttatactatagacacatatattaaatttacctattttgcatatgaaagaaaataacacacgtacgtgcccacaaatgcaggccattgactataatatgattgaatgagattatgtgaattaataaaaagcctcagaatgcataggtagatattatatcatcattgggaatatggaaaagtttgtcatcattctccttttaaatttgtcatcttatttttaattggaatatagaattgctctataggatttttaaaattcagtttaatttataatgtattttggggggaccgtttttttttttgtttgtttgtttttgagacagagtcttgctgtgttgccaggctggagtgcagtggcacgatctcagctcactgcaacctccacctcccgggttcaagcagttcccctgccacagcctcccaaatagctgggactacaggtgtgtgccaccacacccagctaattttttaatttttagtagagacggagtttcaccatgttggccaggacagtctcgatctcctgacctcgtgatctgcctgcctcggcctcccgaagtgctgggattacagscatgagccaccgcccccagccagggggaacgttttaatatatccctttgaaataattatagaaccctcaggagttccaaaattttagtatgtggtcattggttcttatcatccagtagagataaatgggaaatgatgagcatttgcttcatgtaaagtatgtgcatttatatgttaatataaattctagtcataactgaggtgttgctgtagttatcttgctgttattttgggtccttttttttttgtttcttaactttagatgtacataaattctggtcttgtgagaatttagcaaaaaattaaacttttctttaagtggttctcagtctcagttgtcttgacatcttaaagatttacgtactgtttgaggccctgaaatttactttcttttttaaaaaaactttatcccagaagctataaatcagtgtttaaattagtgttaaagagaagtagtaacatattagtaatattttatctgttttaacgggctcttaaaaaggtgtccatctgaatctgttgagttgagctgaaagcagagtgatgctggagagaaagatggcagaaagcatattaagaggcaggagctagtgtttggggggagatgttaacatgtttgtggagtggatgctgaataaatatgcttcctgcagtctaatgctccagatacctgtttataggtaaacttcctgtgaacctcttttgagaaatacagccctagactaaaggagtagccttgaaactatttgttcattcatttgttcacttattcatctgtttaccaaattgtgaaaaattttaaagacactttatgaggaaaataaatatttatgccaccatattttttccttaaagagactgatttttgaaatcagacacataatgctacattcacatctacaaagtgtgttcatcactattgcaaaatgttgcaaaagcagggtagaaaaatcttaggactttaaatagtctgaacaaataaacatgtttgttatgatgcatacaaatgcatttgtacagtcctgtactagctgtttctgagatcacagaataaaagtttaaaaccaagaataataacagttgaatmccgtacataacacttaatattccaatggactaagcaaaatatccctctaagttacatgggatctcacactatctgtgtatgtctgtgcttaatggaaatgctacaaggatgctaagtgttgaatggtagccaaattacttacgtagtaggttactaaattagagcgtttactaatatctaaaaatggatcatcatagcttatgaatacccaagttttattgaccttttaataactgcttagtagtactagtaaatagcccatgaccactatgtaaaaaaaaaaaaaaagaaaaaaagaaaaaaacctaaggaattttgaatcgttttcctgttagaaccaaagaaagaaagtctttcatttggatattgctttcagcccatcagtgggttcccaagatctgccaaaagagtctttttttcttttttctaatatttcttttttttttttttttgagacggagtctctccccgtgtcccaggctggagtgcagtggcgcgatttcggctcactgcaagctccgcctcccgggttcccgccattctcctgctcagagtagctgggactacaggcgcccgccaccacgcccggctaattttttttgtattttttagtagagacggggtttcaccatgttggccaggatggtctcgatctcctgagctcgtgatccgcccgcctcagcctcccaaagtgctaggattacaggcataagccagcgcgcccggcgtcttttttctaatatttcaaaaccctagacaatatgccgaatgttaaagtgtcttgaaggttcacttgcaactgtggaagtggaaatacagtcctctaagaataaagtttcagtgttcttgttacccgtgaaatcttttctaccggaggtgattactaatatgccttgacagatggtcttctcaatctgaggtcaggatatgagttcccaaaggccaggaattacagcatattcatatctctatttcagtaagtcaattgatactrtaatggctcaaataagtgattgtgtggaatgagtctgggcaagaccctacctaatgcactgtaagtcatctgggaacaaagctctttgcaaccaagtcagtctggggatggaaaaagtaaaataaatataaacctttgccatcagatgtggtaggtgcttattaggctgtagctacacaggacttccacatcactgagtagaaatccatccatagaaatgaaagggaaggaatgcagtagggatagaaaatttgtcctcaaatacttctataggtctcccatatgattttttttcaatatagtagtatttctgacagagaatgaactgtttttcattactaaaggcattacctagttaagtttctatctggagataatgtacctgtttacctgtgaaagaaaaaaaaatagtaaagtttctatctggagataatgtacctgtttacctgtgaaagaaaaaaaataggtggcatagctcttctaattagatggattgagtctatatgcattttaagggcaatagtaatatatgtaatctgaccagctaaataaagctaacagtaaagtatcataactaacctggttgactagtatttctttttctcttgcttgattggtcttagggttttgacccaccacatcagagtgacacaagaaccatctacgtagccaacaggtttcctcagaatggcctttacacacctcagaaatttatagataacaggatcatttcatctaaggtaagaattaaaatttttattgttaggccaggtgcagtggctcatacccatcatcccagcactttgggaggccaaggcgagaggatcggttaagcccaggagtttgcgaccagtgtgggcaacataatgagaccttgtctctgcaaaaaatcaaaaaattagccaggtgtggtggcacacctctactgacagctactctggaggctggcttcagcctgggaagtcgagggtgcagtgagctgtgattgtgccactgcactccaacctgggcaacagagtgagaccatgtctcaaaaaaaaaaattattattaaaactgtagatatggatcattttatttttaaaagtgattatatgtgtgtgtgtgtatttatttatatccttacaaattcaagaaaacggtggtcgatttatcttaaccaaaatggttaactgtagaatacaaggagtggctaattgctgatatcagtagcccacatgccaaaaaattatctttagttgctagtaaactaaggaactaatatttatgctatgtaccagaaactatattaagtacttctcatatcatttaatccttacaacaaccctatgagatagcttttatgaaatctattttacaaagcagtgttatactgattttaaatcagtttcctcaattgaagtcctaggaaatggaataattttcccaaggttgctcactagtaaatggctagattggatttttggggttttttttgtttgcttgtttttttgagacagagtctcgctgtgtcacccaggctggaatgcagtggtgcaatcttggcccattgcaacctctgcctctcgggttcaagccattctctgcctcagcctcccaagtagctgggattacaggtacctgctaccatgcccagctaatttttgtatgattagtggagatgggatttcaccaccttggccaggctggtcttgaactccagacctcatgatccacccacctcggcctcccaaagtgctgggattacaggtatgagccactgcacccggccatagattggaatttaaactcagttctgtgttgctttaaagcctgcttcctccaattttatcactcatttgtacacattttatggtgccaaagtacagcttcactcttatatattcttccttgtttcattttttcctgtggcatttttaagttgtcttaggttattctgaagctaaagactgtagaatagtactttgcagtagacttttctgtcatgatggaattgtcccatatgatggccaataaattatacaaggttatcaaggccttgaaatatggctagtgcactcagaaactgaagtttaatttaatttttatttaaatgtcagtagctacatgtgactagtggcttggacggtacagttatagaggatatgagtcaaagagactgagggtaaagttttccttatatcataactattgcctgaaagggcaccttaagaagcatctttgcattgctccttccctctcttctaaagcaactaacatcttttctctaatcctaacctcgtctttcccaaggatgttgtcttaggtcagcagttctttgccctgccccatgttgctgccttcacattctttatgtgtataacatacccttagtgccatctctcgttttggatgatggttctaaagcagaaagtaggaagaggagatgtcagaatccaggataatggatgagctttagattagtgacacagttcttttttttttttttaaattattattatactttaagttctagggtacatgtgcacagcgtgcaggtttgttacatatgtatacatgtgccatattggtgtgcttcacccattaactcgtcatttacattaggtatatctcctaatgctatccctccccctgcccctaccccacgagaggccccagtgtgtgatattccccatcttgtgtccaagtgttctcattgttctgttcccacctatgagtgagaacatgcggtgtttggttttctgtccttgcaatagtttgctcagaatgatggtttccagcttcatccgtgtccctgcaaaggacatgaactcatccttttttatggctgcatagtattccatggtgtatatgtgccacattttcttaatccagtctatcattgttggacatttggattggttccaagtctttactattgtgaatagttctgcagtaaatacacgtgtgcatgtgtctttatattagcatgatttataatccttcggatatatacccagtaatgggatggctgggtcaaatggtatttctagttctagatgcttgaggaatcaccacactgtcttccacaatcgttgaactagtttacagtcccaccaacagtgtaaaagtgttcctatttctccacatcctctccagcacctgttgtttcctgactttttaatgatcgccattctaactggtgtgagatgatatctcattgtggttttgatttgcatttctctgatggccagtgatgatgagcattttttcatgtgtattttggctgcataaatgtcttctttggagaagtgtctgttgatatcctttgcccatgttttgatgggattgattttttcttgtaaatttgtttaagttctttgtagattctggatattagccctttgtcagatgggtagattgtaaaaattttctcccattctgtaggttgcctgttcactctgatggcagtttcttttgctgtgcagaagctctttagttgaattagatcccatttgtcaattttggcttttgttgccattgcttttggtgttttagacatgaagtccttgcccatgcctgtgtcctgaatgggattgcctaggttttcttctagggtttttatggttttaggtctgacatttaagtctttaatccatcttgaattaatttttgtataaggtgtaagaaagggatccagtttcagctttctacatatggctagccggttttcccagcaccatttattaaatagggactcctttccccatttcttgtttttgtcaggtttgtcaaagatcagatggttgtagatgtgtggtattatttctgagggctctgttctgttccattggtctatatctctgttttggtaccagtaccatgctgttttggttactgtagccttgtagtatagtttgaagtcaggtagcgtgatgccttcagctttgttcttttggcttaggattgtcttggcaatgcgggctcttttttggttccatatgaactttaaagtagttttttccagttctgtgaagaaagtcattggtagcttgatggggatggcattaaatgtataaattaccttgggcagtatggccattttcacgatgttgattcttcctatccatggccatggaatgttcatccatttgtttgtagtgacacagttcttaagaaattatgcaagaaataaaagctcttgaaaactttaggttttttttttaacttggggtataatttacatacagtaaaatttatcagttttaagtgtgcagtttgatgagttttgacaaatctgaccaccgccataatcaagatgtggaatatatccattgcttcaaaaaaaatctttcatggtcttttgcagcaggtccccctcctcctcaccccccaggcactagcaaccactgatctgctttctgtaactatagttttttcttttctagaatttcatataatacaacacaagtcttttgtgcctgacttcttttttcgtaacataatgcttttggggttcatttttgttgttgcaagtattagtatcagtaattcattcctttctagtgcatagtttagctgtcagcctggaattgtgtagttaatgttttgaatataagccattttctttgtgtggttctctgacaatcagtattttccctttacatttccagctgcttttccagccctgaactctaatcttggttacatgttgttgatgaggctgtagttttccccagctgttttgcagccattgttgtgtgtggtaggtggatactgtctccaagctaagaagccaaaaattcacaatttatacttcttccatttgcaattttttgaaattaaactctcttcccgtttccatctatattttggacattttccagtatttgacatagtttttaaaatgtaatctttataattcttatctgctgggagtccacaggaccacctctttgtcaatagtggaaactgagtgtcctcctagaaagcttttgggattaaataagtatctttaaatgactgtctctgtacacagaagtatttggtttaatgtttttgaccatattttttaaaatgtggatgtttaaagaagtattgcctttttaaatgtttacggtaaatgaggactgtctcattactacctattacgccactattgctttcataaactccttccaaaacagattacctgttattccacaaactcatgttgaactttcctaccactgtgcctttgctttgatttcatgttgttagccacaatttttaaaatgtaaattttatgtatttgtggacattgtagattttatgtttttgtagaaaggtagaattcatatctttgaccataatttcaagaatgtaaatatttatacagatactgtcacttttttcctgagcataaatgaagmctgcttctcattactttcattttactacctttcactcccctgttattctcttggtctccttccagactgcattgttttctatctcacaaagccatgatgagcttttctcctgtccctttgctcatgctgtcctagcttcctgaaatgttctcccttatttgccctggattttcagcctgttgaatgttcttcttttaaagcacatgtcaaatatgactgtcttgttaaatttttttcatayactttacctttgaatacagctattaatgttttgttcttaatctcctctacttaatattaaacatcttatttctgtttctcttattgtggaagtgtcttgcatgttgtggttgtgtggtatgtctttaactggccatagtaactacattatcttaaatttaaactttctttggccatgtgtagtggcacacacctgtaatcctagtactttgggaggccaaggtgggcggatcacttgaggccaggagtttgagaacagcctggccaacagggtgaaaccccgtctctactaaaaaaatacaaaaaaattagccaggtgtggtggcggttgcctgtagtcccagctacttgggaggctgaggcaggagaatggcatgaacccaggaggcggagcttgtagtgaacagagatcgagccactgcactccagcctgggtgactgagtgagactctgtctcaaaaaaaaaaaaaaaaaatacagaaaaattagccaggtgtggtggtgcatgcaagtagtcccagctactcaggagtctgagacatgagaatcgcttgaactcaggaggcggaggttgcagtgggccaagattgcgccactgcactccagcctrggcagacagagtgagactgtctcaaaaaaataaaataaaataaccttcttgcaaaatatttaattttatagccatgttttagttttcttaggagaaaataaggtcaattataaagtcatatatgactatagagaagttacacttctaattcatttgtcttaaccattattacataacaaagagaactttaaagcataataaattattttcttagcagtattttcataatgtttgatattatgctactagagttctccctctctatacaataggacaagcacagaatttagactcattcacaatctattatgtttgtatttcagaaaaactagaaacaatttctaccatttatgtgctagttttcataagaaatttttatttgttctgagttgttccttgtattattgaactagccaaagaaaacaccctgaaaccaattactttactgccaatttatatagctgttctcttcaggattctggaatacaaaatatattgttgctgttacgtttcaaatagattgctgtaaacttaggagacttccaaccttccttataaagtattatacatttggtgactgagatactctgacaactgatttttaattccaattaagatcacctgcaggtgacttgacacacaattaccatctcatgtgtatacattgaacattgacttcctttggctccaggaagtatctacctctcttctttctagagccctaaacatacttcccatcctcagattctggaaccactgctgccgccactactcagggaaaatatgtttcacatattccagattcaaactgaaaatataatttcaccaaagaargaaagtttgttgctattggactagtctttccatatccctgggtcagataggcttttgtgggcttttctgggaacctaactctgtttataaggttgttcatgtgggaaacagtgtttcaggtctcaaacagctaattaagaagtgaacttttgacaatgaaaatccaaaaattagagccatctgacatgacactaggtaacgtaaagtacctctttggaaatcttgaattggtcagtaaccattgaggcctcattgcctgagatcaggatattatctcagaaaaaacccgttgtcaaccatatttatttattcattaatctattctgcaaaatatttgatctctacctatgtgccaaggagtagtatatgtgctagagatagaacagtaaataaaatgatatccctggcctcagggatcttatattcttctgggaggatgtacataaagtaaacattctataaatcaatttccctgtttcatgtatgaagttatgttgtgagttgtaacacaaataaaatttgcagcatattattctgcccttgtaatacagcattataggtttttgagctgagtaataataataagcacttttatagcaattagtatgagccaggttctgtcctaagtgcttcttcagtatgttagctgatttaatgtttataggaaccctataagatatgattaatattatcctcattttatagaggagcaaagtgggacacggagagattaagtccaaggtcatttagtgagtattacaaattaagatttgggccaccacagtttaaccccaagcatctatgcttttaaccgttgtgctatactatcttaccttttaaaattgatattgtgacagattttcgtatcctttatgaaattttcttggtggttatcgcggcgatcacttatctaaagcatttctatttctttaacattctaggttatttcctcatatttcatactaaacaaactatttcctctgtttctgatgctaaactaactaaaatataaattgtatctagtatctgcatttctatcaactcatatttatctttagcattaggtttagttttgtataccaaaatccaaaataagttattaaaatgttgttttagatctgctttctctaacttctaaaaaaactggaatttagtagcaaaattgttgggtttcagcttattccatttttcaaaattaagctaaaattgccaataaatagtaaaaggaagaaaaaagggaagtagaataaaagtcctgaactctaaaagccagatggtttctgtagcatatagacttacagaattttgtctaaggggttagtaaaaccgattttactttacttcttaatattatgtctatatacttgatattatttttaaatattaatttattgatctctttctttttagtacactgtgtggaattttgttccaaaaaatttatttgaacagttcagaagagtggcaaacttttattttcttattatatttttggttcaggtaagctttattactcaatmttaagtttgtaaacatagtttctaaaaatatgtcttggaacaaagaaaaattacattgtgttgctaatcatttgaccatgtgaccattttttctgcagtgcttctgcattgtattcagtgaatacaatgatctgtcatatctagatttctaaaagaaatagcctgtaaactttaagatcaattgtatattgtttcatcaataatgtgctgtagtacttagattaaccataatcttagctaagagtgtaacctaatatctttcagatattctgcctcagaacataaatgtttaggcttttaatatatagttcatattttcggtacatttctgcctgtggaatcatctttgtacaaagtaaasttttctttggcttttaattttttaatttaaatttaacttaaatttaagttatttaataagaattgtaatttttaagtatccctgtgggtraagttttttttttttccaggagactgttttctttgcttaagtctgtgtttattataggctgttagacagtttcttaattttcaccttgtgcttaaaaaaattatatatgtatataaaatcaagagaacttgagtataaatcaagattttaaaatagtgatggccattttcctttaaagaagttattcttttccgataaaacttggcaatttcagtgtagcatcaaatayataaactctgaactcttctctcagtagaacctgggatttcaaatgaaaaattgaaacttgtcaaataatcattttaatgctttaggaaacatttactttttaaaaagaaaaaattgctttctttcatgaacagacaaggaacttctgattttctgcccatagaccgttcgcttggctttcttggaaaagcaagaaatgtatgctaaccatatccacgtaacatccatacatttgtgaaatcactagctaagatgaattcagcttgtccatggaatagaacaaatttaatgggcctatccggagtaaaggaacatcattttcctagttatccacctctggctctgttggatgtaacaaaatcacttatagaaaaaaattctttccatagtcccattcctagttttctttccctagtgttgatatcattctgaatccaagggtaaaaattgctgacagactcttcagcatttatcaggatgtgcaaagaaatgtgaaacgagatctgagtagctgtagttccactccttggcgaatattgaagaactttgtgtttaaacakagttgctgagtccagtctagccatgtatgtggataggcaatagatttaaatagtcttccaaccccacataatagccaacaaagtgaagttgtgaaatcgtgaactaaagtatactcactgtgtaatgtgaaattttagatgttaatagtrtgatgtgcacaatataaaaatataatattctgtattcttttttataaatctagcttatgattgatacacctaccagtccagttaccagtggacttccattattctttgtgataacagtaactgccataaagcaggtatgaaatactttctttttttaattttcctctaagtcatttagaagttgctaaatatttccactccaaagtaacatttattgttgtgaaaataatttccataagaaagcagcaaatttgtctgatacgtagtaaaattaaactgaattagccactctgttatatttcaggtacctggtgactcatggaatgattaacatcgttaaaatatgtagttcccttgacagagctagaaagcatccaaaaacaagtattgtatatgtataaaccatttatatatgaaatagatttcttaattataatcatctttgtagagtttggtgatatttaaaggaaatacaattcaaaagagatatgtttatagagagcagggtatatacttctggtgtgaacatttgtgagtaaaaactatgtagttcaaaaattagggtgtggtagcacatacctgtggtcccagctacttggtgggctgaggtgggaggaacgcttgagcccaggaggtagaggctgccctgagccgtgattatgtcactgcactcccacctggttgacagagtgagatcctgtctcaaaaaaaaaaaaaaaaatgtatagtccttttctgctgtttacaactttctcttatgagtttagtttttatgtattttccccctggggaaatattttcaatcagagcatgaattgacattaaaatctagttacagagaaacaaggttattagataaacatatagaataagaaggaaattcatagaaatgtcctgttgatttagctactacttctcaaaaaggtcttggcagggtttcagttatacagagatgattccttccacctgcaagagaattaactgaattttctcaggcaaatgtgaatttttcattttataagatgtagggataaggcataaattgacatggaaataaaattgacaaacattttacagttctgggatgaagtatattctttattgcatacataagaaagatagaggagcctatagattaacaattagattatgcatctacatgtcagagaatactaggccacagctctaagttcgattttactttcttcacttttccattggagattaaaatgtgtgtatatcagtcgatatgcatttaaatcactccatataattattcacctgatgaatatttactttgatgaaataaatgacaaacagatgtcatttatttcaacaaagtaacatgtttgtcctttggacctcgtttctatatatactttcaccttaggtaatttcatcccatccagcagaatgaagttaccatctctatgatgatggttcccaaatttatgtttatcctgaaactattctttgaactccaaacacacatgtacaactgtttgtacaacatttcaactttgtcatctcacaagaatctcaaacatgactcgatttttttccccctcaaaaactatactactagttcttgttattctgcagtttattaaatggcactaccatccaaccaccgcaagccttgacatcatcatcctttgactgttctgttttatccctaccttcaagatctccctcattagtccaagccaccatcatcttttgtctggacaattgcattcttttctgaagagttctctcatttccgctcttactctcctatggttttcacagagcagccagattgatctcttaaaatcagatcacactaccctcccacttaaagctactgaacagtagctttgcatcaccactttgaccaaaacatgtcttttcagtgatctacaaagacataaagacgtacagagtctagaccctggttccttcttcatttcctaccattttttttttttaaactcactgtgctgcagctacactcctctacttgtcctcgaacacagtaagcatgctcctatctcaagattttatgacttgctgtactttcttcctggaaagttcttctgccagataattgcattctcaattcattttactctatacttaaactttgaccaccatgccactcttatttcttagtctgtcctttttttccttcatatcatttattcttttgttctattgataaaagttggtattttagtttatccgtcactttcatttgaatgtctagctctacggtgccagataatttactctatatacctgcttatttcccattagcagaacaagaccatgcacatattgggccttcagtagttgtttaacagatgaataaatgaatgaatgaacttattggatatttttaaagccatgtaaaatgttgcaatacctcttgtccttatttcccaatgtatatttggccaaatatggactgcatttaactggaatatgataccattaactgagttgaaaaaaagttggtgaatttttatctacaagtaagagtttaatataatcataataataattgacaatcagtctccttccaaaattggtttaagtaaaagtgaataaaggcagaaagcaaaaaggttatgcctagaacctgtgttagtatgattattaaatatgagtactaaatttagatgagagcttcataactaaggcaaaagggggaaatataaaaggtcatatagttttcaaagagaaaatttgaaccacaaagattttctccttaactcaaaacaaaattttgacactcagagttttctcttttgcaacaactattcctaactttttctcatttaaatacacagaatacttccatatattgttcagatttatgtatctatttattactgtagatcaatagaacaaattttggaaaaactgtaaaagtgaaagttgccatgttccaacctttctttcttgtcttctccccttttagtctgccttttccctttgtacttctatcaaaataggaaaaggctccattatcaattacttacactttaatatgaatgaggttgtcagttgtttgcttgtttttagcttctcccaactgtatttacatattaagtcttctctccaattgtgtaatgcaagatacagtgctgtaggaaataagatagtctttgccctccacgattctaaaacctatgaaataggaaggtaagaccaaatataaaaataattatggttcaatagagtagtagtaaaatccagtgagctgtagctagctattcagagaaggaagggaacacttcatctggatgatcagagacggttttgtggaggaaatattattattattatttttaaataaatttaagaatttattcaagtaagggtcatatttcaaatcagtaggtaaaatatcagacaataaattgtgatatgataatcacttgaatatttagaaaaaatatttggattcatacttcataccatataggaaaataaaacatttggattactaagctgaatatacataactacaaaataatagaagtaaatacagatgaaattttatctcattttcaatttgggaattaatcagttaatctactggtgtaagaaaggaaaggtatcatataggaaaaataaaatgtgagtgtttaaaagaagtctgaataatattaaaagcaaaaatgaaactgaaaaatttgtgttctgtgtaacaaagggcctatgtccttaattttatcttttttagagtctcattctgttgtccaggctggagagcagtagtgcaatcagagttcattgcagccttgacctcccaggctcaggtgatccttccacctcagcctaccaaatagctgggactacagttgcgtgccaccacacccagctaatttttgttattttttttgtagagacagggtttcgccatgttgccgggtctggtctccaactcctgggctcaagcgattctctcccttcggcctcccaaagtgatgtaattacaggcttgagtcaccacgcccagctgatcttaattttaaaagatattttaccaagagcacatacctaaataaggaaaaggcatggatcatctccaagaaaagaattgccaaattgctgataaatagatgaaaatatgaattctcatggaggaaatattattgagttttggaatatgggtaaaatgacagttgaggaagaagatgaggtagaaatgaactacttgggcaaaggcccaagtgcaagaaaaggcaagacctattttggggaattgtaagtctaactaatgtttgatcctatttaggaaagtactacaaggtaatagaagtataggttggttctaaattaaggaagccagaagatgctttgttgtaagcattgagaatcactgaaggggttctgagcaggatagtgaatcaagacaatgctttgggaagattaatctggcagtaatgtgtaggatggattagaatttatgagcttgtattaraaaaagatgtttgaattatcgttgctctgctattaatgtcatctgactgtaaagaaaagtgtgcttttgacagtttcagaaaaaatattttgactttcaattaaatttctctaaaatgacatactgcaacttaaataaggccaacataatttaggtgtcttaagagtgctttcccacaaggtttccatctgaaaacagtataccttcaaaatagtctttcatattttgctttttattttataatttcataatattttaaaaataatagatgcacatttttttaagggaaacagcacaaaatagaatatagtaagtcttagactcctaactcccagtctcctagttctcctacccagggagcaattatttgtaagttagtccagatatctatgcaaagtgttcacataggcaagcatattttttcacaaatggtaacatagaacagaacctattctgtaccttacctttttattcacttactctttcttagatatgattccattatctatacttgtgccgtatctctgagttcttgaattttcttaaaatggcataggaagtcttttccacttaaaagatcgccattccttaatatttaatcaaaagattctttgtgaaatgcttgtgtctgtttccttcctagtgatgatccatacaggctaacatatttttgttaagcacaattgacccttgaacaatgcagggattaggggaaccccttatgcaattgaaaattcatgtataagttttgactctcccaaaacttaactactgatagtctactgttcatcagaagccttaccaatatcataagacagtcatttaacacatattttgtgtgttatatgtattatatactgtattcttaaagtcagctagagaaaagaacatgtttttaagaggatcataaggaagacaatatatttactattcatgaagtggaaatggatcgtgtttagggtctkcatccttgtcttcacattgagcagactgaggaggaagaggagaggttggtcttgctgtctcaggggtggcagaggtacaagaggtagaggaggtgaatagggaggaagatgatttaggtacactcagtataacttttagtgaaaacaatccgtgtatgagtggacctgtgcagtacaaacctgtgttgttcaagggtcaactgtactaattataattctgtcagtctgttgtttaagaaagtaaaagaacacaatctcagttccaaaaatctgctcatttttttctacttattgtctgtaatgctctgtgaatttatactttatgattaaaatatcatttgtacatagaaacaatagaatttagtgattgcatagatgttaggaaaagggtaggaattaagaatgactccccagatttctggcaagaacagcttggtagatggtgatgttatttgtcaagatgggaaacattggacatgcagcacactttcaggacatcatctgtttggttctgaatatgtttaagacatttatgagacatcaaaattgagatattaataaagcaattaggtattcaagtttggagttcaaaagagatatatggctggagatacacattttggaattaccagcatatttatactatttgaagacacagggatagaagaaatctcttagtgagaaagaggaatgtgagaaaaggatccataaaggtgacatcgaaggagcctccttaaggaaattgagaagaaataactagaggtcctgtgaaagccaggaaaatgtatatgacaaaaaagaagcaagtgtttccagtaggaacaaatatcagatacctatgagcatgtgcatccaaatagcctcatatgattctggaatgtagtgttccagggaagtttttgagttttttttcttatttgataaaagtatcttcaaattatactgaaaaattattttttaccctttggatatttacagggatatgaagattggttacggcataactcagataatgaagtaaatggagctcctgtttatgttgttcgaagtggtggccttgtaaaaactagatcaaraaacattcgggtatgcatctggtaaataatggaaatcaactttatcttgatatcacaggacataattctaatcttgatattaygttttagttaaaagcctactttcctatgctaaaatactgtgatakgctgcttctttagagcccaataaaagtaagtccttgccttttaaaatttataaattcactcttccccaaaattctttataggtgggtgatattgttcgaatagccaaagatgaaatttttcctgcagacttggtgcttctgtcctcagatcgactggatggttcctgtcacgttacaactgctagtttggacggagaaactaacctgaaggtttgcttgcatatgtttgagtattgctcttggtgaacaaagtgtctttggattataattatacttaactttggttaaagtagtaaagtttgaccagattaaggggaagtttttaaaattactatttcaaaaataaaaaggttttaagaaagaattgatgttatatctttatttcaagggtagcctcacatgggtttaatccaagttaaaaacagaaggtgtttttaggaaaaatataatcttttactatttgtggtacttttaaaagataagggacaaatttatattttctcagttttcagagggtaatcaaaggtgaaaattcacagtttttcctattaaattacttatgataaagtaatagtgactatgcacacagacttaatttccttatgtgcaaatggcctctttagacaggtaatgatagtagcttcctttgccccttgtttattttacatgtttctttctcttctgttgtctagctgagtgatctcaagtacagtatgccattactttacctataaaagagatttgaaataactgatattgaaggtcgcaatttggatctgaaaactctacagtttaattcatttttttcagacacatgtggcagttccagaaacagcattattacaaacagttgccaatttggacactctagtagctgtaatagaatgccagcaaccagaagcagacttatacaggtatggtgtgatattcagtatacttattttaagtcctatttacagacctcatttttaaataaccataaacataaaatgaaatctttagctaattggagactgtatttgtggggtgggttggtgggagatgcaattaatggtgaaaaaaactaagagcagaaattgctagaattctaagcaaaagataatagttcaaagccagagtttatattcacaagtttcttcacattaccttctattttgctatgaactagcatgctcactttgtagctataacagtagttatagtagacataagattattttcttagaagaaaataatgatttttttggtaagctccatgaagccagggactatgtctttgtttttaccactatagaggatactgcttttaaattagaggatactacttttaaattataaccttataaagttttcaatattttacttacacgcacataataaagtaaaaaataattttctataaatatataacagctatgagtttctcaaagacagaaactattattcatcttattatctatcacagtgaacacaaaataaaaactatttttctagtttgttagatttttaaagatcttgtttctgaaaggagagaaaggaacagaggaactaactgcttttaacattacagtttgctaaacacagtgttgtataccttcagtgatcatcttcagtaatcctaccaattatatgtgggctgtggaatggaaacaactttttattattaaaaaattaaaygattaactaagttcatttttactcaataagtggtggtagactataaattacagcaaatttgtagaaatcaccctcagcttcttgtcatattatatatctccccctgttggttgaaatgtttcaaagtctttagccgttggcttttccaaacttacgtatcttttttttggatccatctttataatggaggttttctctatgtgatgttataaaaattgtatactttcatcaaagtcaaatgcagtatagaatttgccaaataactaaaaactttggaatcatatgctttaaaagcacttgatagactgactgtaagacatttaactgtgaagaattttaagatttctatattgctgttatatcctggtctgaggcaatggcagattgtaaaataattattaaaaaccagaaaatggacaactaagaactaagcaagcataagattaatatgagatgaagtataactaatgctttggtgtatggtttttacattatcttggaacatggggagaaagtttgaaaaaacttttttaaataaacactttctcttattggaagtatgtgttttgttttaaatataagtaaaatgtaatcattgcaacaggcttttatagtagaaagaaaactcgtaattatatcactacttaaaatctttgaatgccatttttattcattcattcatttaacaaattattgtttagcatctgtgtgctcattgtgataggtgaataagatgaaaaggaatagtttccctccttgaggaactcatagaagttagagacagtatttatataaaattatatctttcattttattatgtgcttgtaacacatatatgtgctatatattatatatatatatatacacacacatatattacatrtgaaatattgcaaacattttatatgtccaagtaggaaaatgcttagataggtatatatgtagatatttaaaatctttttaaagaattgaatgatataggtacatactgaaatataatgttaaatgaaataagatacaaagttggggctctcatatgatcccagttatgtaaaaataatgtgtgtgcaatagcaaagacatggaatcaacctaaatgcctgtcagtggcagattggataaagaaaatgaggtacatatacaccacagaatactatgtaggcacaaaaaagaaagagatcacgtcttttgcaggaacatggatagagctggaggccattatccttaacaaactaatacaggaacagaaaaccaaatactgcatatccttacttataagtgggagctaactggtgagaacacatgggcacaagggaacaacacacactggggcatactggaggatggagggtgtgaggagggagaagagcagaaaaaataactgttgggtactagacttagtacctgagtgacaaaataatctgtacaacaaacctttgtgacacaagtttacctatataacaaacctgcacatgtacccctgaacctaaatgtttaaataaatgtgtgtatatatgtactaaataggtagttaggtgacaagatggaatcattgatagctgcagaaagaaaaacctggaggaattgtagatcaaaatttagtaatattctcgtggtaggatttctrctgatttttaatcatctttttcttttccattttttaaatatttattttattttattttattttattttatttatttttgaaacagtgtctcgctctgttgcccaggctggagtgcagtgacgcgatcttagctcactgcaacccccggactcccgggttcaagcaattctcctgccttagcctcccaagtagataggattatatgtgtgtgccaccacaccctgttaatttttttgtatttttagtagagatggggtttcaccatgtttgccaggctgttatcaaactcctgacctcaagtgatccgcccacttcagcctcccaaagtgctgggattacaggtgtgagccaccccgcccagcctaatatttcttttaagaatgtggattggttttgtgattttaaaaagtattttccattatagtgaacggtattcttgacctttttttaaatattgcaggaagctgaattaatgatcattttaaatggctatgaatagtccaagtgcatgtactagaacctaaccattccccaacctttccatacttgactcctttcgttgttttgctgtttcaaatactgtatggtacctcattacaagtaaattcaccaattcaaaatctagtggttgaatagttcattgctttctccyctttgatacaatttgctaacttgtcttccaggacactcccctctcttggtttacctcctacctcactattccctctgtctcagtcccttttgctagtttttcctcttgtcccagtcttcttcctgttagagtgccccaggacttgcactgttccttctctaccttacctttcgctatctaccctcactcccttggtgatctcacccaacctcctggctttaaagactgtctacatgctgctgactgtcggatttatttctctatcccagacttctttcctaaacttcagctgcctgttctacagttccacctggatatttagtagaaatctcaaattaataatcaagctgaaaactaaactgctaatcttcctgaaagaaaccttttctaccagcagtctttctcatctcagttgatacagtccatccttccarttgctcaggccagaaaccttggaatcagccgtgactcctcacatctcctctcccttcgtctttcttcacctccttactcacatctcaccccaacccatcagaacattctgaaggcttaccttcaaaatacatccaaaatctgaccatcttttcctagttttgtctgagccagtaccatctcctgcctggattactgctattttatagtctgttctcacaaaagcagtcatagtgttcctttttaaatgtaagtcagatcatgtgactcttctgcttaaccctgtagtggctcaccatgtcactcagagtcaaagcccatatgtctataaccatctctaggatctgcccccatcccccatccccaacctttcttctctgccctgtttgctgtccttccacctctagctcatcctgcccatacactgacctccttagttttccttgaacataccatgtctactcccacctggtcactagacctagcccttgtctaactcttgagtaacaccttcaagtctgcttaaatcacctcctcaatggaggcctaccttaactacttagtacgcacgctgatccttcttattctgttctgctcttctgttttcataatacataatattttctagtatactgtgtaatttacttttttattatgttcattgcttaccatctctcccactagaatgtaaactctagagcaggcatctttgtgtattttgttcactgatggatctcaagcacctagaacagtatctgtcatcttgcaggccttactgtgtatttgtcgacagttgatagagtaaacattgtataccctttgattgaattacaggttgaatatccctaatccaaaaattcaaaatccaaaatgatccagattcttgccattttgaaaacatttattcattacctcattcatagctggagtagagatagcaagaattctaaattttttaaagcttaaggactgataagtgtttttaaaatgatwtatagcaagaatattggaccattcatatatacaaatggttgatttttgtttcatgtgtaagaatggtgcaggccgggtgcagtggctcacacctgtaatcccaacactttgggagaccgaggtgggcggatcatgaggtcaggagatcgagaccatcctggctaacatggtgaaaccctgtctctactgaaaatacaaaaaaattagccaggtgtggtggcgggcacgtgtagtcccagctactcgggagactgaggcaggagaatggcatgaacccaggaagcagagcttgcagtgagccgagatcgcaccactgcactccagcctaggcgacagagcaagactcgtctcaaaaaaaaaaaaaaaaaaaaccaaaggatggtgcaaaaaaacagccattgatgtcataagkgatattatatgtttttgtaatgtgaattttttgatagattcatgggacgaatgatcataacccaacaaatggaaraaattgtaaggtaagaattaatttgtgttatctaattacctttaaatgggaactgtttgggggagggactaraagttccaaagggagattatgtaaataagcagcccatcatgggaaagggttaattttgttgggttttgtttgttttgttttgtttacatttagtggtttattatatcacttcagaatcattcagtgcaagctagagtgtttagtggtcaacccagaactgcttacttttctgattggtttatcatatcctttataataaaccactaaatgtaaacaaagcatacagatgaagagatgctcagggccagatactggggaagggttgtggagcttccgtgctctccctgggcgtgccactctccagaaacctctggaagccctcccatcccatttctcttggtttttttatggaagcttcatgacatcagctttctttactccagagtatagggcaggaaggaccctctctggggatggccttaagacccacaattagaaaggtgggggaagagtagagtcctaccttggggtgaaaggagggcaggagaaggtcagaagcctgctcctgaggctgaacacacccaacattataacaaaagactgtaacaagggctatgggagttatgagccagggaccacggatgaaaactaatgtatgtatcataacatcacaggccatcccctagttttcaaacacaaatcccttacatcaaaagaatatacaattcagaagatattgccacattactagaatcccattcagttgttaataattagtccagtctatcatagtggataagtatctctcagagtaaggtcactcaggtttgcaggcttcttaccagtcctctcagattccaaaagcagctgtggtctcagcaaacagacagcttcactctttcaggcatctggtattattgagctaagagacaatgtaatctcttgctctgagcctctttcaaggtgttaatgtaatgttagatttccctcaacttgtaacccatttattcattcatttaccctcagctattatttctccttttctccattaatacccaaacttttccaggaaagggttaatttaaaagcactttgcatttcatctgctagtaatttgtggcagcagcaagtgaggatgaaacaaatcccatgaaatgatatcagaataatttagtaagattatttgtgtttttgcatttctttttctgataatactaggtagtaatattaaaaggaaacatagctgcttttttgcactccttatacatttaaaccgacgatgcytagtaagtctagaatatgaaaaatgttttatatgatgtttaacaagtataagtgctatgctcttcttcacttcagaatcattcagtgcaagctggggtgtttagtggtcaatccagaaccgcttacttacttttctgatttttatttttcttggttgtttcagattgttttccctcaatatttgggttaatgaatggctcctaaatgaaaggctttgtgtcagttcaaagacatgctgataggatatgattacgttgttactcatgagcgttaaccttatttggaatcaatcttggaatcagctcttgagtttctaatcgcatttgacattctacctcttttctggggacatgttcagtttatactggctgcatgaaataagtcactataacagaaagagttgagcattttttaatgaaatcctcaagacaagccagcaaaaataccatacattcacattgattcacatttttaataagcattaacataggagcatgttcagtaaacactgtagcaagatctttgtatgtgtacgatccctgctgaataactatgcctaggtttattttgatttttatagggaaatagtgagaaatgtgtggatacatagtctgagttgcattaatatgtaaaggaaaatagcagttatattacttcagcccctagaatggttaaaaaaatgaaccatgttctctactaaaacaacctgaccaaactgatgaattatcttttaatctgaagttgtcattatatcccaattttacatgccagtgtgagctaaaagtatttctgtttattgttagaagcaacactgagtgaaaaagagctattttatagctcctaaaatagttttcatattgatttggactatccatggagtgtactccaaatatgactgtattggttctccttgcttcattgcaattttttacagtgtttgggtttgcaggtgtcttcataaatggttcagattctgtttggtttggataattgtgtatgcatatttcagaaaactataaggaatagcaacaaaataattgctttttaacttttccatagaagattcttattttgctatcactaagaagatcaatttcctttctagttattccttgtcgttttatatctcctttatggagagaaattcaaacagcaagaagacctgtgcttcaagaagtatgcaatgcaagtagtcaagttatactgtgcgatcttgcctagaaaaagcactaacataccttgtactttgtattttataattcagtataattgtgcagaattcatccatttatatgcaaatcatactayagtttatgtttacgttgtgttctaattctttattttccctttcaaagctgtttattaactttgctttaaaattttaaaatttcatcttctgccacacatttttaaatcgctgcttactctttgattttgctgaattttatgtttaaaattttgaaactagtggctttgtgactgtatttacatgcataatcatttttctgagccactaatcttaaagcaggtatttgttgttacagtaactaacatcatgattagcctaggcagcctttttttttttwttttttttttttttwttttttatttttgagatggagtctcactcttgtcrcccaggctggagtgcagtggcgcaatctcggctcactgcaacctccgcctccagggttcaaaaaattctcctgccttagcctcctgagtagctgggactacaggcgcatgccgccacgcctggctaatttcttttgtattttagcagagacggggtttcaccatgttgcccaggctggtctcaaactcctgagctcaggcaatccacccgcctcagcttcccaaagtgctagcattacaggcgttagccaccacgcccggcccctgggcagctttatagtagctgggattttggttttatatgaaagtggtgttatggctatagcttaagtaccttctgctgaagatgccatttcagaattgaagagtttttaatatattcagtgctttatggttattttctttttttcctagacctctggggccggagagtctcctgcttcgtggagccagattaaaaaacacaaaagaaatttttggtttgtacatatttaaacattttaaattattgatttgtgttgatgctttatatgaagtacttttaaaagtacaatgtggtcttttggttagataatttattaattatttgtcatttatgataattttcttataaagtttgtattacagtagtcgtgtattgaacttttgttttgttgatgatccctgttttttaatagtagactagaaccttgmtcttatgttatctttacggatacttgtgaaactgagtgcagataatttatataacacttctagtaatggtgggtgagaaccaatataatatggtatcatggtacagtaaaccacttctataatttcattatgattattagattggattaataactgcagatttatccattcatacattcattcaacaaatttactgatatctgaatatatactaggtactattggaacatacactgattggatyaaaaggatgaataagtactgctcttgccttggagatggatcaaaaggatgaataagtactgctcttgtcttggagatctaaattaatacagtacactctgagtcaactataagcaaattgtgaagttgatgataacctttagctgttagctagctcctcacatttcaggaatggcccttagtatcttggcccactgtgttacccactggctgtctgcagcttgtgagatcttctttcccatttgctctttttctgttacctgtactatatcttatctctcagtgttagactctctgataaagaagtccatatgtcgagaaaaaaaaaaaaacacaaaatagcaagtgttggtgaggatgtggagaaattggaacccttgtacattgctgatgggaatgtaaaacgttgcagctgctgccttgaaaaatagttttggcagttcttcaataagttaaatatagaattatatgacttaatgatcccacactacatatatacccaaagtaactgaaaatgagtgttcaaacgaaaacttctacaagaatgttcatagcagcactattcatgatagccaaaggttggaaatagcccaatgttcattagataatgaatgaataagcaaaatatggtatatccatataatggaatattattcagctataaaaaggaatgaagtattaatgcatgctacagtatggatgaaccctgaaaatactatgttgagtgaaagaagccagacacaaaaggccacatgttgtatgattccatttatttgaaatacccagaataggcaaattcatagagactgaaaacagattagtggtttccaggggctggggagtagaggagaatggagaatgtttgcttaatgggtacagggttttctttgggggtgatgaaaattcaaaattataaacgtactaagtgccactgaattatacactttaaactggtaaatacatatgtttttccacaattaaaaagaaatctgtaaaaatattctaatagcagaaaccagagtaaaccttgagggcttttagatcctctaatataacactgtactttaaaacttttttttttttttttttttgagacatggttactctgttgcccaggctggagtatagttgcacgatctcggctcattgcaacctctgcctcccgggttcaagcaattctcctgcctcagcctcccaaatagctgagattacaggcatgtgccaccatgcccggctaatttttgtatttttagtagaccacgttggccaggttggtctcgaactcctgacctcaagtgatccacctgccttggcctcccaaagtgatgggattacaggcgtgagccactgcgcccggccaacacatctttctagtagtaacttcgtcactcctgtttactttaaagtaaaccataatgaatggggtccaaattttgtacactcttaaaagaaaatgtgaatttgaatgcctttagatgggtctgtcttctgttgttttgcctcagtaccacctctccctattggatcattctggctattttaccacgtttctataatctctatttgagttataataccctgcctttaaggaataagtcaagataaaacttccaggacaaatatttaggaagagggcatgaaaggttctatattgcttttcaaattgtactatttagggatgggaatgaatatttattgatcatctctcagtttttaggcattttgttaatttgtcatacagacctcacaactctatgaggtattttttcccatttaaagatgggaagattgagactcacagaaattacttacccgaggatgtagaactaataagtggcagagctagaattcaaaccaaggtctagctgcaaagttttttgataagctggtctcacctaattccatttgttgtccagttttagtcccattactactgtcatccttgctcatctcaaagtcattcaataggcgcacattttttaaatagcactttccatgtgcttacttgatttactctgacagacttccatgttatctctccaatggttatggaataatgtctagacccccgattccagcattcagggcttttcacactgtggccatagtccattgtcccaacctaacagaaagtgcttttccatatctgtctttsttaacactgctgtatttgtaatggccttccctgacacttttatctttccagattcttttcctctatcaattccaattcaagtaataaatttttcattcaggtatctgttacaactcaggaacaggactccatgccctcccccatttagccagttgagtgactggggcttcccaaaattggactcagaaagccttttagtactctgaaaatacttaaagaaaagcaaaattataacaactgtcagacagtacactaaaagctttcatgctggtaaatatatttatttcttgtgaaacatgctagaggattattttaagagacaattttgttttattttacaggtgttgcggtatacactggaatggaaactaagatggcattaaattacaagagcaaatcacagaaacgatctgcagtagaaaagtaagaaaactgttttcatttatttatatgtaattataactctacattttttattcgtttggtataaaatattatatatayaatatatattaagtaaacagaatgaaaaccttggggacagtgatagtttcttatatttttacatacaagtaacattttgcacagtattggacatgtagtaaatgctctatagtatgacttttaaaataaatactattgaataaatggtggaatcacttaatcacactaacgcagataacagttctaaaactgaaaaaaaaatttaaataaacaactatttgaaaacattggagacaaaccagaatcgaatagaaatgggcaaggagtgtaatcytgaaagatgatagcagcaagggggaaaatttaagagtatagctttttgcctgagggcactccccagtttatgtgctgcttgggacatcaaaaagtctgaactttactggatagaagtatcagaggacaaggttaatagctggaagagcagctggaaagttaggggaaaataatgtaaggggattagcattaattcccttctgtaagcaatgagatgtaagctacagaatggaattaactctaaaaactgcacataaattctgcccaggtccttggctgactgctagaactatacatgtgcaagggagacaaaagaactcaacagaattttactgctgcccattgcattggagacacagtttgttgaactaggtgaagttaacttcctactggaataaaaatagcactcttmtgaggaacataaaagaatacagactgtctacaatgtattattatraagtccagtctgcaataaaaaataagcagaatatgaagaaaatgtaattcatccataagataaaaagcactcaatagaaactgtctccaaaatgatccagatcttgcatttagcagacgagaactttaaagcagatattataaatttattataaacatgtttaagggcctaaaggaaaatttgaatgaacatatgggaaaacacagcagagaaatgaaaactcttgacttgaaaaacataattactaaaatggaaacatcattaggtgggtctcaacaccagactgaataaatcagaccagtgaacttgaagaaaacacaaattactcagtcgaagaatggagaggaaaaaagattaggaaaaatgaacagagcttcagagccatgtgggataatattaagctgtttggcatatgtgtaattgattcccaaaaaaagagaaaaaaggacagaataaaaatatttgaaaaaataatgactgaaaatttctaaaatttgaggaagaaacttcagcctacgctaccaagatcagcaaactctaagcaggaaaaatataaagaaatataaagaaacccacaccaaagcacatcatggtcaaaatactagaatccaaagaaaaagaaaatatttcatggagccgaagagaaatgcatcacatgtaaatgaataacaatataagcgataaccagttctcatcagaaacaacggaggacattggggaaaggacatcctcttcaggaaatgatgctgggaaaattggatagctacatgcagaagaatgaaactggatccctatctttcaccatataaataatcaactcaacgctgagcacggtggctcatgcctgtaatcctagcactttgggagaccaaggcaggaggatcacttgaggtcaggagttcgagaccagcctggccaacatggtgaaactccgtctctactaaaaatacaaaaatcagccgggtgtggtggcgggtgcctgtagtcccagctactcaggaggctgaggcaggagaattgtttgaacctgggaggcagaggttgcagtgagctgagatcacgccactgcactccagcctgggcaacagagcgagactccatctcaaaaaacaaaacaaaacaaaaaaaaagtgtatcaaaaccacaatgagatgtcatcttgccagccagaatggctattattaaaaagacaaaaaataaataaataaataaataacagatgctggcagggatatggagaaaagaaaactcttatacgtggttggtgggcatgtaagttaggatagccactatggaaaatagcctggagatgtctcaaaaaactaaaaacgtaattaccatatgatccaacaatcccactactgggttttatccaaagaaaaagaaatcagtatatcaaaggaatatctgcacttgcatgtttattgcagcactattcataatagcaaagataaggattcaatctaacggtccatcagcagacggatggataaaaaaatgtatacatacctaaaaaaaaaggtatacatacccacacaatggaatactatttggccataagaagaatgaaatcgtgtcattagcagcaacatggatgtaactgaagatcattatgttaagtgatacaagcaagcacagaaagacacttcattagtggcacacacccgtaatcccagcactttgggaggctgaggtgggtggatcacttgaagtcaggagttcaaggccaatctagtcaacatggcaaaaccctgtctctactaaatatgcaaaattagctgggtgtggtagtgtgcgcctgtagtcccagctgcctgggaggctgaagcagagaattgcttgaacccaggaggcagaggtttcagtgagccgagatcgcaccactgaactccagcctgggtgacagagcgagactccatctcaaaaaataaaaaaagactctttataaatatttttcaaagaaccaacttttggctttaattttgtgtattttttttctcttttccattgccttcagctcacatcttcaattaatttcctccgtttcttctcaatttgggtctaattatttctctttaacttcttgtgatgctagatgaactcaaatgattaattttaagctttctttttcccttacataaacagcacaaaagatgatggggggctttaaatgaactgttacaaaggtcttacattttacatgaaataatacaatagcatctataaattacaataaggtaaagatgcatattctgacctctagagcttccattaaaaacaataaggcaaagatttatagctaataagttagagcaactgaatattaaaatgtttggtaaacacagtaaacagcaagaaaggaagaacagcgaaacaaaaaaccaaatgagagaatagaaaacaaatagcaaaatggtggtccgaaatttgaccaaaaattacatgagatataaatgcatcaaacagtctaatgaagtcagagattgtcagattggataaaagagccagacccaactatatgctgtctagaagaaatacagtttacatacaaagatataaataggttgacatcaaaagatatactatgtatattgtaagcctatgaaaactgaacactagaatagttccataattatacatggaaagttcatctagacagatcatatgatgtgccataaaaccaatcccaaaagattgaaatcatacaaagtatgttctttgacaatgagggaattggattaaaaatcaataacaaaatctgcaaatattttgaaattaaaaaacaactcttttaactgactcatgggtcaaaggagaaatcacaaaggaaatttaaatttcttcaaatagaatggtaattgaaacccaacacatctacatttgcagactcaaggcaaagcccagcttagagggaaatttctagctataaagttgacaaattcctgctgagattgacagattaagcaaaagagaagtggtataagagaaaaaaactaaaaaattacgaatgtcagggatgaaagaggggatagctccatagatsctacacatatccaaggataataaggaactactgtgaacaactttttgtcactgacttttacaatttagatgaaatgggcagattctttgaaaacacaggtaacttaccaaaattggcccaagatgaaacagaaagtctaaataacccttaagtctgtcaaatagctttaagttattatttaaaaatgtctccacgctaaagatttgccttttcaacacatggtgctagaacaggtggacgtctgtatgtcaaaaattcaatcttcacccttacccgtctcccgcatatacaaaaactgactcaaagtgtaagatctaagcataataactaaatctgtaaaacatgggagaaaatctttgtgactttgggttaagtaaagatttcttagatgggaaatgtacggaaaaggaaccaccaaaattgatagcttaaacttcatcgaaatgtaagacttaaacacttaaaaaggcactgtttatgttgtgaagatgccagaaactaaaacaaaaaatttaaaaatacaagccatagaccagagaaaatgtctgcaaagcatatatcttgtaaaggacttgtacctagactatccrgtctcactactttttaacattattctagaagcctcattcagtgcaacaagttaaaggaattaaaagccataagtactagaaagcacgaagtaaaattgtcctactggaagacacatgatttttcatgtaaacagacataagtattcaataagaaaactataataagcaagttggtctcagaatacaaggtaaataaagagaaaccttttttatttttatttttttgagacagagtctcactctgtcaccaggctggagtgcagtggtgcgatctcggctctctgcaacctccgcctcccgggttcaagcgattcttttgcctcagcctcccgagtggctgggaccacaggtgcgcgccacaacacccagctcatttttgtattttttagtagagacagggtttcaccatgttggccaggatgtcttgatctcttgacctcttgatccgcctacctcggcctccctgcaggtgtgagccactgtgcccggccaataaatcatttttatatcttataatagtaagaaacagttaagaaaatgaaatttttaaaaggttatatttacagtagtatcaaaaagcgtaatatatttaggaataagtttttttttaacttgtgcaagatttatataatgaaaattacaaaacatggcaagataaattaagaactaaataaatggagaaatcacattaatagattgtcaagctcagtattgttaagctgtcagttactgtgtagattccctcagtctcaaaatcacagcaatctttttgtagtaattgacaaggtaatactaaagtgtatattgaaatgcaatagccaaaatgcatattcagatgcacagcaaaaacaatctcttaagaaagctaaaagatttaccttacctgatttaaatacttaatataaagctacagtaattacagtatggtwttaacaaagatgatagttcaatagaataaaatagagagttgagaagtagaccattcatgtgtgggtttgttgattttcaaccaagtaacaagtcaattcaatgaaaaatttagtattttctacaaatgatgcagcaattggatattcaaatgagaaaaacatgaaacttagcttctgccttatgctgtactccaaaaagttttgaaaacaagtcatagacctaaatataaaagctaaaattacaaaacttttagaagagctgggcgcggtggctcacaccagtaatcccagcactttgggaggccgagacgggcagatcacctgaggtcgggagtccgagaccagcctgaccaacatggagaaaccctgtctctactaaaaatacaaaaattagccgggcatggtggtgcatgcttgtaatcccagctacttgggaggctgaggcaggagaatcacttgaaccctggaggcggaggttgtggtgagatgagatcgtgccattgcactccagcctgggcaacaagagcgaaactccatctaaaaaaacaaaacaaaacaaaamaaaaaatacttttagaagaaaacttagaaagatatctttatgacttagagtaggtaaagatttcttaggatacaacaaatataataattaaaaattgataaattacactttctcaaaactaaaaacttctgctcatcaggctaaacatttaaagaaatgaacatacacgttacaaactgggagacaatatttgcaaaacatgtatctgaccaaagacttgtatcctgagtatataatatatatgtgcatgtgtttacacacacacacacacacacacacacmcctgcctacaagtcaacaatgaaaagagaagctaattaaaaaaaatgggcaaaaggtggaaggtaaccaccttttgtcatcttttcagctgaaaattacaaaacactgaggaaagaaatcaaagatctaaataaatggaacaatatatcatgttcatgggttgaaagattcgtacggtaaagatgccagatttcccaaatcgattaataggtataatgcaatttctataaaaatctcagcaagtttttttgtagaagtagaaaatttattctgaaatttagatagaaaagcaaaggaacagttttgaaaatgaaaaataaagtgagaagaattgctattgatgttaagtgttactatataagctacagtaatcaagacaatttggtgttggttaaagaatagatacatagatcagtgttacacaatagagaaccccagaacagaccaacactaataggcccaattgatttttggcaacagcacaaaagcaatacaatagaggaagtgtaatctttttcaacaaatggtgctagaacaattggatayccatagcaaaacaaacaaacccaaacccccactgtatgtaaaaattaattcaattagagtatagatttaatgtaaaacaaacttttagaagaaaacagaatcttcaggacttagtgttagacaaagagctagaagacatgacactaaaagcataattcctaaatcaaaaaaattaataagttgtagttaatcaaagttaaacactttggtgctgtgaaagaccctcttaaaaggatgaaaagacaagctacagactggggaaaaatayttgcaaaccacaaatcttccagaggctttatgtttagaaacataaagaactctcaaactcaatagtaattcagtgatccarttagaaaatgagcaaaaggcatacttcatatttcaccacatgcataatacatatttcaccagagaaaagctgcagattacaaataagcacatgaaaagatattcagcatcattacctgttagagagaagcaaattagaaccacattgggatatcaccacacccattagaatagttaaaatagtgataataccaaatggctaggaggtggagagactgaatctcttatatgttgttgattgggaattaaaaatagtatacccactctggaagatagtttgggagtttcttacaaaactaaacatgtttaccatatgacccagcagttgcactcttgggcatttaactcagagaaatgaattttatgctgacacaaaacctcaagcagaaatgtacatagccactttatttgttacagcaaaaaactggaaacagcctaatgtcctagaaatctttattgagcttttttgtgtatctgttgctgtagtaggttttctgagatgtaattccatctctttttggagatttcaatcaagttggaagttaaaactaatacacagtaaaaaaattaggtaataggagctgtggtactagttttaaatttaaataagggaaagttgaatgtaaaccaatgtaattaggacagactttaggaaggagatggattttgagttaaattttgaaaaataggttagtaatgtagggaaaaaggagaatatgtctgatgagggtagacatgagcaagaaagatggaaataaaccaggcattttgttgccacaaggagacatgactagtttagtgaaaagaggtcaaaatttagactcagacagatgtagatttgaatgtcatatcccttccttactagctctatggggctttagaccagttgttttcttctcttgatccgggtgttctcatgtataaaaatgcgagcagtactataggtgaagtgctgaatactatgcctaatacataataaccaaacgaaagccagttcctttcttacattccttatttactgtcacagcagaatatatagagtttacattggaacatggtggaatatcagcttactccatagttaagattaggttcaattatgaaaggcctagggagaaaaatcagaattcaggcatttttcagtcttttaaagagtttttacaaagcttgtgattcacattttccctcaatatttgttggatgtgagagttcattataataacataacttgttttgcatacatttgaatttataatgatgagttcctttaattgtattaatatgtttttaaacttaaagacatgtggcattaagcttacctaataaagagaagagggattctgaagtcaattcctgacatgtgtgattttgggatatttacagaattatttttgggctttgatctttgtcagttaaaaagtatataataatttcccctttacagggtttttgtttgtttgtttgttttttcgagacagagtctcgctctgtcgcccaggctagagtgcagtggcacgatctcgcctcactgcaagctctgcctcccgagttcatgccattctcctgcctcagcctcctgagtagctgggaatacaggcgcccgtcaccacgcccagctaattttttttgtatttttagtagagatggggtttcatcgtgttaaccaggatggtctcaatctcctgatctcgtgatccacccgcctcggtctcccaaagtgctgggattacaggcgtagtgagccaccacacccagccagggttttcatatagattaggtaaggtagtagatgtgacaaacattttataaaattttaatgctatacaaatgctatttttagctattacacttaaggtgggtgctgaaaatgtaaaaaaaaaaaaaacttagaataattacttatggcaaaaataactgactaaaaccgtcatttactgtaaacatttttaatggtaacatggctatattaaataggcttgtaacctgtgtgcactggttcttttattgctaataaataaattctatttaacrgttatttcttgaaaacaaaagctgtgtattttaaaatagttacagtaataccctctatgttttaatatcttctctaatacaagtactaattttcaagcaaatgaatatagtaatacatgakttgtatgttttatattctctttttcttccttaaggtcaatgaatacatttttgataatttatctagtaattcttatatctgaagctgtcatcagcactatcttgaagtatacatggcaagctgaagaaaaatgggatgaaccttggtataaccaaaaaacagaacatcaaagaaatagcagtaaggtattttatggtgttattgactgtgtcataaaggaaactattacttggcacgattagtgctttggtagtgacttctgattggwgagaccactgtaatcctaaaactgttggtactgaagggtgacagaaatggcattgcaaatgcagagaagccagcgtgtttgtactgatacgctttttgtagtttacggcataaaaagttgtattccctgtggcatgacttgaatagttcaaagaggtcacaaaattttaaatccatctatatttgcatttcacattaatactacaaactcaattttctcttccacttactgtgtcttataaatgaatcaaagagtaaatggatgtatttttaattttgtcttaataattcaaggatgcttgttatcagtcttaatatgaagtaatatgcaaattatgtcatatattttaaattgattaaacatggactaccaagagaatttaacctataattttggtaaataattgttctccarrtttcactttagattaaaatctttgtattggaagacaaatttggatctcaagaaactacaaagcaaataatcacagggtcgtatttttaatatcattcacaattaggtacatttcctttcaccaatgcatattgaaatatggagccgctaaagccgttaaagtaggctattcctatataatctgcacttaagagttttaatttctggcacttttaacctcgcagttattttataactttgtaaagttacactcaacttttagtagttatctgattttgaagggtaatagtagaatgggataaatacactgcagatattataattataattttgccaaaggtagtttcagtcataccaggctttttgttagcttctgaaagtaacgaattaagttacttgaatttaaccttttcatcatttactttatcaagattctaatgagcaataaaataaccagaggaaatgtaatgttaaaaagacaattcaataaatgaatttcaattcatgagactattctacctcagaatatagttgatggtctatgtaggcatgaaactttctggtaattttcatcagtaatactgaagaaattctagtttattttttcttwtcaaacaattatttccttttttctagattctgagatttatttcagacttccttgcttttttggttctctacaatttcatcattccaatttcattatatgtgacagtcgaaatgcagaaatttcttggatcattttttattggctgggatcttgatctgtatcatgaagaatcagatcagaaagctcaagtcaatacttccgatctgaatgaagagcttggacaggtgaaaatgatcctaatattttgtttctctaatttgttatttttatcaaagcaatacatggacaaagattaatgtaacaaggtattatgatgcttataccaaaaacaacccccctttgctccactcctagctgttcccaatttttaaaccctaagttgtttcttttgttatttaccactatatttctatttgatattctttcttattcttaagttttagacattatctactatggaatataaagacataactcttacactactcttcccagacacatatccctttgcttctccatagccccctaatactatcatatcacaatttgggatttaataaatatttttattaacattattatgattgttttaatattgttcactaattcccggttctatagrtgtgtcctgtaataccataattacatttcccttcttatatattttgttttcccaagagttatttgctctgttttttcatttcctcaatttccatgtgccacaaacaagtytstgataatatgtgcagcatctgtctatatattcaaacataccaggtaatctagaagttcctttcttcctccctgccttcctttttttttttttggtagcaatgtttttggaggcttccacctttctgctccgattggattattctttactctttctgggcttgcttctcagctgtcactctggacttcactttaccatcaccctggaaattcctttgcctctctcctgttttggatctcctctttcttgcatcccatgtcttcctacctgtggcttattctcttttggtgctgtacatcttctaataacttcctgagaaaggatgtatcagaggataatgttttgaaacttggcatgtctgaaaatatctttattctcttttcacacttgattaataatttagctgttattgcattgcagattgaaatcttcagaaatttgaagggattttattgttttctagcctccagtgttgctgttagagaaatccagttccattctgattcccaattctttatgtatgatctgttgttttatctctggaagctttaggatctccttatgcaatagttctgaaattcatgatggtgtaccttggtgttcgtttttccttttttattttttgtttcatgggcaattaactctgtgagtcttttcatcctggaaatacatgtctttcaattctaggaaattttcttgtactattgttttgataacatgtctttctatgtttctcttgttttgaaacttactatttgcatgtcctaccacttatattgaccctttaattctctgacttcaattttcagtttttatttatttgtttttatattctactttctggtagaatgcctctgatttatcttttcagtatcttttgatttatttctgctataatatttttaatttctaatattttggtattctctggatagttttttaaaattgcctcttatcccatttcttgaacataatctattcttttacctccccgaggatattaatgacagtcaattgaagtcttcttctgctccctctattatctttgcttgtagtgcattttccagaacagccagttctgctataatgtgatatatgcgttcctaaaattcactgcataatgcaaaattgcctagtaaaagccacagggtttatgagagaatgggattaggggtacaacacaaaaacaataatactttttttttttttttttgagacggagttttgctcttgttgcccaggctggagtgcaatggcgcaatcttggctcactgcaacctccgcctcctgggttcaagcaattcttctacctcagcctcccgagtagctgggattacaggcatgtgccaccacgcccggctaattttgtatttttagtagaaacgtggtttctccatattggtcaggctggtctcaaactcccgacctcaggtgatcctcccaccttggcctcccaaagtgctgggattacaggtgtgagccactgtgcccagcctaataatacattttttaaaagataggaacctaataaaaacagcacttgccaaattgttcatgaatacacaaatgcttcaataaatacggcacttacctggacctgaagtttgcctgtggaagataggcatcagaagggttgcaacttaagtgttactgtgaagtgtgaaagggaaggttatctgaaatcagagggaaggttgtaataccagatgtggatgagtgtgactcataacacatggtgaactgagatagctagtaactgagttttgggcaaaatttgcacaaagttttgattatgctcaaattgtctcttattgtatcagttgcattgggataaatttgtgttttcaagacagtgttacaacagaactgattataatttgtttcagattctaccttttatgtaaggagtgatcctcaaatggatgctaatctttggctatcatttcaaatttaaaagtactctacccaggaggctgaggtgagaggatgacttgagcccaggaaatcgaggctgcagtgaaccctggtcacaccactgcactccagcctgggcaacagagtgagaccctgtctcaaaaaaaaaaaaaaaatgaaaggctgggctcagtggctcatgcctgtaatcccagcactttgggaggccaaggtgggtagatcacttgagcccaggagttcaagaccagcctggagaacatggcaaaaccccatctctacaaaaaaatacaaaaacaaaaaatacaaataytagctggaatacaaaaattagctgggcgcagtggtgtgtgcctgtggtcccagctacctgggaggctaaggtaggagaatcacttgagcccaggagatggaggttgcagtgagcccagattgtgccattgcactctccaacctgggtgacaagagtgaaaccctgtctaaaaaaaaaaaacaaaaaaaacctcaggcactaatatgcttatcagaagctattgattcagtgggccacaccttaaggtaatgagctgacaggcccagcaggtaatatttctgctgcttatggctgctagagctggccattggatacctgtttttagtgcactgcctcccttctgtgttcagctgtctgcggagaccagattctgtccrgttcagcctactaggggaatacaccttccagctgttgctccaataaatgaggggcgttctgaagtttgcaacttttaaagagatttcagaatttaaactactcctgatagcttgtattttcagcctcatcctgtactcccacattcaggggtagctggtaggtctacttcctgagcgtttctgagaatgggttttctcatcacttgggtttcagattctaagttctggtacatcagttaccactcattcatctccttttccatcttccaaacttgtgtcaatcttccctctcatgctgacttttttaccattatttttgttctttttctgtttttttttttatcctcatggtgaagttttaagagaaccagagataattaaatgtgctcaacctgtcatgtttaaccacaagttgatccatttatttatttatttatttatttttgagacagagtctcactctgtctcccaggctggagtgcagtggtgcaatctcggctcactgcaagctccgcctcctgggttcacgccattctcctgcctcagcctctccgagtagttgggactacaggcacccgccaccacacctggctaattttttgtatttttagtagagatggggtttcaccgtggtctcgatctcctgacctcgtgatccacccgcctcggcctcccaaagtgctgggattacaagcatgagccaccgcgcctggccaatccatttatttttagtaacatttaggaggccttaataatttatgttaaatattaattcatgtcacatttctttaattacatattatatatgtaaggcctaaaggcccatttttacttttctgaataaatttttccaatctgcctttgacctttctttctcaactctcttcccctccttttttcttcatgatagaatttttgttttcctggaacctcacattgtgtatgcatactcatgtctgctttgtctttaagaaacttctggtgattatttctttaattactgattttctcagcctctctttttgcttttgaaactacaagtatttaatrtatgtttactgcctctattcctattttgtcttttaccaatgaaatctactttatttcatattcttctgtgctctttcatttccatattatccaaaaaacaactcttaggaaggtttacagtgatgacctgtttatcatgaaagttaaaagattaaacttcttgattttatatatatatatatacttttaaatcaaagttaatttattttatccatccctaccatctaatcttttttctaaagaatcctccatgactgatagtgcagtctgtattctagtaacctctgagtattatttctgtttgattgctaatgtatcttatatattttctktataactcatccctcattcttcctgatctacatgtgtgggctttttttaattaacttgcatggggtctttaaattccagttcaacattgctataaatactgggcaacatttaatatcaaatagtaaagrtaaagtattctatctcttatttccagtttcaccatttatttgctttttgactttaggtaagttaagtaattttttgccaaatttaaccctacctttctttttggatatcgatctttttatcctggaattgtgctgaacttatatattctattttttttagtcagttttttagaattttctgtatacaaggtcatatcatgtgcaaatggagatagttttacctcttgttttccaatcatgttaacttttatttcccttttcttgcctaattgtcatggctagaaccttaagtacaatgttgagtaaaagtgacaaaagcagtcttattcctgatcttaggaagacagcattcagtctctctccataaggtacgatgttaactgtgagttttttatagataccctttatcaggctgaggaagttcctttttattccagtttgttgaacgcctttatcatgaagggtattggatttttatcaaatgctttttctgtacctattttggtggttattttatcaataaaatgaaggccaggtaccattttattaatatgatggattacattaatttttttaagtgttgagtcaatcttgcaattctgggataaatcccacatatttgtagtatataaccctttttatatgtttctggatttgatttgcatctctttataagggatgttgatctgtagcttcttttcttgtgatttctacatccctttttaaaggacttctttctcaagtcattattgcagtaatcagattttcatgatgatcctggttggatcaagacttgactattacatccttcttttttcatggacatacyttcttttaaagtactttttctggaattagtctccaaaagtaataaaataatttgtcttacttacttttaaaaatatgtttttttcttttaaacatcgatttttttcactaaatttgttttctgtcctcagtttcaacttctctctgttttagacaattcgcacctctaacttcttgtgttgctgtcactatcactgtgtattcctattcctagctctgcactatttctcctcactcggataccctttcccattctacattattaagcatcctttccaccctgctttagagataattcttagagtcctactacttaaaataccttagccaagaaaaagaaaagaagcattaataccaaattctcgtcaattctacagataaacatgtacgtaaagatgccacaaacttcaaaatctatgtagctttaaactattttgtgttaccctgttttctttccttggcatctatatttatttaattgtgcttggattataagaatctcagcatccatatatcaatattaatagataaactggacttcaggagagcgaggacagagatttttttcttgtttaacrtaggaccatgaacacaaaggtttattttcttttgttttctatctctataggtagagtacgtgtttacagataaaactggtacactgacagaaaatgagatgcagtttcgggaatgttcaattaatggcatgaaataccaagaaattaatggtagacttgtacccgaaggaccaacaccagactcttcagaaggaaacttatcttatcttagtagtttatcccatcttaacaacttatcccatcttacaaccagttcctctttcagaaccagtcctgaaaatgaaactgaactagtaagtaatttttaaattaataaataagggtttcatatgaaataattctcttcagtagttgatgagttgcaggaaaaaaagtttgtgtcagtagagcaaggaatatacatttgaaattcatatatttgattcaacaatataaaatataatcctaagaatttgttgttacagcccagtttaacttgttatttaatacgtgtctgccttagctctttgagtatttaaatggaacgtagttaagcccttactgccttgaagtgaagaagactttctttgaaaaatagagcttaaatttatttaatactttttgagacctcacttcttctataaaaaagtgttcccctctacttgcaatgtggttgtacctcctaaaaagatgctcacgtgttgaagggtcctaagcaaatgtgacattttactttttgaaggcagaaacaaccaactgttattcaggcaatcaaggttgtagcactcttgttctagatcttagaattttgcytctggtttcctaaatggtatgtggaaatgatatttttatcatgaatattaattacatttttacagattaaagaacatgatctcttctttaaagcagtcagtctctgtcacactgtacagattagcaatgttcaaactgactgcactggtgatggtccctggcaatccaacctggcaccatcgcagttggagtactatgcatcttcaccagatgaaaaggctctagtagaagctgctgcaaggtaatttagtctgatttccaaatcttcggaaaaacaccatttaaataaatgtaacaatattagaatcatcatttaaaattttcaaacataaattcgtcattttaagttgtcagaattcatataaatacataaaaatagaagtacaatttaaattttaaatgacaatttgaagtcattttattatcaagcttgcattgagtctttttttaagatctctttgaaaatctgattactataaaaatctgtgtaatagaatttattaaaaatgcttgtgcatatgttgtactacacctactctgatccttctaatccttctagtccttaaaagtatatatatatgtttgtgtatgtgtatatatatttatatatttttatatacattttataaaaatatgtaagtaataaataaaaaattatatataacatatataaataaaaatatatattaaaaagaatatataagaatatatataaaatatatayatatattttttttctttttttgagatggaatctcactctgtcacccaggctggagtgcagtggtgtgatctcagctcaatgcagcctctggggttcaagccattctcctgacccagacacctgagtagctgggactgactacaggcacagggcaccacacctggctaatttttgtatttttagtagagattgggtttcgccatgttagccagactggwcttgaactcctaccctcaggtgatcaacccgctttggcctccygaagtgctgggatgacaggcatgagccaccactcctggcaccaaagttgtaatattaaaaggaaatatttttaaatgcattttgaactttgattttaaatgtttttattcaagttaagctatagtgacattgtgaaatatgcagtattatttcttaagtctcacttttttatccttttgatgtctaggattggtattgtgtttattggcaattctgaagaaactatggaggttaaaactcttggaaaactggaacggtaattttttttcatatattggaatgttttctgtgttaagtgtatatagtatagaataaggatcagtaaactgtagctcacagggcaaatgtggcctatattttctgtttttctacagcccacaagtcacattacttttttttttttttttttttttgagacagaatcttgctctgtcacccaggctggagtgcagtggcacaatcttggctcactgcagcctccacctcccaggttcaagtgatgcttgtgcctcagcctcccaggkagctgggattacaggcatgcgccactatgcctggctaatttttgtatttttagtggaaatgttgaccaggctggtctgaaactcctagcctcaagagatccacccaccttggcctcccaaaatgcagggattacaggtgtgatccactgtgcctggcccacattacatttttaaagggttgttttwaaaagaggtaaaatatgcaacagagaccatgtatggcctgcaaagcctgaaatatttactctctggccctttacagaaaaagttactgaactctgctctagaatgatgttaacattatattgtatctcatcatagttataacaatagtatgctttgaatatttcatctatattttaacttaatgattcttgaatttacttgtatgtttatttttagatgcttctgggtagtgagttttataggttcttctcactgaataaagaaaactttccttgtatttcctgtgatttttatctttcaaacatgaaggaacagctgtctatatctagtttttccattctttgataaattagttcatgcttaatatacttactcctttcatggttttagcaattctgatcatatgtcaattccagctgtgcttttccaaactatgcttttccatactagatagggcccattctttggctactttcatgtgagagcctgtctagcttattttatcaacttataaaccattattcaactcactgtttttcttggagatgtgtaaagatttcatatgtaaatcactgtgtaagattcatctggaagactttaagccacacctcatgtagccacacaaattcttttacagctccctagagaggcacgagggaatggacccccgcacacacacacccaggttcacagtcactgctataatgagcctttgatattaatgtgtgttgtgtttgtcaggtgtattaggacagaaaaaagcgttgagaatcagttaccttttttagtcagaaaaacatggagctgggcagatctggattccagttcttgctctgccactcacaagcttacctgactttaggcaaattacttaatctttctgaggttaatagtcctcatctataaaaatgagataagacctactttcttggcctctcatggatattaaatgacataaggtgtgtaaaatacatggcatttggtaattactcaatgtcagtctcttctatttcttccctgttttgttattaatggcatgtaacctatcatcatgaaaatggtattaattcttgttctcaattagccattttatcttatatatggattatttccatatagtcacttaatattattttaaaaaaagtaaagtttttgtctttcttactttcttttgtttaggtacaaactgcttcatattctggaatttgattcagatcgtaggagaatgagtgtaattgttcaggcaccttcaggtaaccaatctaaactttcatgaatttttatttatgtaatattaagagtctgataactcattttttttgtctctaggtgagaagttattatttgctaaaggagctgagtcatcaattctccctaaatgtataggtggagaaatagaaaaaaccagaattcatgtagatgaatttgctttggtgagtrcaaatttctatgatttaaaaaactctaaaagatatatttatgaaatattttggactttatttcttataatttatcaaaaattgtggacattctgcagttgtgttacactgtgtgttggctccacattccttttgtgaaaactgacttttaacgcaagcaaaaatatatcttctcttcaaacctactctacagtcggggcatttctggttacaaggtctactcaaactatgctattttagaagagtgtttattaaacaaacataggggaatcctaatgatgtggagaaactggaacccttatacacatattgctggtaagattataaatggtacagccacattgaaaaataatttggctaagttcctcaaaaggtaaacattgagttactatatgacacagcagttctactcctgggtggacacccaagacagctgaaaacatgttcacaaaaaaawcttatacacgaaatgttcataagcagcattatttccaatagccacaaaaatggaaaaccccaaatgtccagctaacaagtggayaggcaaaatgtggtatatccatataatggaatatcagtcagctgttaagaggaatgaagtaccaatatatgctacaacatggacgaatcttgaaaagagtgtgctgagtgaaagaggcagtcaaaaaaggccttatattaatactacatttatatgaaatatccagaataggcaaattcacagagaaagctcattaatgattgccaggggctggaggaaggggaaaaaggagagtcctcgtgggagcaatgagatattgtggatttagatagtggtgataattgcacaactctgtgaatatgcgatataacactgatttgtactgtttgaagaggtgaattatatctctcatttacaaaatttaaaaatataggggaatcttgttaaaacaaagagccatcattcatgtaaatggcaaaattattatgcagttctctctcagtcttagaacttcatgatctctcatttttgcatttctgtgaatgtgtgctccacactcacctctgctcatctgccttctttaacagtttatgatttttttcccattatttgtttcctaattgtttatgttccagtttacccaccacatcgtaacatctgtgagaacaaagacattgttctaccttatcaccattttaatatttaaaataatgctggcacatagtttgtgctcagtaagtatttgttatagaatgaattaattcatatattaataacagatggttttttaactattaattaaaagaagcacatttataggtatgggtcatttataagtcagggaatggcaatatttagaaatctgctaaatagggctgggcgcggtggctcacrcctgtaatcccagcactttgggaggccgaggctagcagatcacgaggtcaggagattgagaccatcctggctaacaggatgaaaccccaccagtagtcccagctactcgggaggctgaggcaggagaatcacttgaacataggaggcggagcttgcagtgagccaagatcgcaccactgcactccagcctgggcaacagagcaagtctccgtctgaraaaaaaaaaaaaaaagaaatctgctaaataatgttatatagtatttttaagtctacgctttccaagttgttattaggatatttattatggggctcagcacagtggctcatgcctgtaatcccagcactttgggatgctgaggcagtatcacttgtggccaggagtttgagaccagcctgggcaatgtagcaagaccccatctctacaaaaaaataaaacatagccaagcgtggtggcacatgtctgtagacctagctactcaggaggctgaggcagcaggatcacttgagcccaggagttcaaggctatagtaagccaagatcacaccactgcactccagcctgagcaacagagcaagaccctgtctctaaaaataaaaaagaatatttattattggttttcttgaggaaaatgcatgtagcaagaaaaggaacttttataagtctttagatttagatatcaactttcagagatgaatactataagaaaactttggccctagtagaaccagataatcaattctgattccaattcactggtgaagatatattacttaaaatcatttatttggtaaatctaaaaagtattttttataatggccattttattgacttatttgaaaggtaaattttgtcatgcaatgaatctttaggaaattatggtctcctttgctttagaaaattgtacgaagtaggtaaaaaatggaattgtaagttaaaacaggaaggtagaacctgcagctgtctctctctcttgacagtcttgaaggtattaagaactttctggctttccatgtaacacagtttaaaaaccactaataggatagtctttatgatctattctaggctctaatattctacaattcagtgaccttaattattttgagcaacttttttttttttttgagacagagtctcgctctttcgcccaggctggagtgcagtgatgctatttcggctcactgcaagctccacctcccgggttcacgccattctcctgcctcagcttcctgagtagctgggactacaggtgcccgccactatgccygcccaattttttgtatttttagtagagactgggtttcaccatgttagccaggatggtctcgatctcctgacctcatgatccgcctgccttggcctcccagagtgctgggattacaggcgtgagccaccgcacccagcctattttgagcaacttcttaagaaaacatcagaagttgaaagaggtatatgtgtcccataactcagatcagtagagctttgtgacrttatttatttcctgtcactaggtgatagtactttttaaatgatttgtgattgacttttggtactaggtcttcagtgtattttgatagygacttcttgattttctgtttgttgtttgtgttcaatttttgtctttaatttttatttgtttgttttagaaagggctaagaactctgtgtatagcatatagaaaatttacatcaaaagagtatgaggaaatagataaacgcatatttgaagccaggactgccttgcagcagcgggaagagaaattggcagctgttttccagttcatagagaaagacctgatattacttggagccacagcagtagaagacaggtaagtatcagataattaaaaaatattayttttctctcataggaatttttgtaaccaagtattctaatatgtgacataaattctctttactaacatcccatgatatatttaagatcaaagtagagaactaaagccttaatttttcccggtcagtatgtacaatttttgttctagctagatacctgaaatggatgaaagaaactagctctctatagttttttcttataggcttgaatctttagaatactcctcagcatgtcatgcaaacacttgaagcacctgcttaattctccagccttccctcctaccactgtctccttccgctttatgtttcaacaataccaaactgtctctgcatgccacctgtagctaaaactattctgttttgtgcctatgttggccttctgcctgggtgattcttcccttcaccatccctctgtgactacctattcataaagtatagcttagatattagctccagtccagtaagacctttcctgacacctaagaggattaaaaattctcttctttgtgaagtctcattgtaggtagttctgttgttgtctttgtggcactatattataattatttgtttaaagacttctcctctgttaacctgtgaaatccttgaagtccatttattctttgtctttgttcccagaacctatctcaatgtctgtttcacagtttcttaaatttagctgaattctgagattgaattctgcagattaagtttgttgttatgtttgcctccaccacctagacctaagggtgtttgcatatttttaaaatctatgttttcatttactttttggttgtccktacgagatttctgagactcacctaaagttagctagacctttattttctacagtctgattttttaactatatgagtggtttgagatatttttttaaatcaaaacaaaaggagaaaaatcttcttgtttgaaatgtaagacttcgtaataaaacaggagtttatgaagagcacatagtttcatcctatgaatagcaactttgaagatacattcttaaaatatgaaattgtagattttaattggttgattttgtgttaaccagacaatyaccaatctgtttattcgtgtttccttcctaatgagagaaaattccagttatattgctatattgtataataacattcctaggtcaagtcaaagagtttagaattatccttaaatatactatgtagtttaacttaaaatacagtcataaaagtattctctactactaatttgtttctgttcttttcagactacaagataaagttcgagaaactattgaagcattgagaatggctggtatcaaagtatgggtacttactggggataaacatgaaacagctgttagtgtgagtttatcatgtggccattttcatagaaccatgaacatccttgaacttataaaccagaaatcagacagcgagtgtgctgaacaattgaggcagcttgccagaaggtaagaatataggaacctgtatcatacctttcaggggttagcaaactatggttccctgggcccgatgatatagcccactgtcactgcctgttttttacagcctatcagctaaaagtagtttttacattttttgatagatgaaatccaaagaagaagaatatttcatgaagtgaaaagtatatgaaattcaaattccagtgtctataaagtttgattggaacacaatcacattcatttgtttacatattaccaatgagtgcttttacactacagcatcagaattgagtagttgcagcagagactttacaaaatactctctcttcagctttacactgctgtttgatactctacaaatcacagtgagatacatataatgtgatagtgtttggagtgccatgcatagcaccatgttgcgacattttactgttttttattagtatatggccatcatgtcaaaacaagaaaagaaaagtggacttttaacattacgattttttttgaagcactgtggataggggattwttktatttttgagttagatggcaaagcattgtttattatgcattgatatgttagctgtgctacctgtttgaaaagacattttcaaagatgaattataaatctcattacatacagttctatcgtatggaaatgtaaaaatctcgttacagatggacattaacagatgaacatttgcaatgttaactttgaaccccaattaaacaaagtactatcccttgcccaaaagaagtattttcattcttctcattagtaaacctctcttatttaaaaaattatactcaatgattactacatttttatcttagtgaaaattttgttgagattttttcctctcattctgtaactacctatatcctcaattttgcctcttggcccacaaaacctaaaattgaaatatttactctctggcccgtaacagaaaacatttgccaacccctgatctagtttgcatgaccaaactgggaaattaagctgcatttaattgttcaagattatttcataagaatttatactctaaattctgtcttttttgtaaatctatcttttataggcatatcaaatttttgccctgtatgggggcaaatgatgccccatttaacacagtctaatttttcacagtaaactaggaagggcttcatttgaccatcagagctgcttgtatgtaagcatattaggtctcctgcaggtttctgttgtttgcygtcttgtgatactaatccagaaaaataaataccaagagacaaataccatagttgttaatatacattcagtgttttctatttatattttttatgcaggcatttatgtgataccaagtctggatttcatctttttaaaacctatttaagagatattttaaaaagaccatgcaggggattttttgttgttgttgttttgttgttgttgttgtttgtttgttttttgagacagagtttcactcttgttgcccaggctggagtgcaatgacgcactcggttcaccacaacctccgccttccgggttcaagtgattctcctgcctcagcctcctgcgtagctgggattacaggcatgcaccaccgtgcccagctaattttgtatttttagtaaagacagggtttctctgcattggtcaggctggtctcgaacacctgacctcaggtgatctgcctgccttggcctcccaaagtgctgggattataggtgtgagccaccgcacccggcccatatagggtcttcttaaaatatctcttaaatagggtcacactggatctttgagtgcaaaaagacaattaatttaggtaattatactacaatttggggacagtgtcaacaacattgtggctatttaaacgtttaaatactgcaatatcatgaactccctaaaacacagaaattaattgctcagaatcatttactttatatatgcctttttaaatatttttttctggctgggcacagtagctcatgcctgtaatcccaacaccctgggaggctgaggtggatcgcttgagcccaggagtttgagatcagcctggtcaatgtaatgagaccctgtccccacaagaaatttaaaaattatccaggtgtgggggtgtgtacctgtagtcccagttactccgaaagctgagacaagaggatcacttgagcccagaagttcaaggctacagtgaactgtgctcttgcctaaaaaataaaaataattttaaaaaatatttttctgattataaaaataataaatgtctacttgaaaaatactgaaaattgtaaagcttatgcagtggttaataacaaagtcatcagaagattattatttgtaatttaggctattttctttaagtcttctgtatataggtggttttaatgaatatgctaatcattagtatttgttttcttttctgtacaaaagctgtattataaaacgtagagtacactcttaaagtgaattttaggcttgccgtcttagtctgtttgtgctgctgtaacaaaatacctgagactaggtaatttataaagaacagaaatttatttttcacaattctggaggctgggaagttgaagatcaaggcaccagcaagttgtatagtgagggctgctccctgttccaaaatggtgccttattgctgcatccttctgaagggaggattactgtgtccacacatggtggaagggacgaaaggcaagagagggcaaatctctgaagcctcttttatcagagcattaatccattcatgaaggcaaagccattatgacttaatcacttccgaaaaggccccacttcataacaatgggggttaactttccacattaattttggaagggattcgacattcaaaccatagcactttctatgtgaaatttatgttatattttagaggtatcttttgatggaatatattttatgagataaccatagaagtcaataggcccattcattcacagactttcaggaagtatcctaaatcttgataaaaatctgtcgcacaaagaatttcatgcctttgaaagctttagtatatatatccattccttcacaaagatatattgtcacctgtctaggcatttggaacagagacataaggtgtgttgtttatgccttggatacttggtgtagggaaaacagaaaagtaaatacactgtcatagtcctatccctacagaactgtatctgaggcaagaacagaagctctggaaggacagaagagagaagcctagcctagaccaggggtaccagggagagctctgaacaaccaatgactgtgttgcctcctgtggggcgaaatgttcactggacagagagtgacactaagaagcaaacgggaggctgggcacagtggctcataatcctgacttacaggcacagtggccaataatcccagcactttgggaggccaaggaaggcagatcacttgagtctagaagttcaagaccagcctgggcaacatagtgaaaccccgtctctacaaacaatacaaaaattagacgtgtgtggtgacacatacctgcagtcccagcgtcttgggaggctgaggtgggaggatgtattgaatcagggaggttaaggctgtggtgagttgtgatcacaccactgcactccagcctgggtgacagagtgagttgctgtgtcagaaaaataaaggcagcaaagggggcagtgcgtgcagattcccagagctgagagagaggagggcatattcaaggaaataattataaagtatggccagggagtggtatagatgggacagggtatgaagagtagtgatgcatgagggctacagagatgagtaaatgctacctacgtgccagagatgtaggtgcttttccatatttcttaaatattatcccatggattgtaagatcataatgtgattcatgaagcctgtccagaggaaaacctaatttcatgtgccttgggaacttttcctaggaaaactgatctgctctgtcccactcttgactgctagcatttctgaggcctgttcctcaggtagtgctttggacaggctgaagacrttggaggcagcacaagttgccaaataaagtttggccaatagggaagaaaaattgtctatataggtgttgatttcagatattggagagttagtagtaatgagaaaaatacattttataaaactttatggtataaagtgaattgcttaccacttatagctacagtacaacacaacagtgattaggcatactatgaaagacattgctttaacttacgaaagtttcttataagactaaaatctatcaatatatgtttagcttttatagtgtgctcatttaatagtcttctcacttcttatttttaagtggagggatagttctcagcagagtctgatattctgtgaaccttcggtattttcttgtggtgtatatagcacagtgctacactgagtactggctttcagcaacataaaggagcttacatcaaaatgtaaatctaggtatacttccttcatcaagaaagtattattaccaaaggagaattgtggggggaagcagtttaataaaatagtgtgcttagtgattttgttgatttacattctggtgtaggctccttatctcttcctggcaacaaatagtttgcccactttccagcagtgagactgtacttggagtagcacctacgtagcatatgcccacatgtgaggtgttatccatgttctaccatagtaatatctggcattacaatccatcatcggtttcctattgcaagacagtgctgttccttcattcttttccttgcttgttatgcatatcgtgaatcttgctcatgggttttcctgaacatcttgatttcatagagtttttttttaattaggatttgctgaatgtttaaataatgtttcgatttttgtaagacttttcatctaatttgggagaatatcctcagattatgtattacaattcacattttagaaaatataattactgtatctatatatcagttcattgtaaaattgaatattaggctgggcacagcggctcacacctgtaatcccagcactttgagaggctgagacaggcagatcgcttgaggtcaggagtttgagaccagcctgggcaacatagtgaaaccccatctctactaaaataacaaaaattagccaatcatagtggctcatgcctatagtccaagataggaagctgaagcaagagaatcacttaagcccaggaggtcaaggctgcagtgagccactatactccarcctgggtgacagagcaagaccctgtttcacaaaaaagagaaagaaagaaaaattgaatattatctgttttactcatcagtgactcaattctgcttaattttaaatttaaggtagtaaaacagtttgtttcctgacataacagtcttgtaacagtaagggctgtgggtaaaagatccatctttcagtaagaatgtgttgttctatatgagtgtaaataatatggcttcaaagtatcttacagagaatataattattttctcttttagaattacagaggatcatgtgattcagcatgggctggtagtggatgggaccagcctatctcttgcactcagggagcatgaaaaactatttatggaagtttgcagaaattgttcagctgtattatgctgtcgtatggctccactgcagaaagcaaaagtatgtatatatgttataaaaaagtcccataaagctatttagatataaacatattatttaaagttaatgccttacatagttccatttggtgatgtgcaatatatacattttgctaggagtcagtcacatctcatgttgtaaattttaatcatgtacatcagacttttggaattctcagagtgagtttcaactattcatagtgacccagaaaacctgtgatgagtagcagtttgtgatcttgcagaaattaaactgtgataactaatgtttcgcaagttagctacttagcgagtgaaggagcctaggagacatcaattatttgcaccttcagatggttctgttgatctccgtttattcttgcattctcatgaagtgataattctttgttacttttagctataaagtgataaatagagctttagtataaaaagttgaaaagccaattaacttgtaaagcttatatataggaaatatttaaatttcagctacctatgtgattcaagtgaaagcctatataaacattttttataattctaaatttggaatttgagatcttagactrtttttcacaaatatcctttgcagtgcacatctaaatactgattatttcccatataggtctaataaattaaacgtctaagtttttgggcttcctggaattttgttacagtactgatactatgacaattcatgtaccccagtctatggagactaaaactggagaccaaacagagcaaatacccaggttctttataaaagtacattcaagaattccaaagaaatatttcttttgagttcattgaatttaatcttgattgatttttttaaagtcttaaaattttactacaagaggaaacaattatttctttcatatcaaatgaaaaaataatttcttaagaaaaaattttgcctaacagttcaattaagtagtcattttttacacaattactattaaaccttctaaatatttaagctatatttaaaagattcttgtttctcatcataaaatccaaagataattctctgttttattataacatttctgaaagacatctctaaaatcttaatggagataccctcaaaaaaatgaacctgcatattattgtctaataaaaaattaaatatttctttcattagtgttcttactatagtcatttcagataaatgactatatgaatgcaagaaaattgaacttgcgtcataaataaccaattcattatgtctttcaggtaataagactaataaaaatatcacctgagaaacctataacattggctgttggtgatggtgctaatgacgtaagcatgatacaagaagcccatgttggcataggtgattgattcttcctgaaaagtttttcctgaacttttaaagttggtggtattatttggtggtttttaattttctttttgtagattaaagtacrgtatcaaatttgtgaatgaaaattgcaacatggtaataatatagcacagtgtgccccatcagaaacttactataattaggccgggcgtggtggctcacgcctgtaatcccagcactttgsggggttgaggcaggcagatcacgaggtcagaagttcgagaccaacctgaccaacgtggtgaaaccccgtctctactaaaaatacaaaaattagccaggcgtggtggcacgtgcctgtaatcccagctactcaggaggctgaggcaggagaattgcttgaacccgggaggcagaggttgcagtgagccgaggctgaggcaggagaattgcttgaacccrggaggcagaggttgcagtgagccgaggctgaggcaggagaattgcttgaacccgggagacagaggttgcagtgagccacgatcgcgccactgcactccagcctgggcgacagcaagactctgtctcaaaaaaaaaaaaagaaacttcctataattaagcccactatttaatatattttcattccaaattttagtttcagattttaaaggaaataaataccacattagtgaattttatctttgccgattatttttcataataaaagtagctttatttttacatgtcattttgtaccttttaaagtactttcacatgttattttatcctttttaaattctaaatttgtgatttacatagttgcactgctggttcttgttttaraatcttaccgttactcagtgtatttgtgcatctaaagatcctacagcgcattttaaagatcattataaagacaggaaattgtactaaactgcgataaacacaacatctcaagtagttttctcattttaataacctttatccttattcttttctatttttgcctaaaacttttattagattcagactgctaatgtcatttcattatattgaatttattaatcctttcctttttagccatatactcttattgtataaatacagagcaaaatgaaaagtgtgggcataggattttttatggaaggataaaatttgagagttaagctaattcctgttctggaatagtctctataatgtgctggatgggaagttatcaggtctsatattttctgtgtgcctcttagatcaactccttcctctttcagataattaattcttcattttgaaaacttaattctccttctagtttgtataccgttattttccataaattttcatagcaatttgatgataacttcctataccatacatttaaggctataaaaaaaattacagtatttaaaacagtttaattctgtaatgataacaggcagaccagtgactagaatacattcaagcatctggaaatttagaatataacaaaggagatatttcaaataagtaggaaaacaaattatttagtagaaaaaaaatggataaaactggttagtgatttgaaaaaaaaaagagaagttgagtctctttctattatttgtaacaaaacaaattcaagatggattaggatttaagtaacttataaagaccctaaaaagtaatagaagaaaatttaatgaataattctgttatttgcggtatggaagaatcttttgaggacaacaccaaagcaaggaactatagttaattatagggaaaagatcatgcagaggtaaaagctcccaaaacaaattttaaaaacaaaggacaaactagtaaagaatatttgtaaaatagatgacaaagttgtaataatcctggtatacaaagtattaacaaattaatgagaataagaaaaacgttccagtagaaataatatggaaggatgtgagcaatcgattgttatgaaaggagaaatctaaaaagaatactaaatgtatgaaaaaaatgtttagtctctctaacattccaaggaatggaagttaaaattgcctgtcagattggcatccattataaacactgataaacctggagttggtaaatgtatagattaacaaatgatcttatacaatgttagtaggagcataaattggtataccctgcattattactccaaacaaaattttaaagtatgcctattgacattgcaattatgaatgcaggaatttcttctagtaaaaaaaattgagcatgttgataaagatgtacattacaagtatacatttgaagcagtgtccataatctgttaagcaacaaaagcaagttgtaaaacaatcctttttttttttttgatatagagcttcactcttgtttgccaggctggagtgcaatggctcaatctcggctcacggcaacctccgtctcctgggttcaagcgattctcctgcctcagcctcccaagtagctgggattacaggcacccaccaccatgcccaactaatttttgtatttttagtacagatgggttttcaccattttgcccaggcttgtctagaactcgtgacctcaggtacatccacctgccttggcctcccaaagtgctaggactacaggcgtgagccaccacacccagcctgagccaccgtgcccagcgtgagccacatttttacacgtgtttttgtatgtatgaaacactcacacacacagacatgaaataagcagaaagaaaatttctaaaagaatgcagactaggccgggcgcggtggctcacgcctgtaatcccagcactttgggaggccgagtcgggcggatcaccaggtcaggagatcgagaccatcccggctaaaacggtgaaaccccgtctctactaaaaatacaaaaaattagccgggcgtagtggcgggcgcctgtagtcccagctacttgggaggctgaggcaggagaatggcgtgaacctgggaggcggagcttgcagtgagccgagatcccgccactgcactccagcctgggcgacagagcgagactccgtctcaaaaaaaaaaaaaaaaaaaaagaatgcagactaactaaaaacagcagttttctctagggattatgaatacaggtttttttcatcgcttatacattttggaacactttcatccttttatgacaaagttttagttttgaaaaataatttttttaagttgcttctagattgaaaataaaaacttggcaatgactcttcttctcttttgaaaccttaaggattattgtaaccattaaaaaagtattcatatttatcagaggaaatgttgcactgatttcaaatgatattgcttatttttaaaaatttatttattttaaattcatattttccttttaaaaagtgcactttgacttattcatggaagtgttaagcaaacaaatgactcattttgctaaactcaaatgactcaatttgaatattttttatattcagtgaaaatagtgaagttaagtattttatagcattctgtccatcagaagtctgttacccagtacttgtgcttattagtgtaataattgatgttcctgctaaatccttaactttcaatattattttttatattgtattttatctttttatattctaattctttggaaattggtgttatgtgtctgataaatatcgtagccttatattaattacatatttaagtagaacaaccttttggacatctgctatctgctgtatattaggatttaatgttcctaagtgcatgttcaactattataaataattaagatatttgcagatttatcatgaaaattacagttatcagtgaacatgtcttttgtcccttttattataggaatcatgggtaaagaaggaagacaggctgcaagaaacagtgactatgcaatagccagatttaagttcctctccaaattgctttttgttcatggtcatttttattatattagaatagctacccttgtacagtattttttttataaggtgagtttcatgtatttagaatcaattattgatatagtaatatgaagtttcaatttaaggaatgttataaccttatacatttctctttaaaatagtttcaataagtaaaaataacagtattttgtcataaatctattctatactgacagaaagcaaatcagtggttgcctggggcccaggggttccatgcaaattagaacatagtacatttgatatctttaaagttattttgtcctgaaccagcaataagttttaacaccaatataatggttttaagtagagttcttagcctttttatgccatgaatgaccttttagtagtctagtgaaatgtgtgagctcctcaatatggagcttttatatgcataaaatraaatacatagggttacaaagaaacaaattatgttgaaatattgtcctatctttgggtcctttggtacaaggtgggagtttgcagaacccacattaagagcccctgttaccaatacatttaataacaccagagtgtactatgttgcatatatttctataattgataactacaatccagtgatagaacacaagtagattgcatattgctataagatgatggcagtttttttctaacttatttttctagcttttacttgtaatatgagtatattgagatggaaagaagtttcgatagtttgatttattgtgtgttttaaacatttttgtgttgtaaagatatagccctaaagtttgagtaaatcttacttattgtactatatatgaaaagtattgagtaatagtttgaaggttgtaaattcaaaattatagtgttgcttggcagtgagaggagtcaagggttttttcattctgatgtctgcactgttgcttagaatgtttttagacattttttgataaaatgggaatcctgcattcctgttatatatggacaagtccttatcctttacttaccataccaactgagattgtttttggacactttaacagccattttttttattttttattttgtctttgaaacctaaatattttaattattttccatttaatcttgtttttcagaatgtgtgctttatcacaccccagtttttatatcagttctactgtttgttttctcagcaagtaagtaaatagaaacttgtgttttgtgttttgtccttttagagtaacgtatgtatgttcagattttgatagacgtttgaagggacttttttcatttttcttagtcctgcagggaaccagacagaacttttctgtttagtatatttaaccagcatgacattcagaatatttatttattctggttttcagtttgaggtgagtgttaataccaaaatgtaattctggatgcttttaaaaatagataataacccttaacagcttatgagagaattttgataacttatttgtgatatttctgtaaaatccaaatcaagccaggccagataacttggaggttcacctcatttttatttttgattcgaaatgtcttaggtttggaaggagcagtagtgatttagtccagggatggcatataggttttatctcagaagctacctttaaataattgatggggcacctagagtatattgaaaaggtttctaaagctgcaggctcagagggaaaatgtaatttgttagcaatagttgtaatgggcacaaggtgggtctttgtttgcatgcatgtcacatatttaccagtcctgatctactttgttttaatttctagaaaagaaaaatgaaatccacataaattaagtaacttgccttgctaacttaatgactaaaccataactttgacctactgcttctgactaatgtggcaggcaccctttttacataccatactatacatctcaaattgatcaagacactagttctaatttattgaaaaaacaagagcttaattatcttaactttttcatgagtttttcctattcttaattgctgttttatcctgtttacaacctgtaactctaaattccaaatatttgcttgggcattgattaccgrtaaaagtttgtttacctaaatgaactaaagaatatgctaagacaatacgacaaggaaaactgacctattttgattaggttttctggagagtttatagtgtaatttgggaggcagtattaataacaataaaaacaataygtaaagcataggcaaagtgctaagtgattagtaccaacagtggtacctgtgactgtttagaggagcaagatatcgttaaggacttaagccattgtgcagagtttcatggaagaagatagtcttgttcagtgccttaaaggaagtgtagtgtgtagacagggagacaaagccatgaaaggtaaactgtatgtgttgcatgtggaaggagtagtaagatgcctggaatacatggaggagaattatgtaaaattacttcacagtgatcaaattgtggagaaccttgaaatgttgatctaactcacgataattccagaagcacctgatatagcaaaatattccagttctcacaaagaatatcaacctaggaacattatatgtttatgtcagtattaaaaacaaattagaattatttaattggagttactaaaatggatttcagtataaatttttaaaactttaattttgtttttaatatgcatagttgtcatatgcataatagtaatgcataattcagaaactcaacattcctaccaatttctctttctagacattgtatgacagcgtgtacctgactttatacaatatttgttttacttccctacctattctgatatatagtcttttggaacagcatgtagaccctcatgtgttacaaaataagcccaccctttatcggtaagtattttctggtattaaatggccttatcagtttttttaagtaaaaaataagcagatttatttatgtcttggtgattaatgctttactaaggaaagttctttagttgtcgtatgatttacagttgttgaatatcagagaaaaaaaggtttctttcaaagagaaaattggaataatttttccggtgtttttttaagaatgagcactttcatcctgggaatgcactgggcagttgtgtaatttgcacttactctcgcaaaccagtaatattctatttcgtgtgcacaaaagaagttattcataattggtagtctctagaattcctaaaagtttttttctactattagcgaaatttatgagtaataattagtgcaaaatccagaggtgaggacattaattcccaccccagattctctgctttattcctgcttccccagaaccaagtaatcacagagatgtgattgggacctgttcctcaggaccagctatggtattcaccataagctcttatagagatagctattgaagtaccacttatagagtcatctcattatctaaatttggattaatttacttcaattcctcaggttatctaggacagggcttgacctaagattggcatagattgttcttcccataatagctattattagaagggaagttaggagcatcagtgctgaacctaactcagataacctcactaaaaagagaccattatggcagagtgactgaatgttaacagaagaatataataacagataaatcaacttttcaaaattaaagtgaagtattatgcctatgtcatatttctttttttcttttttgagacaggatcttgctctgtcacccaggctggagtgcagtagcaagatcgtagctcactgcagcctcaatctcccaggttcaagcaatcttcccgtcttaacatctggagtaactgggattacaggcacacaccaccatgcctcactaattttttaaactttttatttatttatttatttatttattttagtagagacaaggttttgccatgttgccctggctggcttcaaactcctagtctcaggtgatcctcctgcattggcctcccaaagtgttgggattacaggcatgagccaccatgcccagcctatcatatttcttttttttttttttttttccttttgagagagagtctcagtctgtcgttaggctgagtgcagtggcgtgatctyagctcactgcaacctctgcctcctgggttaaagtgagtctcctgcctcagcctcccaagtagctgagactacaggcgcgtgccaacatgcccagctaatttttatatttttagtagagacaggatttcaccatgttggccaggatggtcttgatctcttaaccttgtgatccgcccaccttggcctcccaaagtgctgggattacaggcttaagccatcgcacccagtcttcctatttctttatcaaatgaagaaatatrtttgaatgtagtatgtgaactataagctattaaacagatgtatgatattataagcagtggtttataaatttggatttatttattctttgtgctaatattttcaagcaattttaaattaaaaatctatcttgttttttaattatcatattatattaattgtttagtgggcaaataataaatgatccctaatatgtttctttttctcttctttttaacagagacattagtaaaaaccgcctcttaagtattaaaacatttctttattggaccatcctgggcttcagtcatgcctttattttcttttttggatcctatttactaatagggaaagatacatctctgcttggaaatggccaggtaaagtatatagtttttttaaagaatgcttgttaatattttatgggttttttatagcttttgtcataaagtaaaatttaatttaaattacagaacttcaagtattaaaatgcaaatataaaaaggtttwaattttgtggttaaataataaagtttcatacaagtgaaaattgacaggcaatacagtgtaatctcgaaatgaaactcaagttactagacagttttgctattcaaaaattagctcacacaggggatatgttattgcccctgcatgctcttcaccttagtattgtgttttattgatagctgccatttatctggtacttacttttgtgctaagtactttaatatgccccatctccattagtcctcccaataatcttattagagaggtattattactcccatttttcagatggcaaatgaggacttagtgtttgtttgcttttaattgcattgttgtttgcctaggaaatgctaccacattcttcattgcacactcacaattctaaatagatgtcataacttactgtttaatttggccacttttccgaagcatgaaattaggaaagagtgcattttaaacagtacactgttacactgtgttctgattggagtgctcatgttgagagactcttggcagagctagacctctctttcggggcttaactaaatgggttaggaaggaaagaaatgacagcagtggtagggactctggtggactggaaatggttgtcactcttagtttcccttttccattcccatcacttaagtattgcaaaatatgtttggagatacagacatacaaatttgcaattggaagaatataaagttttatctgctcaacagatctttattgaaggccagctattcccaagtactatactaggctctggtaagtaacttggtcatggagcttagaatcttgaaaaggatacagaaaatgagcaagtaaactaataacaaaatacaccggtgtaataaaggaaatgggtttcaaatgtagaggccttaaccttgcaaaatccctttaccttatagagtagggacataaatataattgccacttcacttttgaggacatatttagactgatgtggatgaaaatatgaatcttgtagcataaaggttacagcacttcccaaataataactaccttttgttgagtttgtttctctatgcctggtacattacatgcatttgctcattaaatcataactctgtatgagaaaaatatcattattaattttcgcatgttagaaaattaacctcagagaggttaagaaacttgcctaagttcacacagtaagcaaattacagtaatagaattcagactcagatctatctgactttaaaacctacatgcctttaggagatatacctaatgtaaatgatgagttaatgggtgcagcacaccaacatggcacatgtatacatatgtaacaaacctgcacgttgtgcacatgtaccctagaatttaaagtataataaaaaaaacctacatgcttagtcatgattctcaattcttctgagaaacagctgttagcctggtgcccttctgcacagtcttaccatcagtgcaagtgccaccaaatatatagacatatgagtgagtatgctcacttccacctgaaatagtggggtgaaaaccggacagaattaagaggggaggagagttaagaagaaggaaatttggatcttcatcattggatgaaaaggatgttaaagatcttgtattgctagtcactactttttttaatttttaaaagtaatatgtgcccattgtgataagtttgaagttagtaggaaaaagtataaagaaaataaatcacatggtggccctctacccagatattattacttttattatttttacatacttgtttcaattcttttttgctattttcattaacctcataatttgtatccccttatttcttaacattgtagcctaagtgattttgtatgttattaaaaatgcttcaagaacatttttcatgattacgtaatactctattacattgtcataatgtaagtattcccttaatttgaggatttgtttctaatttttagtaactttttaaaataaaatcttgaacattctttatacagaagataaaaccttgaaggataaattgttattggccattagtataaaagcttttttctctttactgtctattgaaattaatctgccactccctacctccaatactaggtatagtagcaaagcagcacatgttagaatcagaattggattcataccctggcatctgtagtcatcgtttgagtgatttgggatgagttaacctctctcagactcagttttctcacctgtgaaaaggcacataatccccaccttataggtttgatgtgaggattaaatgacatattatttgtagagcattaagcatagtggctagcatatagaagtattcactacgtcttagcagtgttcattgttatttttactattaagtcattatattggaagatcatgtcctactcaatcccacccggtctaattctcccagaaactctctcttaactgtgaaaatcaccttgctggctctcagaatgtgccatgctaatctctaattctaaaacattgcttatgttccctctctagaatgctcatgcttccctttccccaagattccctcaccaccacctattcttcgcagttgagcccacagacgcctttcctgttggtccagctccctcttatgtgtccctgtgctaaaaatccttttagacatctgtctaggccgcgtctcattgcttagcactgagtttgttgaatgcttcctgttttctaaatattgttattgcatgcccaagttatcagtaaacaattgagggcctagagcagaaaaagttactagagggaagtgctgagaggagtgactggaggcaaagatgaagtcattgcaaaccaagtgatcctgggagaggagcaggaggaagacttgtaatagtttgggtttaagggtagaacaattcagggaaagttaagactttatccctttttttttgtattagggtctagcaattttatgttaattaattttcaacaaatacttttgaagtattcactaattctttcagtttagcttaggaaagaactagtcattcttcatgtatttatctcaaatctttttaacaggcctttctttctcttagtaaagtataagtcttgatcaattttctctaagatttggaaagactggaagaatgtgtatgacctgcctgagttcctgtcatgtgtgtctctaaaactgcttttccatgggtacatctttaccttcagagcactatamaaaagatattcctttactattactccttaatgagttgccagagagcaaaaataatgttaatgagaaggctgaactagtgactaatttttaactttgtttttttcctaaatagtagaagagttaatctctcacataaaatttgcctagcccttatccagtcttaaagtagtcacagtatttgaatctaagtattagttaaaaagtagggcttgtcttaataatacagtagtattgtcttaccatggacatttgtcaagaagtcatagattagtaattcactgaatatgttgtttgagtaatctttttattttttaaagttaaaaataagcttaagactttattttcttgtttagtttttttattatttactttttttttacatgaataagttcttcagtggtgatttctgagattttggtgcacccaagcagtgtacattgtacccaatgtgtagtcttttattcctcaccccctcccacccttttccctgagccccaaaagttcattgtctcattcatatgcctttgcgtccccatagcttagcttccacttatgagtgagaacataagatgtttggttttctattcctgagttacttcacttacaataatggtctccaattccatccagtttcctgtgaatgccatgatttcattcctttttatggctgagttgtattccatggtatatatgtataccacattttctttatccactcattaatcgatggccatttgggctggttccctatttttgcaattgcaaattgtgctgctataaacatgggtgtgcaagtatcttttttgtataatgacttcttttcctctgggtagatagaaggagtgggattgctggatcaaatggtagtcctactttcagttctttaaggaatctccacactgttttccattttggttatactagtttatattcccaccaacagtgtaaaagtgttcccttttcaccacatgcatgccaacatctatttttttatgtttttattctgaccattcttgtaggagtaaggtggtatcacattgtggttttgatatggatttcccaggtagtgatgttgagtattttctcatgttcattggtcatttgtatatcttcttttgagaattgcctattcatgtccttaggccactttttgatgagattatctttttcttgctgatccgtttgagttgcttgtagattctggatattagtcctttgtcagaagtgtagattgcgaagattttctcccactctgtgcttgtctgtttactctactgattatttcttctgcagtgcagaagctttttggttaattaagtcccatctattgatctttgtttttgtgagcttaatactttatttctgtaatctgacagggtcaacttttttgtagttgcttttaaacagagcttcatagaagcaattctcctgcctcagcctccccagtagctgggattacaggcatgggccaccacgccaggctaattttgtatttttagtagagacagggtttctctatgttggtaaggctggtcacgaactcccaacctcaggtgatccgcctgcytcggcctcccaaagtgctggaattacaggtgtgagccaccgcacccagcctgtaagctcatcttcagccagatctccaaaatgcctttgccactcacattatcacctaccagctcaagggcaagtcagaatggaaagagacagcagtcttaaccagttgattacagttgaaatacattacttcgtataattttacccacaaaaagctatgtgaatgcttttgtatggcttcttctaggaccttgaatggggcctatgcaagaggaagccctaaatcctcctctaaggaaaataccgtgtaacataccccagtctaggcccagtaaaaccagatactgaaggatggacatgtccttaccacttccaggcccaggtccccggttgcatcaaagtatctctcccagctgggcacatggctcatacctatagtcctagcatgttgggaggccaaagcaggtggatcacttgagcccaggagttcaagatcagcctgggcaacatggtgaaagcccatctctgtaaaaaatmcaaaaaaaaaaaaattagctaagtgtggtggcgtgtgcctctagtcccagctacttgggaggattgcttgagcccgggaggtggagattgcagtgagccgagatcatgccattgcactccagcctgggtgacagatggagaccctgactcaaaaaaaaaaaaaaaaaaaaaaaaggaaagtatctgtgtccatacccatgaaagaggagaatggcactcctcctgagagagctaagttgagacccactgatcatcggtatttctgggtcatttctagagatgataaaagcagacagcagacagataagcacaggttcagtatgacttttgattctcctcttgacaaatacattccccaaatgctctcaaataaaggaatattaattgatgtttcattgttgataatcataactrttatttactgattgcctattatataccaggtaccccattctttttgtataccccaattcttatagaaaactgcgatttatcctcattttacaaatgaagaaagtgagatatagagaggttaagtaatttgttaagtaaatgataattgttagaaatctgtaataaaaaacaggctttttattaatttttttgaaccagtgttaagataatgattgttaggtttggaagggaaggtgagagttaaagaaagacacacacacagaaagagggcrgctcaacagcatgcaggctttttgtctagcataaaacctacagaagtcagggaccagcctaatgccagagcccactggctgcttacaggctagggtacttacaggtgtgggcgggaggggtctgggcagtatggctcgctgcctggcaggatattgataagatgttcccatgatgaggcagttctgacccttgttctggcaggatgtcttcgtggtgttccttggacctttatccagcaagatacgrtagggctctttctttagtggtcaggtggttaggcaggatgtttctcatgtcccgaacccccgtgaaatgttgcactttgaccaaggtctgcaaaatagcagggagcttacaaaacgatgcagtttggactaacaatgattactttgtaaactaaattattaaacttctggttgtattcttgtagagataaaatcctgaaactcttttggggttctgcgtgattaataccttagtaagttttggctctaaagcccaggggaaactttctgactggcaataactgcatttttacatggaatcctttgaggagtaattccatgatccattatccttcctttcagatacaggttttaagtgtaaatttcttttctcctgctctactgtactgtatccaaaaataccgtggcatgtgctctgctgtaacgtctggttggaaaggtttctgaaaatacttgtgattgaaaaggattttgttaccatttttactgtgcaacagcaataaagcagtccctaatgactacattattctaactaaaaatagtctgtgccacaccattctaaacccatctttgggttccagtctgataatgatatctaaaagatcattgtctataataataacacatgtaaataatgctttatgctgttcttctcatacttttaactttatgagtatagtcaccagtttcaaatgtacctgacttaaataattcaagggatttttagtagagaattaaatgactttttacctgacatttaacattatgttaacacgtaatgtaatagtgtattctttctgtttagatgttyggaaactggacatttggcactttggtcttcacagtcatggttattacagtcacagtaaaggtatggtactgaaattagaaatgtggacacattttgcaactgtttacatagttagttaactttcttcatttctttagccatagatrctttccctttttccattttcaataacgattaatttcactggttactattttaatagttaaatttttgtcaaaaaattatttttaaagtttattattttgggaagcctcagctgatatttatgatcacatttttaaaaatctctaaaaattttgcttctctgtgtatagtgcaagacagcgtaatttgttttaggccatggagttgaaaatagagtaatcacatgaaatttgaatgctgtttcctcaaagaagaaaaacattataaacttgaaattatttcattttatactaggaccttttcattcatatttatctctgagggattttgagggattgtatctgtcttctgagagacttttagatacttatgtttattcttgagtttcatctgaaaggttaaggtaaagctttatttgtttatatttctaaggatataaaaacttttttttagatggctctggaaactcatttttggacttggatcaaccatctcgttacctggggatctattatattttattttgtattttccttgttttatggagggattctctggtgagtgaatataytgtattttaattggattgcttcaactataataaacatttattgtgataggttacattatgaacatattctgctcataacagatttcagactcctggtaagtttacttcttcagttgatcttactgatatggagaggaaaaaactaacatttattgaatatctacaatttttctagattttttttatataagatattgattcatcataataatgatccctgtttttttctgtgtagaaactgagcctcaggatcacaaagacaaaaaagtaccaaagccaagatttaaaccccaattgtcttatttcacaattttctttacactagttatattatgtattaatgtattatgtgttaatatatacaataaagtaagtcacatagaaccattaaatattaatcattaacttttctcacaaaagtaagtagtatgcatcatcttcattgatagaatcagatattcaactggctactcagatagattaaaaattaatgtttctcctaagattctttggtaagtgatggacaactgagggctctcttttggnnnnnnnnnnnnnnnnnnnnattaacttctatttaggatcataaaaggatactcttatgaatatttctatatttcaccatattcttttgaggtagtatatacaaaaacccaaaaagaatatctttataacacttactactatgtaaaactagtattcgtgagtacattaattttaaaatatgtttttgaagaagagcctctgaataaagctttcattctaagatttggataatcggccttctaaaatattttattacacactttttcttgctttacttggtcccttaagtctgtattactacattattcttctgatccactaccactaagatagggttatctggtcaactgcttgccattttcctaataaaaactatagttgttttatttttaacaattaaagcttatcttgttttgttagttcagttaattaaattatactgatttcagttttgaacattttcttggagtacttgttactttcaactgtagtgtctttatatgatgtcctgatttaagtctttcagtttccacttttattaagcacattttctttctttgcaggccatttttgggctcccagaatatgtattttgtgtttattcagctcctgtcaagtggttctgcttggtttgccataatcctcatggttgttacatgtctatttcttgatatcataaagaaggtctttgaccgacacctccaccctacaagtactgaaaaggcacaggtaaccactttttataataaattcaatatctttttagttagggatctttaataatgaatagctgtcattataatttgattatgtcagaaaataggaaattagccattcctgtttcaactattttgtaacataaacattgttcagtgtgatatttttgaagttatttcttactatttctattaattttatgactactgataagttatttttttaattacattgtgttgttaataaaactttatgtttttaggtatgaaactatcaaattatatccagataataatagtaaatatttttaaagtaatatcacagcattctatcatatatatataatgaagatctatagccatgtctttagaaacatcagaatttgagtaatttttttttttttttttttttccgagacggagtcttgctctgtcacccaggctggagtgtagtggcacgatcttggatcactgcaaactctgcctcctgggttcaagcaattctcctctctcagccttgtgagctgggattacaggcacctgcctccacacctggctattttttgtatttttagtagagacggggtttcaccatgttggctagactggtctcgatcccctgacctcatgatccgcctgccttggcctcccgaagcgctgggattacaggtgtgagccactgcacctggccgagtaatattttttctgattatattattttcaccaaaaaagtatgaaatgaattatttaacctaaataatttgtacagaatagaatttttaaaattacattatctcactaaacatttattaataaatattaaactacagcaaatattagcagtatgttacatagtgcttaagaatctttggggcctgatagatctcagttcaaatcccaggtcttccacttggtatctctgtgactttgaatctcagtttcctcattagtaaaattatgatagaaatacctcttctgttacctttctagtgaagattaaatgaaataatttccaaatacttagtaggtgctcaaggatagtagctatttagttgactgtgtcttttttatatatttgactagtacgtgagctagaaatctctcagtttgtccttttaactctatcgtattggataaatactctaaaaaatatattctagtcaactcttatgccctgagcttattaatcatttagttcttcccaggttgagattttttaaacatgcttgtaacatgccaaatgaattttggaaatttagttgtatattcatcctacaaatagaaaaactacttcctaaacatttggtgatgtaagttaggcttcctgaccagtgcattagttttaatttcagtagttcrtgtccacaacatttctttagtattcatttgctttgataaccgaatcctagccaatatacacattcacaccattgagacagcataggcctgtgaagcctgacaaacttgaattcagatattgkttcaacagttcatatctgtgtccttgatcacttcataagcctcagtttcctcctctataaaatcagaaaaataattgctactttacatggttgttagagataacgagtatgaagtacctcacactgagcctgtatatagttgatcctcagtaaaacagttatcattataagtaaaatgaggttgagaatgttgctctgttatactgatctccaaatggggctaaaacaatttgcataatctgattcctctatctgtccatgcgtatatatttatatcagtgtggacagacttttccactctgcaatatattacttaaatatatatcagaaagtttgcctatcttattattcctaatcttctgaaaaaaaaattcacaataaaagagtactatttttaaggctttgtccattatacttactctagatctttatggagaataatttgtctccctgttttgacctaaatacagttatatttcaccaaaatatatggatggcattattttaaatacttaattcttgagaccgggtgcagtggctcacacctgtaattccagcactttgggaggccgaggcgggtggatggcttgagctcaggaattggagaccagcctggccaacatggtgaaagcctgtctctactaaaaattaaaaaaataggccaggcatggtggctcacgcttgtaaccccagcactttgggaggccgaggcaggtggatcacgaggtcaggagatcgagaccatcctggccaacatggtgaaacaccgtctctactaaaaatacaaaaaaaattagccgggcatggtggcaggcacctctagtcccagctacttgggaggagaatcatttgaacctgggaggtggaggttgcagtgagctgagatggcgccactgcactccagcctgggcgacagagcgagactccatctcagaaaataataataaataaaaatttttaaaaagtaaaaaaattagctgggcatggtggcacactcctgtagtcccagctactcaggagactaaggcatgagaatcgcttgaatctggggggcagaggttgcagtccaccctaggcgacaaagtgagactccgtctcacaaaaaaaaaaaaacaaaaaaaaaaccttaattctttataagagtaaatataggttcagtatcctttatccaaagtgcttgtttcggatttcagattgtttaaaattttagaatatttgcattatacttattgatttagcatccttaatacaaaatctgaactgcttcaatgagcattttctttgagcatcatgtctgcactcaaaaagtttcagattttggattttcagattggagatactcaacctgtaatcagatttatttatatttatccttagaaattctactttaggcagagcatttgcaaacttacatgttttcatagatatttcttaataatataaaaggtgataatatyagttcttgttacctttcctatagcctctttttaaaggaatacataggaaatatttgggctaccttaaggtaggccattagacaagttaaaagtgcttttatatattttggttctttcactataaagctaaaaattgatttagtctatttgattaaaaatggaatgtacagtgcatcaatcattttatctatgtgtaaaagctagtatagtcttccttcttggctcactaaatttatttctaaatgacttaactggatgttctaggtggtctaatccaagaaggaagtctctacttctactcagggatcttctagcctgctggggttggtgtgttttttcctttccttttttttgctgaaacagtatatggtcattgaaatcctgtatgtaacattattcctttgctacaggcagtagtcgttattttagctttatgtcattcctgatttcaaatgatggagaaatggctagaaagctatcagctacttcattgtttaccaaaagtagcaggaaaaaccatatcaaaggaagagctgtcagcatgttttctgagccttgtttttctccagagtaacaatgtggtgttaagagtgaagaataaattcttttgatggcacagccaacagccctacaaatgttagtcatgtatgtgtatcacgtatgatatttactcctcgtgtaggaacagatgtatttacaaagcttgtcctgtgtctgtctcttaggtgatgaatacagctcactgacttgttgtgtgtccatcccttttctgtccacttatagatgtactccaacacagttgctttaagtgacgagttcatcgcactgcagccattgtcgagggcaaggaatcagctgagcaaacttaggtagagtaggaggagtagagcctcattaactcttctgcatgctaaaggtcaattaaacaatatcaaaagatgggcagaggcataaataaagagcggggcatttttgttagcatggccctgtctctgaataatttgacctttattaacatatacgttaaaacctaaaaaaaaaaatccatttcttctttgagaagaaaattcagataaaaattcaacgtgatcacagaacagagatctataccttgttaatatatctttacaccttaactaccttttctagtacaattctaatgcttctgcttgtcatgttattcatatttatgaatgctcctgcatgttgagtaattaaagctacatatttggaagtgagagttgcccattttttttatcttgccttaatctgtattgtaaatacatgtgcatatttatgtttgtgtattgtaatggctgctgaagcatttcatatcctggctactatttagtgcatctataaatcgaacaatgtgtgtgtatgtcttatctttatctccacagacagattcattctgtcagtttgtacaaaaaataatagtttagggatgccttttgataaaaagggatgaaagcttaaattctagaactgtttatattaagatactataactatgtattaagtatggtttgaaggggaaaagtaatataagttattatttttctttttagaaattgacacttttccatttcttgccctattggtttcttacagattcttaatcacgtattttttaaattattttttattctcaaggtttctaatctttctctatgttcatttgaattttaaattctgttttattctcaaggtttctaatctttctgtgttcatctgatcaaatgaatggcttttacgaagcaccacttaaatagccttttataaaactctatgagttcataatattgagctgtttaaagatttactaaacctttcaggttttttattattagcttcaactttaaaaaatattctatttcaaattacaatggtgtaataattacagatgagtatacaaatgggtgtttaagttgtagtcaactaaattttatatttaaaatgagaactaaattaaaacaaacttaaagatttaccttcacttttgtctgagccaaatatgtgtatcacaattttatcagtaggtgactttaaaaacagtggctttctatcacatttttgagcatctaattgtttaaagcaaaaggagagctcattatttaaaagcacactctggccaactgttttgtcatataaatataactttcgtattgtgactaattatatttttatgaaatcatattttcatatatcatactggcttaaaccacttttttttagcaaagctagatttaagaataatggagaaaggagatcataaatcaaagaaatcacagattctgtaatactctaataaaacagtaagctgaacattcatctctgaaagatcacagtgagaacaggatattggtgagatgttctttctgcaagccactctccaatcaggtggtgtaacaagtgggaaagaacactgttgagagagcggcagacctgaatgctggtgctgcagttggtgctactcccagtgggtcctaaccaagtcacttcacctctgggcctccaggttcttcacctgtcacatgatcattttacatattgtggtctgtttatttaccatcagcatcatagaagagcaaaaagaagaaatactgtgctccactaaaagccaggctgagaaaacagttactcacattgagcagtgagtgaccactaggtgggcatttgttcatagctgcatggagaacaagtgcccatatacatctttctgctgatgcagcctctaaattttgaatgcatcagttttttaaactgcattgagcaatattccgtgggtgtgatccataatagcgtaactatttacgcctgtgacagagaggaaaactgtatggatatcagatatctttaagagctttttaatctttaatcaagttagtacttcttaaggatgattaaggccaggcagtggctcacacctgtaatcccagcattttgggaggccaagatgggtggatcccttaaggtcaagagttcaaggccatcctggccaacatggtgaaaccccatctctactaaaaatacaaaaattagctggggtgtggtggcaggcgcctgtaaccccagctactcaagaggctgagacaagagaatcgcttgaagccaggagttggagattgcagtgagccaagatcatgccacttcactccagcctggacagcagagtgggacttcttcttaaaaaaaaaaaaaaaaaaaaaaaaggattaattcaaaacttattaacaattttcttttgaataaacaaagctcattttgagtattttcttttcccctcttcccctgtgttataggcaaagctattaaggtatcttcacataaacttagtatacccttgaaaccaaaaaattctgcttagtttttgtttatgtcagaaattcagcattgcatctttcatagaaataattattggtcagtcttaatcctggaaaaatacatagagatgaggcaaaattgttttttattcattaaggacattgtcttataataagatttaaaataaagatggctatggaaacattttaaacttccttagaagatctctaatacaaatacagaaaaagaactgaaatttatataaattattgaccctcattaaaaatctgtttcaaattaaggattaaatttcttttgttaacaaatagatcaggtgaagccctttgcacacatgctcaacatttctaaggccatgaagtccagttagagtagagaagtcttctgagaagggaagcaggmaaggtgagaaattggacataccttttcaataagaaccctaaatcttggtggcaaatgaatttaatagaagaaactgaattttattgaaagaaatttggttttaacttagctgtaatatatgtttagttagagcttygtgcactgaaaaatcatggctttattttgtgtgcttgtgttccccttaagaagttcccattagccctcttttgtgacagtaaatgtactgttctttgaacattcttttgtgcctcagattgtgaatgccaacttgttgctttgatcttaaacctctatatggtgaagagtatcattctgtaatatgagacttgttgcttttctgtccttccagatggaagaagataagggttcagtcagctcagcatatgaatttgctgaaagccagcacagaggggaggacagtaggcacctgctagctgaggcttgcagccagcaggacagttgttgcgtgcactaggtagtactgcgctggaccttcccgggcactcatccgctaagttctcatgcttggggggcatgtcatgggacacctgacctgacatttccatttctttactaattccttcactgttcctcatatgttgttttagtttcgttgttttccttttttgtggtctttacatttttcatatgtccatccctgaaaattttgtcaatctctctttagagttccaaagataaatcagacttcacctcacattctaagctgtgaagatattctcacaacctattgtcttacattcaagaaaatactccttttyacttctccttttgaaaatgtcatgctatttctgttatctctgaaatcattttcccccttgaagttgtagttgtgtatcatttacccatcttaatatagttrgatactgaattacttatctaagtcacctcttaagttgaatgatcaaagagtagggtgcttagacttagtactgagaaattttctgctgactgctgctattcaacaaactttccattcttttcataaattttttctttgagacagggcctcattccatctcccaggctagagtgcagtggcacgatcatggctcactgcagcctcgacctcccgggctcaagcggtcctcccaccctcgacccctctcccccagtagctggaactacaggtgcatcccaccatgcccaggtagttttttgtattttttgtggagactgggtctcgccgtgttgcacacactggtctcaaactcctgggctcaagcgatctacctgcctcagcctcccaaagtgctgggatataggcgtgaacccccacacctggctcataaattttcatagttgtatctgttttaaaaaaaaaaaaaagaagaagaagaagaaggccgggcatggtggctcacgcctgtaatcccagcactttgggaggctgaggcgggtggatcatgaggtcaggagaccgagaccatcctggctgacacggtgaaaccccgtctctactaaaaatacaaaagcaaaaattaactaggtgtggtggcggatgcctgyagtcccagctactcgggaggctgaggcaggagaatggcataaacctgggaggcggagcttgcattgagctgagatggcaccactgcactccagcctgagcgacagagtgagactccgtctcaaaaaaaaaaaaaaagaaagaaagaagaattgatgagagcttgattttctcttctctcgaggaataaccctgacaaccatttcgagacctaatagggatatgcagaatatttggattggtagtaatgatggaggataaaatttcctgccactaataattgtattatttggactaattgctattttatttattgtaattactagtcaagaaagtgctgttgtctcatatgggagaagcagtgatgaaactttgtaacaaagccacttgaaaattgtaaatcttttaaccacactataaatcagaccctggaacaggtagaataatttgaagaatctggactattctataagatacagttttaaattagattagtggattaccctaaatgaaaaattaatcaactctgttattaaatatcatcagttgaaaagatattcaaaagaatcctgaatttttgtgtgttttggtatgcttcatatgattatatttacagtatatttctgttgcattgtgccttgctatagaaagatgtttaggcttttttaataggctctgattgagcgccaaagaaagctcatgtgaagagcttgctgctgcctaggatttatgttatgccttggatagtctacaaagcagataatctcctaagacctgactaaaactataaaattgtgtcctctgtaataaaaggtccccacacatttaagttctagtggatatttcatatgatgtggatctggtactgctttgctttaatatgtccattaaatgtacagtacagctgagaattgggttcttagaatgttcccattaaataacaggagccttattatggtgacttttgccaaggaatgataagtgaattctctcttacagcctgtgacattaatttaccgtctgcattaaatttggggattttatcatttttcacaggtattaatttcttcctcacctaaattacaaattcctagtcatatgttgttatttatgtaaccagtagaatacattaaaacaaaaggcccttagtcctctttcaaactaagaataagccagattattaaaataaatttaccgaatcaatataattctcatattattattttccttttttttttttttttttttttttgagctagacatagggtctcactctgctgcccaggctggagtgcagaagcaccatcttggctcaatgcgacctccacctcctgggttcaagcagttctcctgcctcagcctacagacgggctgggactacacacgcagctaatttttgtatattcagtagagacagggtttcgcgttgttggccaggctgttctcaaactcctggcctcaagtgattcaccttccttgcctcccaaaggtctgggattacagaagtaagccaccgcacctggcccatattcttaggtatgtaatacatacagaaatctccttctcttaagaaatccctaaaagacagtatggaagtattttataacaatctttctaagttgtttattttacttaragggaaggagagaggaaagggagtttaraaragtgaatatgagcttgaagaatgttttggagaaacaggccttgagtaagatataccagttacccagatttcatcactacctggctatctccattgcagttctgaattatgagatgaagctcattacttgttttagagattttatgattcttaatcagatttgaaaatcagtaacatttgatgacttgattttacattaaaaagaaaaacatttccttaaacacaaacctcttcttttttcatttttgtttttaaaattagagtttaagccttctttccaaataactccttgaaggccatgcaaggtgctcactttgattatccagtatatagaacacctttaagggcaaaagacctagcatggttaattgtttgacagttattatctaaactttaaaaaacaaaaacctttatttgatttgatagaatgtcataggtgtgactaaaaaatgttagaaatgtgagacatttttctaaaatttataagatttaaggaaggttgtaaggtttcaggaaaatattttgtataagcaataagaaatgtcttagtgtttattgtcattgacatgaaaataatggaaataaaagcagtgagccagaatttatttcaaaaggcaatttctgtgaagatgagcatttttattatctgtgcatagtcatgttgaatagacatagttgttttgcttgacagcctttctagcactaaattatgtggtcattcctgggagcaagtgtggtggaaagtgaggcttaccaatcacaacttctagtaaattaaaagttacctcttggtaccactaggtggggtctcactcccattactatgctttttttttcttttctattatttaaaagtggtctcccaaaacatgtaatgatttcccccaaaaatgtaatgatttcctctccttactttgaatgaaatgggctctaaatgctccactcccattctcctcacccaattatactggcaactatgtctatacaggtactctggcccgagctcccagttcctgaatattgagatcaaagatgtatatatgggaaagtagtagagcttggaggtttgctagagaacagtatagcattttctatagatagctttacagaaacacagccaacattcagcattttaaaagcagctgaggctggccacggtggctcatgcttataatcctagcactttgggaggctgaggtgggcggattgtctgagctcagaagattgagaccagcctgggcaacatggtgaaacttcatctctactaaaatgcaaaaaattagctgggcgtggtggtgtgtgcctgtagtcccagctactcaggaggctgagtcatgagaattgcttgaacccaggaggcggrggttgcagtgaaccaagatcacaccactgcactccagcctccagcctgggcaacagagtgagactcggcctccagaaaaaaaaaaaaaaaaaaaaaagcagctgagttcttttttttctttagagaaaaaaggaaacatatacatacaaactatatattcacatatatatacacttagttcaaaaagtgatctgaagaagtcatttcttaaaatttttgacatttcaagatgtttaccttctctgttgggatgtccatattttaataactgtccttcagttttaaagcaaaggatggccaggctcagtagctcacayctgtaatcccggcactttgagaggctgaggtgggaggaccactggaggccaggagtttgagaccagcctgggccgtatagtaagaccctgtctctactaaaattaaaaattagcctgacatgatgacgcacacctgtagtagctacccaggaggctgaggtggaaggattgcttgagcccaggaggttgagactgcagtgagctaggatcgattgtgccactgcactccagcctggatgacagagcaagaccctgtctytaaaaataataaaaataaggtgaaaggtgatgaatgcaaagcaagatgattaccagggtcagatccagaccaaggcagtgtcttgcacatatatggatactcaagcgctggctaccttctgggtgtcatctcgatgaatttctcccagttgattgagcaccagctttgagcaaagcacatgttgttaaactaaagtgtcagacaagatccttgctcttttgagtttctggtttagttctctccaagtaaatgtggtgaaggaccagtttgttattttcttgttttgttttaatttccagtttatcttgagccagtgcttttacaaatacaataaaaatgaattataggaaaattaaatctaaaagatatataaaataagccccaatttttaaattattgaatttaacagttataaacatactttgtccaactgctgtaaaaatttctaagctcttattctcacagattagaaatgcttatttcttcatgggccagtaatagtgtttatggatcagcattgatctatggaccacactgtgagtcacaactggtctttttgcaaggggacagtaccactcccttacacttaggctaagcttctgcggaatacacaccacactgctgcccacacatagccactctttctcctccttcagcctggaatatcttttcccccccatctcctgctattgaaatgcccccccccgctaagtcctttaagatgtattttaaatgccacctttttcatcaaatcttcatgccctcccaccagtaccactaacagcagctgggtttgagctttccctcctgttttctgagtagtctgcctcttataatcataaggcaggaagtgctatggtaaaggggtttgggctctgcaagcaaagaaaccaagattcaagccccagattaagtgggtgaccttgaacaaattcttaacggtttcctcatctgtaaactggggatgatcatgatgcctattcctaagggctgtttaagttttcagtgagacaatccatgagaagcatcttacatagtcactggggcatacgtggtgagcactccactaatgtaactgctgttggtatgtcttcctgacttgtcctctctcccaccttcttccttacctttagctcaccggattgagcacagggttactatcccctgtggaaagtggcacagtaccttgctcaataaatagaagtttaagtgcttgtgccaattaagtgatacaaataagcagtgaaatagaatcagagaaagagatgactcatagttggagaggtgagggaagttaatggagacggtaggatttaagctgaacgctgatgtaggggtcagcattctgaccctgattgatggcaggccccgacacgttgcccacaggcagggaacattggttggctggagtggagactgcaccagagcattgggaagcagagcaggaaaggcagcctggggtcaggctgtaaagggccttcaaggcttcatgsggtrtggggctttatcctttgagcatgtaggagccctggagtctgggttgctacaaggggtaaatttgagattgggaaaactggagtccagggacccaaagagaatactggaaaactgatgaaatcctgttacctaaaccagcatttcctaaactgttcctctgaatatgaatgatcctcctggtgttgcttaatatttgctggttggtgggtgggggtgtatggtttctcccactaagaaaatgagtggagaattatgatatctcaggcttcccccatggagatgaccatgtatcctgacttcacagtcctctactttaaaagtctgtttagaactttgttaaattagtgtttcccaaatttaattgaacactgaccccctttttttttttcatgaaatgtctgtaaatatcttacaaaacacagtttaagaaactgtgccctaaacaattctaaaccaagagtattgtaacgaaagaacaagtcaagtttggctctttctcagtgcttagctgatcctaggacactgtcatcaggcagttgccagataagaaccatgttgtttcacactgtgtggtgttgaatcttctgagcatggatcttgcaggacatcagcagttgtttacattcagaatgccaggtttctgttccatcacgtccgtctcttctgttcattgtgagcatctccacaaacatcctctgttgcctgcacccagcacatggtgattcccaaccttcgtggaagtgcagccctgtatttattctccttctctatcctcaaaagatgtgttaygtaggatgttatatatgtaaaagaaggtgaattgaaataaggtgttttttttttaaaacaacagcccttgaaaaatttcggagcatctttgacaaacaaaaccagggttgggattcatcgagctacgtggtcataccatctttccccctcatttttactcagttaaaattgttagtcgtgtggaataaaattatcttgctgggctatttatgcctgaatcaacataaatcttgcatactttcagaaagtaattcagtttcaaatcttgatagtactacttattcacttgtttaataaattttaatttattaaactgtcagctaactgttacaaagcaggatgagctgatgatgggatgattgccacttaaaagtttttagcaatttatgataaatgatgcttttttcaaagataagtatggagtggatctatgtagagtgcttagaacctggcacatagtaaagcatacgtaaagtgtttgctgccattgttgttgttactgaacattggggtgaggtcctgcctgattgttatttcccagtcttaaagataattcatactccacttatctcaattgttggacattgttcattgaaattgcaggctagacatttttaattgaaattgcaggagcatttcacctaaagaaaaactccatgcagaattggaattcattacattcctgagtggttgatggaaatcattttgaccataataaatgattaaaatgaaacattaaaagtagatttacataatatccagcttcttaatttatataattattttacyagacctctaatttaggatacaaggctttaaaataattttggatggttatactctagtaaattaaagcctttcatatgtttcccatattatagaaaaacatgtaggtttatatatgttacctttgatttgaaagtgcttgttgtaatgttctaatgcttttcagaagtccatatctttaaacaactgatgttttctgcttcacctcccgcagcttactgaaacaaatgcaggtatcaagtgcttggactccatgtgctgtttcccggaaggagaagcagcgtgtgcatctgttggaagaatgctggaacgagttataggaagatgtagtccaacccacatcagcaggtgtgaaatmtctctaagtagcctttgctgcagatgagtatcctatctggaacaggatgaacctgccgctctagatacctaataaatcagcagctggttttaccaactgaagcaggaagtctgctatttattagcactctttggtggtagatttcactttgtggctttggggtaagggctttttcactcacaaaggaagagaaagcacctttgaagagacttcatctaatgaacaaaaaattttgtttcataatctttctaaaatgtgctcagtaggagtgtgtttatggtactcttttatggtttgtataactttcttttttaaattatacatatactatttcctttttatttttttaaaatttttttgctttttgtctttacaaaataatctcaacataacagtgaagtcaaaggctttccttttcttactctgtatgtatattttccagttggttatttgaggctttgaggtatttataaacacaaaaggctgtatttctgctcccctacctcttcttatgtctgtaatgaagttttgaaatgagtcatgatttttaagtttcttttgcttggtatttattgcctaattaaaagtgtatgagttagaacaggctttttaaattatggagtaaaagaatcttagcatttttgtcccctcctaaatctgtttcttgaatgagatttatcaccatgcctgctgttgtgcaccataacgaaaaaaaacaccttttggtaaacaccatttaaaattcatttaaacttgcaatggatttatttattcatacatttccccaagagttatatcactatttagaggatgttagggggtagaaagagctttttccacacttggtgttctttaggtgaatgataccatattctcaaaatcagggcagcagtacacggtatgcatggaggtacaaatgggcagggagagatgttggttgccattgtcccaaatgtgctacatgaatattagcactttctacatgtgccagggcttggaaaaggttggaaattaccccaggaacaggttataaagagtgaagaaggcactactcctatctactggaaaaaggatttttattatttggttagctttgtgttttaaaaaaatgatgagtatgatatcattcatctgttataaaattcaggtaacttttactggtgaacttgttagttctcactttagctttagcttagccatgcctttatgatacaattgaatttataaatagcattcttatgttaacataatgtctgtggtttcaatccccgtttattctgacttgattataacgtgatctgaaatatttccataatgctgtgataccattttgtagtaatttcattccacgtagaaggatgagcacttaaactctgggactttgttatgatttacataattgtattataaaatgtggctctgtcatgtacctaggccagcaaatttcccaaagagcttgatttataatactattttacctaataacatagcttcattgcacagaatcaagatagragttagactaagatacaatagaacctctacagaattttttcaacttctccttcaatggaaatttctctttaatgacaatatacgtttttgttaatgatttttttaaaactagaattaattttaaatgagccccagattttttctgctatatacatatatccrttttcttgatatcgattatggtaatatgcccccattattctttacatagccattttgatgcagcattacctcttttgaacctgccccaggagttattgaatttacttttacatgttctcttgaaggtagctattatcatctatacttcttttcacttaaaattgcgccatattgtttttttctgaatttttttattctcctaataaaatgtttaacttagtaattaatatcatattagactataaatgcccttccagktttctccaacatcacaggttatattattggttactattattttcttaccctttttctcatgtgaataatctagaaggtcttttcagacctgttcattcttttctaggggataaagtcatataataacaccaagctacctggtgcttttcaagggctatgtgaaaattgccatagatgcatcaatattgtatttaaacttgcaaagtcattttgatacatagagttctctttttgtttacatataattgtatttgtgaaatgtgttgggcatttccattgtgactttagagtagcatctattctatgtttctatttcatgtctaatttaagaggtggggcaagtctgagactgccattccaagatgtagaagcccttagctgtgtgttccattgacatagtaaagtcaagagtaatgggcatcacttgagaaatgccaccagtgtttttatgtgacagatttctttggtgattacatttgtaccatccaggcacaaaaatttgacttacattttattaattgatgttgtcaatgaagtatcccatattgcaagctcagtttcaaagagagcatcatggtgctatataaagaatatgccatgttgcaccctaaagagctggattttagcaataaaagattttctgttcgtgtattactaacagttaagctactgtatcctcatcaaaactatcttctaaatagaaagtaatatgtagttcaagtgtttaatgttctgtcaaaaattatatttaacatatgaatgcacatgtgtgctttgaaaaaaaatttaaaatgaaggagactttacctaataagattattctgtgtaagcaatgtggaaagaagaaaaactaatataaagtattggcagtttggaattggacatctgactccggataattggagtactgatagctgttatagttaaaagttatagttaaaagcatacttgtcccctgtaaatacttactctttaagaaattttcatcttctcattttattcatttattctgcaaatactgggtgcccaatatatgtcagacacagttctagatgctagggagacagtagtgaacaagtccttccctaacctaaggtagatactgttccagcttttctagaaactagtcgaattaaagttgagctacatacaaacttagcatctctgggaaagagaaaatatttgacaaaggtgaattggggccttttttaacgctcatctcttcctgtaacatctctgtttagggaaggtgggaaccctggaaaaagttacataaaatgtatttattgttaaatgtgtttagtctcataagaaaagcagtctttcacttggtaatcctaatactgtccttgaactaggttagtctattttaagcatggcaggctacttttggtcttgagttattttagcttaaattaactcaagctaatttaagtttacagctgcacataaagtattatgtaatgacttgctttagggccttatcattcaaacaccagttaacttttccagaccagtagaggatcgtttgtccttattaagtgaaaacgctagtgacctacaggtgtctttgatgccttttgaatacatcattcgctacattcaagctaattatgckgaagtctttagaataggatttatagctgaaatgaaatgatcaataataggaacatactactgtttcattccaaagcctttggtaagtgggatttgggtttgtttttgtaaactgaacttttcagtaaaacaatgtgcataactcttaataacatacttcttattgaattgttaacactttaaaagcagctcatgctttactacatatagaaactgttttaatgctaatgaatgtttgaattttggctaatatttttatatgatgactagagcattatttttcccaagtttttatataatataaatagaaagtttgggcattcgatactagtatgaagaacctctctttagtatttaaatgaatcaatcagtgattgcatttgggtcctaagttttagagtaaatttttttctcaattaaaacataggtcctggtgagccaaacttttctcttattgttactttagatcatggagtgcatcggatcctttctataccaacgacaggagcatcttgactctctccacaatggactcatctacttgttaaaggggcagtagtactttgtgggagccagttcacctcctttcctaaaattcagtgtgatcaccctgttaatggccacactagctctgaaattaatttccaaaatctttgtagtagttcatacccactcagagttataatggcaaacaaacagaaagcattagtacaagcccctcccaacacccttaatttgaatctgaacatgttaaaatttgagaataaagagacatttttcatctctttgtctggtttgtcccttgtgcttatgggactcctaatggcatttcagtctgttgctgaggccattatattttaatataaatgtagaaaaaagagagaaatcttagtaaagagtattttttagtattagcttgattattgactcttctatttaaatctgcttctgtaaattatgctgaaagtttgccttgagaactctatttttttattagagttatatttaaagcttttcatgggaaaagttaatgtgaatactgaggaattttggtccctcagtgacctgtgttgttaattcattaatgcattctgagttcacagagcaaattaggagaatcatttccaaccattatttactgcagtatggggagtaaatttataccaattcctctaactgtactgtaacacagcctgtaaagttagccatataaatgcaagggtatatcatatatacaaatcaggaatcaggtccgttcaccgaacttcaaattgatgtttactaatatttttgtgacagagtataaagaccctatagtgggtaaattagatactattagcatattattaatttaatgtctttatcattggatcttttgcatgctttaatctggttaacatatttaaatttgctttttttctctttacctgaaggctctgtgtatagtatttcatgacatcgttgtacagtttaactatatcaataaaaagtttggacagtatttaaatattgcaaatatgtttaattatacaaatcagaatagtatgggtaattaaatgaatacaaaaagaagagcctctttctgcagccgacttagacatgctcttccctttctataagctagattttagaataaagggtttcagttaataatcttattttcaggttatgtcatctaacttatagcaaactaccacaatacagtgagttctgccagtgtcccagtacaaggcatatttcaggtgtggctgtggaatgtaaaaatgctcaacttgtatcaggtaatgttagcaataaattaaatgctaagaatgattaatcgggtacatgttactgtaattaactcattgcacttcaaaacctaacttccatcctgaatttatcaagtagttcagtattgtcatttgtttttgttttattgaaaagtaatgttgtcttaagatttagaagtgattattagcttgagaactattacccagctctaagcaaataatgattgtatacatattaagataatggttaaatgcggttttaccaagttttcccttgaaaatgtaattcctttatggagatttattgtgcagccctaagcttccttcccatttcatgaatataaggcttctagaattggactggcaggggaaagaatggtagagacagaaattaagactttatccttgtttgcttgtaaactattattttcttgctaatgtaacatttgtctgttccagtgatgtaaggatattaagttattaagctaaatattaattttcaaaaatagtccttctttaacttagatatttcatagctggatttaggaagatctgttattctggaagtactaaaaagaataatacaacgtacaatgtctgcattcactaattcatgttccagaagaggaaataatgaagatatactcagtagagtactaggtgggaggatatggaaatttgctcataaaatctcttataaaacgtgcatataacaaaatgacacccagtaggcctgcattacatttacatgaccgtgtttatttgccatcaaataaactgagtactgacaccagacaaagactccaaagtcataaaatagcctatgaccaactgcagcaagacaggaggtcagctcgcctataatggtgcttaaagtgtgattgatgtaattttctgtactcaccatttgaagttagttaaggagaactttatttttttaaaaaaagtaaatggcaaccactagtgtgctcatcctgaactgttactccaaatccactccgtttttaaagcaaaattatcttgtgattttaagaaaagagttttctatttatttaagaaagtaacaatgcagtctgcaagctttcagtagttttctagtgctatattcatcctgtaaaactcttactacgtaaccagtaatcacaaggaaagtgtcccctttgcatatttctttaaaattctttctttggaaagtatgatgttgataattaacttacccttatctgccaaaaccagagcaaaatgctaaatacgttattgctaatcagtggtctcaaatcgatttgcctccctttgcctcgtctgagggctgtaagcctgaagatagtggcaagcaccaagtcagtttccaaaattgcccctcagctgctttaagtgactcagcaccctgcctcagcttcagcaggcgtaggctcaccctgggcggagcaaagtatgggccagggagaactacagctacgaagacctgctgtcgagttgagaaaaggggagaatttatggtctgaattttctaactgtcctctttcttgggtctaaagctcataatacacaaaggcttccagacctgagccacacccaggccctatcctgaacaggagactaaacagaggcaaatcaaccctaggaaatacttgcattctgccctacggttagtaccaggactgaggtcatttctactggaaaagattgtgagattgaacttatctgatcgcttgagactcctaataggcaggagtcaaggccactagaaaattgacagttaagagccaaaagtttttaaaatatgctactctgaaaaatctcgtgaaggctgtaggaaaagggagaatcttccatgttggtgtttttcctgtaaagatcagtttggggtatgatataagcaggtattaataaaaataacacaccaaagagttacgtaaaacatgttttattaattttggtccccacgtacagacattttatttctattttgaaatgagttatctattttcataaaagtaaaacrctattaaagtgctgttttatgtgaaataacttgaatgttgttcctataaaaaatagatcataactcatgatatgtttgtaatcatggtaatttagatttttatgaggaatgagtatctggaaatattgtagcaatacttggtttaaaattttggacctgagacactgtggctgtctaatgtaatcctttaaaaattctctgcattgtcagtaaatgtagtatattattgtacagctactcataattttttaaagtttatgaagttatatttatcaaataaaaactttcctatataattaaaagtgttcctttatttaagcattttaagcctgtctctgtttatcacaacctgcactgccaaacttgtttcaagttaagttttactgtatttacccttcattatagcacagggatatcatttatgcctttcactgactgcagttttttaaaatgtagttcttacccagcttttatagatcatcatcagtacaactcctggaaaaggctctgataggaatgtgccagctgtagataccagcatacctcaactagaaattgcatcattcatgaaaagccagccaagagcacttgtgaatttggaaatggcctggttcatagaaaatatgtgcttttttaaaaatataggactgattgattgattgataatagaatgtatacgtccatataaaatattccagcttcctgacaaccagttatttgcactgcttcctcggttgcaagttagaacagacataattgtctaatctacatctgcttaaaaagttaagctgttgtctttgcccagtttttagtatttgcaaaggatgacaatgcatgatttatgtaatgtatttttgagatgtaataagaatacgatcctagacaaatcagtttaggcatctgtttttatatttaaaaaggagtgtttggactatctttagggcgactactgtctttaacttctaatatacaagtagaacatgatgaataatgaataaattatttaggacaaaaaaattttattagaagcatctcactagaaaattaattagtgaattcaaaaacaattcaagttttatattgaagagctaactgactcaaaggaaaggctattgtaaatggagataagtaagtcaccacacctctctatgaacagccagagagccctgtgataaatcaaatttttaaatactaatttaagggaaaatggtttgtattcagatgtaatttgtacacagtaaaatgtatcgattttaggattatagttactcacttttgataactctctacacccatgtaaccctwacccaatccaggttaagaacccttccgtcattcctcaagggtcccttgtgccttttgcagtgaatttattcccctcttggtcctgtcccagcaaccattttatgatttctgttgtcttagatgattagttttgcctactcttgaattttatgtaaatgaaatacacagtgtgtcacctttgtgtctggygttgttgctcagcgtctctgtgggactcactcatctacgttgtgccaggacccatagttttctttttgctactcggtagtgtttcattgcatgaatgtaccacaatttgtcctttctcctctttatggacatttgttcttttacagtttggggctgttgttaaataaagttataatgaacattctttgtggacttatgttttcacttgttttgtgaaataactaggagtagaattgcagggtcatagggtaggtttatgttygtttataagaaactatcaaaaagttttccacagtggctgtaggtactattttacactgccaccagcaactatgagagttccagttgccaacatttggtggtgtctttttaattttagccattctaataaagcatctcactatggttatcatttccatgatgatgtttttaatccttttttcgtatgctcattggtgatttatgattttttcaaaatgtctgttcaagtctggccattttctcattaggctacttttcttgttactgaatggtaggaatccttaaggtaaggatataagtcctttgtcttatgtatgtattgctagcatttttcccccagtttgtggcttgcctatttattttcttaattgtcactctggggagcagaagtgttgtattttgatgaagtccaattttttttccttttatagttagttagttagttttaggtgattttcatgacttctaaaaactctgtcaaccccaaggtcatgaagaaattttcccatgttttcttctgaaagcattagtcttcttaacttttatgtttaggtcaaagatgatatctcatattcatttgagtatgatgcaaggcagcaaggaatgaggatcttccttccctgcaactcccccccaccccacaaggttatctggtttaactccatttctttctttaaaatattctcctcctccatcgaattgtatggtgcctctgtttaaaatgaattgacttttctacaaaaaaaaaaaaaaaaaaggaaaacctgatgtggttttcatttgtattgctctgaatctatacatcaatttggaaagaacagacatctcaacaatattgagtcctccaatccatgaacatggtgtatccatttatttaggttgtctttaatttatctcagtgatgtttggtagtctttaggtatctggcaaatactttgttaaagtcctaattttttatgatttttttatgctatggtaaggggaatcactttcaaatttattttcctattagccttactagaacacagaaataaaatatgaaataaggggccgggcgcaagggctcacgcctctaatcccagcgctttgggaggccaaggcaggcagatcacaaggtcaagagatcgagaccatcctggccaacatggtgaaacaccgtctgtactaaaaatacaaaaatgagctgggcgtgttggtgcacgcctgtagtcccagctacttgggaggctgaggcaggagaatcacttgaacccaggaagcagaggttgcagtgagccaagatcacaccattgcactccagcttcggcgacagagcgagactccgtctcacagaaaaaaaaaaaacgaaaaaaaaaaataaggatatgatcctggacaaatcaattttaactttgttaacctacaacccttctatattcactcatttgttccagtaggttttttactccttttgtatagaatcctttggattttcacatacacagtcacgtcatctgagaactaaaaggttaatttttttctttccaatctttatgcctaaaattacttgttactgccccgcacactggctagtacagtgtgcttaatactggtacagtgttatataggcatggttaaaaccatgaataggtgttgaattttgaaaaatgcttttttttccatttactgagaggatcatgtgatttaatttttttagtttgataatacagtgaattaccttggctgattttggttttttgtttaagagacagagtcaccccctgttgcctaggctggagtgcagtggcagacttatggctccactgcagcctggaactcctgggctcaagcagtcctcccacttcagcctcccaagtagctaggattacaggcactcaccaccacacccagccgatttttaaattttttgtagagacaagagtatcactatgttgcccaggctgatctccaactcctgggcttaagcaatcctcccacctcagccccccagaatgctgggactacaagcatgagccaccatacccagtctaccttggttgattttcaaatggtaaaccaactttgcatccctaaaataaatcccacttggttgtgatgtttcttactacactatgaccaccgcccctcacccccatttatatctacttcctcagaaaatagacctgcctttaaagtatatccagaattcaaatgcattaatatttagagtgtttgtcaacctggtcgtcatcctggtctaagtcaccatcatctcaggataactgcagtaactctttaactgacatattacttccctattgctgcataaaaaatttccccaaaatttcgcatcataaaacaatagactttatcccagtttctgtggatccaggatatgggtgcagattatctgggtaccaaagcctcaaggtctttcacaaggctgcagtcaagctgtcagtcagagctgcagtatcacctgaaggctcaactgagattaaacctgcagccaagctcattaatgtgattgtttgtattatttagttctttatgggttgctgtactaaggactttcagtttcttactggctggttggccagagactgctctcagttccttccctcacggacctctcgaaaaggcagcttacaaaatggcagctggcttgcaaccaagtgagcaagagagggcatgcaagatggaagctatttataacctaatctcagaagtgatgcctcatcactttgccatattctactcattagaagcaagtcagtaagtccagaccatacgcaaggggaagagattacacaagagtgtgaatcccagaaggcagggaccattgggggcattttagaggctgcctaccacaactgatcccctactttcatcttacctccactctaccccccgacacaacaggatttttctcaacacatcagctaaagcaattttattaaaactttagtcaggacttgttacccctttacttaaaaccctccaatgacttcccacctcactgtaaaagccacagcactaataatagcctacaaggccatatacaatttgcttcctgttatctctgacctcatatattactctccttaccccctcctccccagcctgctagcctccttgatattccttaaacacgccagactcattgccaactcagagcccttacagtttctattttctctgcctacaaagccttctcagatatatgcatttttttaggtgtttattcagatgcgtcagtgaggccctacctgaccaccctgtttaaaactgcatattctccttaccccatcctgcttcattttccctctgcagcactatacatgacactgtatacttgactgattttgtttattacatccccaacactagaatgtaagctccatgagggcaactattattatttgttttgttgactgctgtattcccagaataatgcctggcacattaagggcttaagagacatttatttgaataagttagtgaatcacttctgaaagccatggggagttactagaggatcttaagccttttagttaaatcatcctgacaacagtgagaaaaagtggttggaagagaagcagacaaaagccatagagaatatataaaaagccactgcaaacatcaaggcaacgtgtgatgggaattcaaatgaaggcggtggcactaggaatcaagaacattagattgacacatgaaatagtgaggcaaaatgtatgagtggttccaaaactgatctacaaattcaacacaaaccctatcaaaaaaccagctggcttctcttgcaaaaactgacatgcagatcttattatttatatggaagtgcaagagactcagagagaaaccaaaacaatcttgaacaaagttggaagacacacttcttgattctaaaattttactataaagttatagtaatcaagactgtggttctgacataaggaaggacatagacaatacaattgaggatccaaaaataaatccacacatttacaggcaactgatttttagcaagggtgccaagacattcagtggggagagaaccatcttgtcaacaaatggtgcagggacaattggatatccacaggtaaaagaattaatttggacccctatctcaggcattatacagaaactaacctaaacaaatcaaataccaaacaataatctgaaactataaaactcttagacacataagtaaaaatcttctgacattggattaggcaatggtgtgatacctgaagtacaagcaacaagagaaaaaaatagataaaattgaacttaataaaaattaaacttggccaggcgcggtggcccacgcctgtaatcccagcactttgggaggccaaggtgggcagatcacgaggtcaggagattgagagcatcctggctaacacggtgaaacgccgtctctactgaaaatacaaaaaaaaaaaaaaaaattagccgggcatggtggtacttgcctgtagtcccagcaactcggggggctgaggcaggagaatcacttgaacccgggaggcagaggttgcagtgagctgagatcacaccactgtaccccagcctgggcgacagagcaagactctgtctcaaaaaaaaaaaaaaaaaaaaaaaaaaaaattcaacttttatgccataagatgctatcaagaaagtgaaaagacaatccacagaatagtagaaaatacttgtaagtcacatacctgataa

SEQ ID NO: 93301 - DNA, 48169 bp, Homo sapiens
aaatggtagataaatcctgccttatcagtaatttcattaaatgcaaatgaattaaatactccaatcagaaggtagagattggcaaattgatttttttaaaaatcatgatccaactatatgctatctacaaaaaacacacttcattttatttttatttttattatttagagacagagtcttgctctgttgcctaggttggagtctagtggtgtaatgatagctcactgcagcctcaaacttctggtttcaagtaatcttcccaccttagccacccaagtagctggaactataggtgcctgccaccatacttggctaatttaaaacaatttttttagagataggacctggcttacttcaaaacttacctggctaatttcacttcacataacgatcttcagttccatccatgttgttggaagtgacaggatctcactctttatggctgaacagtactccattgtgtataagcaatatattttctttatccattcatctgctgatggacacttaggtcgcttccaaatcttggctattgcaaacaaggctgcagtaaacatgggagtgcagatatctctccaaaaaaaatttttttttttttagagatagggtcgtactgtgtttcccaagctggtcttgaactcccgtcctcaggcaatcctcctgcctcagtctcccctaagcagctgggattacaggcatcagccaatgcacctggcaaaacacactttagattcaaaaacacaaacaggttgaaagtaaaatgatggaaaaagatataccatgcaaacagtaactcaaagagaagtggagtagctatactaatgttagacaacataaactttaagaaaaaaattgtttctatagacaaagaaggacttttttttaatagttccaacttttattttaaattctggaggtacatacacaggtttgttacatgggtcctgaggttggggtacagatcccattacccaagtagtaagcatagtacctaatggttagctttccaatccttgcacccctccctcccttctccctcttgtcatctttagtgtctcttgttgccatttttgtgtccatgtgtatctaatgtttggctcccacttatgagactgtgcaatatttggttttctgttcctgtgttatttcacttaggataatggcctccagcagcatccatgttactgcaaaggacatgatttcattcttttttatggctgcatagtattccatggtatatatgtactatattttctttatccaatccactgttgatgggcacctaggttgattccatgtctttgctcttgtgaatagcactgtgataaacatataggtgcatgtgtctttctggtagaatgaattgttttcttttggatatatacccagtaatgggaggctatgttgaatggtagctctgtttttgtttgtttgtttgtttgtttggtggagtctctctctgtcacccaggctggagtgcagtggtgtgatctgtgctcactgcaacctccgcctcctgggtttaagcgattctcctgcctcagcctcccaagtagctgggactacaggcgtgtgccgccatgcccagctaatttctgtatttttagcagagacagggtttcaccatgttggctaggctggtcttgaactcctgacctcaggtgatcgacctgcctcagcctcccaaagtgctgggattacaggcatgagccaccatgcccagctgctctgttttaaattctttgagaaatctccaaacttctttccacagtggttcaaccaatttacattcctgccagcagtgtataagcattctctttttttccttagcctcttcagcatctgttattttttgactttttaatatagctattctgactggcgtgagatgatatcttattgtggttgtgatttccatttctctgttgattagtgatgatgaacattgtctcatatgtttcttggccacttgtatgccaaggacattttatattgataaaagggtcagtccattaggaaaatatgacaattataaacatatgtacctagcaatacagcctaaagatacatgacataaaaacttagagaattgaaggaagaaacagacaatttaactacaatagttggaaccctcaaaactccatttcaataatagctagagcaactaggcagaagatcaacaagaaaatagaaaacactataaaccaactagacttgacaaatatctacaaggcactccacccaacagcagcaaaatacacatccttctcaagtgcacatggaacattctctggggtagatcacatgctaggccataaaacaagtctcagtaaatttaaaagaattgaaattatactacatatgttctctgaccatgttggaataaaatcagaaatcagtaacaaattttgttaatttctgtattaatgaagaaatatacaagtaaagaggttggactaataataattcttttaaaacttcccacagggaaaagcccaggaccagattgtaagccagatggtaaggaattaacaccaatatttcatagagtctcctaaaaaatagaagagaagaaaatactcctcaattgagaagagtgtcctcaactttatgaggtcactcttaataccctgataccaaaaccagacaaagatgtcacaagaaaagcaaatagcagaccaataatctcttgggaatacaaacggaaaaaatcttcaacaaaatactagtaaaccaaatccagcaacatagaaaaaggattatacattatgactaagtgggacttatcctaagattacaaagtttggaataactcatgttctcttgtaagtggaagctaggctgagcacggtggctcactcctataatctcagcacttttaggaggccaaggtgggcagatcaaatgaggccaggagtttgagtccagcctgggcaacatgattaaatctggtctctataaaaaatacaagaattagccaggcatggtggtgcatgcctgtaatcccagctactctgatggctgaggcacaagaatcgcttgaacctgagaagaggaggttgcagtgagcagagatcgcacaactgctctctgtcctaggtgacagagcaagtcctgtctcaaaaaaattaaaaagtgggagctaaacattgggtacacatggacataaagttgggaagaggccagtcgcggtggctcacgcctgtcatcccagcactttgggaggccaaggcgggcggatcatgaggtccggagatcaagaccatcctggctaatatggtgaaaccccgtctccactaaaaatacaaaaaattagccgggcgtggtagcaggcgcctgtaatcccagctactcaggaggctgaagcaggggaatcacttgaacctggaaggcggaggttgcagtgagccgagattgcgccactgcactccagcctgggtgacagagactctgtctaaaaaaaaaaaaaaaaaaaaaaagatgggaacagcagacactggggactgctagagccaggagagaaggaggggagcaaagattgaaaactacctattggatactgtgctcgctacctgggtgacaggttcaaccataccccagacctcagcrtcacccaatatacctttgtaacaaattcgcacatgtacccccctgattctaaaataaacgttgagaaggggaaaagaaagaatgcaaggtttttttaacatacaaaatttacttaatataatataccactttaatagaaaaaagaggacaaaaagcacatgatcatttcaatatacactgaaaaagcatttggcaatacacaacactctttcttggaaaaaacctttcaacaaactagaaataaattacttcctcaacatgataaagagcatctttggaaaaacccacagcctacatcatattaatggtgatgtgaaagctccagttgggagctttcttcccaatatcaggcacaaaacaagtatatttattcttgtcacttcaacattgtattaaatgttctagacagagcaattcgacaaaaggaaggaaagaagactgcgcattcagattggaaagggagaagtatgatgatctctctttgcagacgacaagataccatatagaaaaagtcctaagaaatccacttacgctgttagaactaataaagagtttagcaagattgccagacacaagatcaatatacaaaactcaatggtatttctacatattacaaacaatttgaagttaagaaaacaattccatttatatcaacaccaaaaagaatgaaatacttaggaataaatttaacaaaagttcatttctacaccaaatactacaaaacatctctgaaagaaattaaagaacacctaaataaatggaaagacatcccatgtttatggattgggagataattattgttaggatgaaaataggccccaaattgatctaccaattgaacacaatcctgatcaagaatctcagccttctttgcagaaattgacaagctgggccgggtgtggtggctcacacctgtaatcccagcactttgggcggccaaggcagatggattacttgaggtcaggaattcaagaccagcttggccaacatggtaaaaccctgtctctattaaaaatacaaaattagccaggcatggtggtgcatgcctgtaatctcagctatttgggaggctgaggcaggaggtagaggttgcagtgagccaagatcatgccactgcactccatcctcagcaacaagagcaaaactctgtctcaaaaaaacaaaaaacaaaaaaaaaaaaaaaagagaaagaaattgacaagctaagctgacgctaaaatccatattgaaatacaaaggatcaaataaatctggagaaagaagaacaaagttggaggatgtgcacttcctgatttcaaaatttattacaaagctgtattaatcaaatctgtgtagtttgtagacagatatacagataaatgtagatagacatacagatcaagagaatagaactgagagtcaaaaataaacccttgcatctatagtgaactgattttcgacaaggaggccaagacaatttgatgagggaaagaatagtctttttaacaaatggtgttaggacaactggatatccacatgcaaaggaataaagtgatatgcctttctcacaccatatacaaaaattagctcagaatgagtcaaagacttaaatgtaagagttgaaactacaaaactcttagtagaaaatataggtgaaaatccccatgattgaaaaatatctagtatttgatagcacaacagggtgactgcagtcagcaataatttgttgtaccttcaaaaataactgaggaagtacaattggaatgttcatgacagaaatgatgaatgcttgaggtgatggaaaccccatctaccctcctgtgatgattacatcgtatgcctatatgaaaacatctcatatacctcataaatatgctaattatgtacccataaatttttttttaaatcctcatgaccttggattacacaatgatgtcttagatatgatataaaaagacaggcaacaaaagaaaaaaactacacttcaaaattaaaacgttttgcttcaaaggacaccagcaagaaagtaaaaacccacagaatgggagaaaaatatttgcaaatcatggatctgacaaggactagtataggctatataaagaactacaactactcagttggccgggcgcgcgcggtggctcatgcctgtaatcccagcatttagggaggcaaggcgagaggatcactagaggccggaagttcaagaccagcctgtgcaacagactcccggctcgaattttttataaaaagtgatataggaatgaaaagtaccagctgaactaggaaaggggaagttgacagtaaggagggactatcaggggcaggaggatactgggtagtggtggtttaattcattgttttaattgtggtgatggctgcatggttgtatacataggtcaaaacttaacgcgtacactttaaatgtgtggtttattgtatgccagttataacgcaatatagctgttaaacacaaacacaataaagttgaaaaaccagcaggcattccctgattaatcagtattctggggaggtaaggggctcacaggaacgcaaaagaaattcaggctgtaaatccagttggacgccccgctgccccatcccctccatccgggaccgcccgactcctctcccacctccttccccaggcctcccccaggcctccagtccggaagatgcgacgaggttagcggggcccgaccactccttggcttcccaggggtgagcctcgcgagttaggagttgggtagagagtcagcccggggcccggcatccgctttttcgttgaagcaacgactttggccggatgactccccagggtcggcatcagcgtgggactgggaacaggtgaagggaaacagaagagagcctgagaagaccgctctcctccgatcctaattgactgagccaatgagagccaaagaggtcacatgctcaactgggcggggagcgggtttccacctgcggcatctttcgcgagcggggagatgagtggggcggaatatgggagaaagggagggcccgccacgctctggctggacacggccttaatcggcccgttcactcgacgtttttggttctacgttgaccccgagaaaccgaaaccgcagggcctagggcgggtggaacgagagggaactacatttcccagcaggctgcggaaacgggactgcggccactacttccggcgtgtaccgagagactggcgtccggcgtgtaccgagagactggcgtccggtgtgcaggtggccacatggatcctggcagccggtggcggaacctgcccagcgggcctagcctaaagcacttgactgacccctcttatggaatcccgcgggaacagcaaaaggcagcgttgcaggagctgacgcgggcgcacgtggagtccttcaactacgctgtgcacgagggtctcggcctcgcggtgcaggtgagcgcggcgtccgccggcgcccttgccgcggsgaggccaatcccagggaggtggctgggaggtcacagtatgaccccaratgcatgtgctccttgatcctgacaggcttggtgggtaagcgggagagcacaacatgttaaacmggacgcggtactggccttcgtgagacttggagtcgaggcgtcttaagagatgtattcgtgattctggagtgaaaagtgattgtgaaccgtagtttggacagtttcggggtgctgtgagagtgaggaagtggcttatctggggatgtgcttcacaatgcacacggctttatatcacttgaagacttacctctccaaaacgtacctcgaaagatcccgaacgtatttgtaggtacagtgtaatgttcaaggttatccttcagtttscttctcttagagctttaaagagagaaactactcgtcatttgttatgaattaagcaggtgccgaggaaggtataaatgagtcatgaaagcaagattgaatcgaaaagtgtaattgcattattagcgtagagtaatggtagcagaattcaagtgagtatggtgggggaaagcttcgtttagtaagcatccccagtgtctccaggcactaggctcagaggatgtggaggaggcagtcccgtgtacgagacagttcatgcatttaagtgctccctgtcgtgtttgggggttgaaggggtgaagatatgaaagcagtgcatgccaatgttcttgagaactgctctgccaagggattgtgtgggctactgcgggagcctatgggcggcgcaactaatccaggagtttgagaaagggcaggattagatgagttcaagaagtgagaaacgtgcatttcgtccaggggaagagtagagcagagtcacatgcttcggggaccctacctgtggttttgttgggtaagatttgtgttgtgggagatagggatacagataatgtggagagctttgattgccagtctgattsttgaactctattcggcaaataatatgggagccattaagatttattgtttagaaagactagaggggtgggggttatttgtattgtgcctggattgttacagtatcatgtctgtgagaaaaaattcctaattaaaagttaatcgggctgggtgcagtggctcacacctgtaatccaggactttgggaggccaaggcagaaggatgacttgagcccaggatttcaagaccagcttggataacatagtgaaaccccatctccacaaaaatttaaaaattagtggggcatggtggtgcgcacccaagtagctggtcccagctactcgggaggctgaggtgggaggataagttgaacccaggaatttgaggctgcaatgagctatgattgtgccgctgcactccatcctcggtaacagagtgagacctgtctttaaaaaaaaaaaatccaattgagaaattttagaaaagcactaatttaaaaataagccagtcggctgggtgtggtggctcttgactgtaatccctgcactttgggaggtcaaggcgggtggatcacttgaggtcaggagttccagaccagcctggccaacctggtgaaaccccatctctactaaaaaatacaaaaattagccgggcatggtggcacatgtctgtaatcccagctactcaggaggctgaggcacgagaatcgcttgaacctgggaggcggaggttgcagtgagccaagattgcaccactgcattccagcctgggtgacagagtgagactctcccaaaaaaataaatacataaataaataaaccaattatatgttaacatttttaagaaaaatattttccaaagcaaaaaagaagttagatgaattgcattattaaaaatctttttaatgtctggcttaatgaaaagacagctggattctcatgtctgcttgtgcattcagtcccttgtgataattgttttggttgaagtagatgaagaaaatttggccctgcatagaaaatgatgccacaacttagctaggactataataatatastatttgaaaaagttctgtaaaacacagtaacataaataactaatacttataaagccaagggaaaaaatagttatcatattttttacttacaaaacataattttgccaagtttctttggagtgaattcctcctttctgtgagtcagaatttatgtgtctgtcttttcaaaatacaattgatttttattacttggggattccatatttgcaaattcacctactcactaaaatttacttctactccaaaagcaccatgcccagaagcagcaaaaaagttgagttgctcagtgtccattttcccagctgagatctaacaaggtgatgctcggccttcttgttttaagttcttaaactataaacagaggttgtcttcactatctatttagtgccgtgttttgtgctttttgttggtgattttgctgtttaaaatgtcccccaagcaaagtattaaagtattaaagttctgtataaagttcctaagcacaagaaggctgtgctgtgcctttaggggaaaatattaatacatgcatttaacataggctttgttcaggcatgcgttagggactcaatamtatatattarataagctgtccttaaacagaaacccacataatgcaaggttgtgtattgatcagtggatgaaatcataggctttgttcaggcatgagttacggactcaataatatgtattaaataagctgtccttaaacagaaacacacataatacaagattgtgtgttgatcagttgatgaaatgtgaccagaggctcrcaggaagctaaccatgtatttaccctaggagcagtggttcagtattggctaattcagtgtttatggcaactgtatagaacataactattatgaataatgacagttcactgtatttctttctaaatagtgcagctgcgtcttgagaaagcaaattgtctaatctctctttttttaacttcattctgtttttttttttgagacaggatctcactttgtcacctaggctggaatgcagtggcatggttatagctcactgcagcctcgaccttccaggatcaagtgatcctcccacgtcaacctcttgagtagctgggaccacaggcgtgcaccactatgcccggctaatttttttatttttattttttgtagagacggggtctccctatgtggcccagcctggtctcaaactcctgagctcaagtagtcctcctctctcggtctcccaaatattgggattacaggtataagccactgcatctggcttttatttttaaataaaatatgaatttctaaaataataccagctttagataacattttaaaatttagaaaaggtaagttaacycacgtgaaggtggagaacctccttggtattctttcttggttccattttttcattttcattattctaagactaagtctaggaggttgcttgtaattaatatataggagagcttggtgatgccccttcctcagaacagcaaagcttcccctacagaatggtacaaagaagtaacttctgtggaaggggaaacccagcctggccaccatcttttcctttgcatggctctggcttcagtttgacgttgccattgtacattaagcatctagtcttaaatcctaaaggatgtttccgtatccttgctctattagcagtagtcccatttgtcttgctatgcacatagacaagttaagaatacacaaggctcttggttcagagaacaggaattttgttctgttcacagctgtatccctagagcctactacagtctctgacacatgtggtcactcaaaacaatcttgtactaataatgcattgtggttttaagtatttagtgaagttatgagtagactggaggtagctttttttttttttttttttttttttttttttgagacggagtctcgctctgtcgcccaggctggagtgcagtggcgtgatctcggctcactgcaggctctgcctcccgggttcacgccattctcctgcctcagcctcccgagtagctgggactacaggcgcccaccaccacgcctggctaattttttttgtatttttagtagagatggggtttcaccgtgttagccaggatggtctcgatctcctgaccttgtgatcctcccacctcggcctcccaaagtgctgagattacaggcgtgaaccactgcgcccggccaactggaggtagccttaactgtcctttttaggtgtgtcatggtggcatcacaggcatcaatgtttgtagaacacrtaagatttggaagagtcttagagaaaaaatgccttggaaatgcaagcaatttaatagtgtgaattgcatttcaggctatacctccctttgaatttgctttcaaagatgagcgtatctcttttactattctggatgctgttatcagtccacctacagttccaaaagggaccatctgcaaagaggccaatgtttatccagcagaatgccggggccgaaggagtacctaccgtgggaagttgacagtgagtactagtgatactgtgtgactctcaacactgcacatatttgggagtagggcgggtgcctaataaagtttatgccagaaattgctttcttggtgctattgtctaagagatcccaccttctaaatctaaggcataaaataatttaattgatcttcttcctcagtctttgaaaatactcatttgttctcgtaaatgcagatatttctgttaagtaactttttctcttgttttcatttaggctgatatcaactgggcagtgaatggaatctcaaaaggaatcattaagcagtttcttggctatgttcccatcatggtgaaatccaagctttgcaacttacgtaaccttcccccacaagccctcattgagcaccatgaggaggcagaggtaatsacgggcgtccaggcatgagacagtagagaaggcctgggttgggagtaagaagacaagaagtgtgtcagtgttttctttctgtgctccaatttctggataggtgaaagagatatcagtatcttgcctgcatacagtgtatggctctgaataactatcaaattagacagtatgaaaaagtggctgtaaaattagagaatattattgttcggggggaagaactggtaggtttttccctaattttctgaatgatagagacatacttccacaaaatttgttttttttttcaagctgtcttaatccacaaagctattgtcaaaaatgtctatttatctgggcatggtggtggcatggatctgtagtcccagctaactgggaggctgaggcgggagcatcagttgagcccaggaggcctcastacagtgagccatgattgtgccactgcactccagcccgggagacagagtgagaccccgtcactaaaaaagtgaaataaaaatgtctgctttgctaacagtaagattctgtgcgcatattaaatgacttatatgcattcccttcatcatttctttcagctatattaggtggctttgcagagttgagttgaggtaatcaagatgaacaaacagtgcctactaaataggtagatggtgttatgtggtgggaagagggttttggtgtcagatctgggtttgacacacagctcttccgcttatcagtcttgtggtttggggaagttaatctccctgagcctcagtttcctctgctgcaagtgggtataatagctaycccactcattgttatgagaattaaatgttatgataacatagagcacctactataatatgcctgtttcatagtaggcaattcgtaaatagtagctgtttattacagaaatgtgatattgagcagagctattaaaaatatttttctatttagctaatccaaatttctggtttccagagctttcatacaatcaagtttttgaacgtatttgggaaaccatactcgtatggaagcaaaatggttacagtttttatctttctttttttttttttttgagacggagtctccctctctcacccaggttggagcgcagtggcgcaatcttggctcactgcaagctccgcctcctgggttcaagccattctcctgcctcagcctcccgagtagctgggactacaggcgcccactaccacgcctggctaattttttgtatttttagtagagacggggtttcaccgtgttagccaggatggtcttgatctcctgaccttgtgatgctcctgtctcggcctcccaaagtgctgtgattacaggcgtgagccaccgcgcccggcccagtttttatctttcaacacctctttggagtaagttttttttagtgttatttgaagactgaagtcattttaggggacagaaaggcaagataggttgagcctgtctgataaagagaagtaccctgtttttcttccatacttttttcccatgtccctaggacctttgtaatatacttgagaaaactgttaattcacacaaagacagtgtctgtgtactgttttcaagggatcagtagtacatttcacctctgtgttcctattctgtgtgttgtactacctttggctaggagtgaggttcatgtttacagttagtcatgtatctttgtttaacaagttgcarttcatctttttggcaggaaatggggggctattttataatcaatggcattgaaaaagtcatccgaatgttgattatgcctcggagaaattttcccattgcaatgataagaccaaaatggaaaaccagagggcctggttatactcagtatggtaagttctggagattattagaatattttttaaggaaaatttaaaactttttttttttttgaagtagatgcatccaaatggtctttgatatttttgtttctttttttttttttttttggtagggatggggtttcaccatgttgcccaggctgatctcgaactcttgggctcaagcagtccttctgcctcagcctcccaaagtgctgagattacatgcatgagccaccgtgtctggtctttcttttgttttttgttgtttttctattgagcattcttgtgttaagttttcataattgggatggaagaagaaatggagagatgttagtcagaggatacagacttgcagttacaagatgaataagttctggggatctgatgtacagcctggtgatgatagtaatactgtactgcttaaaattgatgagtacattttaagtgtctyaaccacacacgcgtgcacacgtactacaaatgataactatggtgattgatgttttcatcagtttgattgtggaaatcattataatatatgtatatgtatattcaaggtattgtacaccttgaatatatatgatttttatcaatcataagcattttaaaattcacttttgctaactgaaagagcatgtgtatttttgttactacttatgaagatgaaagctagtctggcttggccataagtgggtgtgggtcttggctgtcttctggttcaggctgctgcacttttgcaaactgaaagagcatgtgtatttttgttactacttatgaagatggaagctagtctggcttggccataggtgaatgtgggccttggatgtcttctggttcaggccactgtggtacacccctcagggtctctgtctgacagccacctggcctctgttggaacattctctttgacaatgcctaagacagcatgttgtattcttgagcaaccctgacagttaaacaatttgtcctgatagttgagctaaaaatcagaccttaattatagccatacatactatacctagaaaaacagcatgcctgaatgtctagtgattttcttttgcatcagttgatggtagtatgtcttagcagtctttgcctgaaactgaaataaaatctaaaattctacttttctccattggaactattagatcaagcaccatgtcttgaccagactccacagtttaaggcagatataaagtgctaaaagatgtggactctgtcctggagggaaactttgaagtttgcttaaattcatagtttcggttattttacattagtgtttctcaatctgggtagattttgcrtgcaagaggacatttgctgaggtttagaaacatttttgattgccagtcttggctamacttagtgatttggctttaattgtgtctaagaggttaagattgttcagaaagaaaatggttgaagcaattaagatatcaatgagtttctgatttttttgttgtttggttcaataggagtttcaatgcactgtgtgagggaagaacattccgctgtcaatatgaacctccactacttggaaaatggcacwgttatgttgaactttatttaccgaaaagaactgttctttcttcctttgggatttgcacttaaggtatgacttaatgaatgcattcttttgttatgaagaaattcaytgggggtagtatcctgtgcacattggatggattctccttgttaaaataatactgtactagttgtctactgctccaaaacaaattacgtcaaaattcaatagcttaaaactcaataacatttctgtctcacagtttctgcgggtcgggagtttgggagtgctttggctgggcasttgtggcccagggtctcaggaggttgcatggagatgtcagacaggactgcagtcattttcaggacttccaaggtggctcactcacatggctggcaaatctgctggttggtggcaggaggtctcctcatggggttgctctctacatggccctttctgtaggctgcttgaggcaactgtcttcctccatatagttagctgagagaacagagagcagaagatgcagaaggaaaaagctgcagtgccctttgtgatctagccctgggagtctcccattatctttttcaccacattctcttggtcaagcaggccagccttgattcggcatgggaggaaactacacgtttgtgaacaccaggagatgaggaccctggaggcaattgtgctgtctggctatcatacaaagaatgctttattttagagagtttactttgattcagcaatagcagagtgctaattttccttgggtattaaaaaaatgagagaagataattattagtgaatagataaagtattttagttattagtgagcaattaaaccttttattttctattctaggcacttgtcagcttttctgattatcagatctttcaggagctcatcaaaggaaaagaggatgattctttccttaggaactctgtttctcagatgttaaggattgtaatggaagagggttgttygacacaaaaacaggtccttaactacctaggtgaatgcttcagagtaaaactcaatgttcctgactggtacccaaatgagcaagctgcggagttcctgtttaagtatgtgtgctttgtctaaactgtttttggaggggcggagggctrtcagtggttctttgtattggttgcagtttgggmgggcgagtcatttgggaatgagaatgaatcttggggtagaatcctggtccttgctagccgggggctacctttgtttttgcggccctcctcacttgtatttttttagtagtcgtgttttattttatagtactttttaacttttattttgaaataatttcagacttccagaataatgtccaaatagtacattggattctaattgtgaacatttcattcatttacatttacttttttactttctgtgtacacagatgtacatttttctttctgtacaatccctgaaagttgcagggattgtatcactttatttctccaaagcaaggactttgtcttatataaccactgtataattactaaagaagccagctccatactggtgctgtccagtgcatagccaccagtcacatgataagcacttcaaatgtggccagtgtagctcaaaaactgaatgcttaattttatttaattaaagttaagtaagcatgagttggggatcttggttaatagaatattaagtagtattaccaactgaattgttttaagcttttttttttttctgttttcacagccagtgcatctgtatccacttgaaatccaatactgaaaagttttatatgctttgtctcatgacgcgaaagctctttgctttagccaaaggagagtgcatggaggacaatcctgatagtttggtgmaccaggaagtcctcacaccgggtcagctcttccttatgttcctgaaggtaaatgcatgctatgtccacccttggccagtggtaccacttgtggaatggcgtgactttgtccagcagcactgttttctgcatgtttatagtttctagttttggcattttgtgtggtctcttttttgtttgttcatttagcagtaaggggatcagaaatcctggcttacaccaggtttggaaatttgcttaatatttttatgtaaagatcacatcaaatcttggtcacagtgttaatgataaaaagcaaatggcctgtatttatacatatggttgatcctcattatttgtagattctgtatttgtgaattcactcactggctaaaatttatttgtaaccctaatgtcagtgctcagtgctttcatgattattcacatacatgagcagagcagtgaagaatttgggtctcctgaggcaaatgttacagctgaggcggggcagggcgatgctctgctttccggtttcagctcatactataaagagggtcctttttgaggtgcatttggtgctatgtttttcacattgtcgtgcttcttattggtgacttttttgtttttttttgagacagggtctcagcctcaacctcccaggctcaagcaatcctcccacctcagcctcctgagcagctgggactatagacattcaccaccacacccggctaatttttaattttttttgtagaaacagggtcccactatgttgtacaggctggtctcaaactcctgggctcatgtgatcctcctgtttcagcctcccaaagtgataggattggagacatgagccactgagcctggccagtttttgctgtttataatggtccccaagcatagcactgaagcgctgtctagtgttcagtgttaatgaattaacaaggtatgttaaataaggtgcctttcaacaaaagctgacattaaacaagattgtatattgatccgttgaccagaatgttatgaccagagacttgcaggaacccagccctgtatttttccccaggagtagtggttttatatgtgttaattcagtgttcattagaacatagctactgtgagtagtgaaatttgactgtagatgtatatagagagaaagttggcatggcacaaaaatgatttcataagaatattgattcagtggcattttatattttgcatcttatcctcaaaaagatgtaatctaagagttaatatatttttagtagaggtggggtttcaccatttcagccaggctggtctcgaactcctgacctcaggtgatccacctgcctcagcctcccaaagtgctgggattacaggtgtgagccactgtgcctggcttctaatttattttattttattttgagacagagtcttgctctgtgtcccaggctggagtgcagtgctacgatctcagctcactgcaacctccacctcccgggttcaaacaattctcctgcctcagcctcccgggtatctaggattacaggcgcgtgccaccatgcccggcgaatttttttatttttagtagagacgggatttcaccatgttggccaggctggtctcgaactcctgacctcaagtgagccacccaccttggcctcccaaagtgctaggattacaggcgtgagctaccacacccggccttctaatttcttatctaggtagtaattcttatttacattcttcccgaaaggtaataatctttgtttctgtttgctctgtccataaaattagattgaaaaatttcagcagcctacaattttcctgacaaaaattgaaagcaggcagcgtaagttttctcttattaatttaatgttattaaattaacctttcaagtaaaggttaatttacatttcccatctacttaaagtgaagcatggtgggctcattgtattccacacttataaatgtgtctttattccacatcaattcctaattaggaaaaaaaagaaaagaaaaagaaatgagaccaggagtacagtggctcatgcctgtaatcccagcactttgggaggctgaggcagaagggtaacttgagcccaaggagtttgagaccagcctggacagcacagagagatcgctacagaaataataaaaactattagcagtggctgggygtggtggctcacgcctataatcccagcactttgagatgccaaggtgggtggatcttctgatctcaggagttcaagactagcctgggcaacattgcaaaaccctgtctctacaaaaaatataaaaattagctgggcatgctggcatgctgcagcaattccagctactcaggaggctgaggtaggagagttgcatgagcctgggagacggaggttacagtgagttgagatcacgccactgcactccagcctgggcgacagagcaagaccctgtctccaaaaaaaacctgttagctgggcatggtggtacatgactgtggtcccagccacttgggaggctgaggtgggatccctgagcccaggaggtcaaggctgcaataaggggtgattttgccactgcactctagcctgggcaaaagagcaagaccttatctcaaaaagaaaaaagaaaaaaacacctggtgcggtggctcacacctgtaatcccagcactttgggaggccggggtgggaggatcacttgagcccaggagtttgagatcaatctgggcaaacagcccagagacaaaacttcgtctctacaaataattttaaaaaaatttagccaggcctggtrggccacacctgtggtcccagctactcagcaggctgaggtaagaggattgcctgagcccaggcggcggaggatgcagtgtgctgtgatcacgccagtgcactccagcctaagtgacagagcaagaccctgtctcaacagaaaaaagaaatgagtcttctgtagcaaggcgttactaaggtgacctgtgtcagcaacaagagaaaccaagggaaaattggggctttttcagagaattcattrccgagtatctgatttccttaccagctacgttaaagcttttaaacctttgagtttggagcataaaaacaatcttcagaagatacataaccatgacataagatgaattatagactgttaaaaattcacattgtatttacattgaaataagcaatataaaattgaaaaatagcaaccatattttctgtattattgtagattaaccataaaacacttcagttagcctttctggttttgattttaaacccaaataaggaagtagacatagttatgaaaaaaaagggagaagaacacaaacaaatcagttgtcaagatccagggcttcttattccatcttgactgtgaagatgaagtgttcagtgtacacctgataaaaacatttatgacacaggaagatgtaggctcaagaaaggaatctaaacagcaaccagcagaggtggagcagtgatgccaggctcttcyactcaaacttgattctctagtttcacttgataaagtccaaacctacattaatacccttgttgggtgagctaacagcttccttcactccctggtaattcccttatctgtacattacagatttttagcagtgtacttacaaatcctactagtgtgtagtcagttgtgagattcattgtaacattttataaaatatattccttcttcccacacctctccaaaatttattccttccaagtactaaaaatttaatattactgcaccacagtgatattaaatgcagtgtcagtgccagagaatatgcagaaatgaaatgtgtcacttccagtgctgtcttctggaagaatagttaggtcttccaagtgtgagtgttcaaacactgatagtttgaagaggtggattatcaatagtcaatggctaatgtgttgactcaggggcctgctggaaaaggtatacatgagtgacctatgtacatcttccacgttttcttccaaatatcaaatataggagagaacctatctcaaacattctcttaggtattttcagtggtttctgaaccacccatagaaagcgctgatggtgtatagtctttttttcttttatttttagttgacatgtaataactgtacatatttatcgggtatacagtgatttttccatatatgtcaataatgtataatgatcaaatcagagtaattaacacattcatcacctcaaacatgtatcatttttttgtgttgtgaacattcgaaatcccctcttctagctttttgaaaatayacaataaggctgggtgtggtggctcacgcctgtaatcccagcactttggaagctgaggcaagaggattgcttgagcccaggagtttgagaccagcctaggcaacaaagtgagacccccatctctacaaaaaaaatttaaaaattagccaggcatggtggcacatacctatggtcccacctacttaggaggttaaggcaggagaatcccttgaacccaggaggttgaggctgcagtgaaaaaatatacaacaaatatagttaactgtattcarcctacattgctgcagaataccagaactcattcctccagtctagctgtaattttggaattgcaggctgctttaggcttttcacttagtgttggcagcatagattaagatggactgtgtagttcgtgtgattggttttagatgtataacaagtataatgggtgaaggagggcatcacattgaagagctatcctttctgcacctgaaaagccctctttcaggtttttggttttgatgtatgttagtagaygtttgttaaagatcgtacagattacatgggaataaatatgaagtttgtgataattgaaacacatactattttattttattgagaatagggtcttgccctgtttcccaggctggagtgcagtggcacagtcatggctcactgaagccttaggctcctggactcaagcgatccttccgcctcagcctcccaagtagctggaactacaggcacgccccaccccctcaccccaccccctctggctaatttttttgtagacagggttttgtttcaccattttgcccagtctcatgttgaactcttggtctcaagcgatccacccaatcctgggattatagatgtgagccaccacacctggctcacatactattttatattaattttttttccttatttcaggaaaaactggaaggttggttagtgtctattaaaatagcttttgataagaaggctcagaagaccagtgtttccatgaacactgacaatttgatgaggatttttacaatgggcatagaccttacaaaaccatttgaatacctttttgctactgggaatctgcgttctaaaacaggtaaaattaaatcgatcgttttagttatgtttttcaaattagttgcttagtgtagatttgcctgtccctgagagttctttttaaaagcaaaccccacgaaaaaagtaaatttctcataactatgacttcgacaactattggtctmaagggctttagacaaggtgtctgtatagctaaaatttaattcagataactgaatacattttctctgcttccttctagaaaatgaaaggccacttagacctctgaggaaggcttacctaacaggaactctagatgggttgctgtacatgcccatctctaaaccatttgccttgcctcagagtgacctgagaggccaggtgtggtggctcatgcctgtaatcccaacactttgggagaccaaggtaggagggtcacttgatcctaggaggtcaaggctgcagtgagctgtgattgcaccactgtactccagcctggtgacagagtgagaccctgtctcaacaaaaaagagaatgaccctagaaacttaaaaagtggtaattgggaattcagaattttttttttttcttttttgagtcagggtctcactctgtcacccagtctaaagtgcagtggcaggatcatggctcactgcagccttgacttcccaggctcaggtgatcctccgacgtcagccccacgagtagctgtgactacaggcataagccacaacacctggctaatttttgtattttttgtagagatggggtttcgctatgctgctgaggctggtctggaactcttgagctctggtgaaccacccaccttggcctcccaaagtgctgggattatagcatgaaccactgtgccccgccttttttttttttttttaaacccatgttactgttgccgattctttcattagcctgctttcttgcttgtctattatctgactctctcagatgaatttaactacttgctattttattaactcatttaatgttcacccacaaaggaggtcatagaggagacagggaactagttggggctaatacagtttgtgaaatctggggattattttacatatttttttgtgaactctttacactcatcagagctaggagaataaatgttgtaataattcattctatgatctgtagagtgctctgaggttttgtcgtcataaagcctcaacaatttccatttttcaaaagattggcccatttttgaatgacttttgttttattaaggtcttggcctcctacaagattctggactttgtgttgtggctgacaagctgaacttcatacgctacctctcccatttccgctgcgtgcacagaggggctgattttgccaagatgaggaccaccacagtacgcaggctgctgccagagtcctggggcttcctttgtcccgtgcataccccagacggggagccctgtggcctgatgaaccacctaactgccgtatgtgaggttgtcacacagtttgtgtatacggcatctattccagctttactgtgcaacttgggtatgtagtgtacagtgataaacatcttgtttggttatgtgggtttttttgtgttctttttgtttgtttgttttgagatggagtgttgctakgtcgcccaggctggagtgcagtggcgcgatcttggctcactgcaagctctgcctcctaggttcacgccattctcctgcctcagcctcccgagtagctggaactacaggcrcccgccaccacacccggctaattttttgtatttttagtagagacagggtttcaccgtgttagccaggatggtcycgatctcctgacctcgtgatgtgcctgcctcggcctcccaaagtgctgggattacagttgtgagccaccgcgcccggccaaggttacgtggtttttaacctgttaagttgtgctgcttttggagattcagcagagattttctgtaagaattcttttttactcttctgtgcaggagttgggctgctttcttggctcctctgtrsaaggccgaatgcattctttgaaagtgaaaacaggagaaactaagtgttataggtactttgttttctttgggaaaaaaaaaaagataatggaagtgaggatcgcttgagcccagggatttgaggctgcagtgagctgtgattgtgccgctgctgcactttagactgggtgagaaagtgagatcctatctccaaaatgaaaaataaatgaataagaatgatgccaaagcattcgaaatagactagtcattaatattggaagtatagaagctattgagtagttttttgggtcatttctttttgcatctcttggcggatctttgcatttctaaataraaaacagtgttggtttgyaggaggacagtttaaaaggaggtttcccagtctaccctgatatcatcagatatataaccttttttcctgataaccttaaagctgctgtctctgtctctgcttggcttgatacttggtttgaatttactttcatacctaaagatgtcagccttctctgcagtcttctagtcccagggttctccatttatgatttggagacagaaatgttctgtctttggtggtctgtggacagggtcctcagtgggattaatatgtgtgcagtaaaacttccagttcatggggatcagatgataagtgttctcaggcaactagaagggcattgactcaagaaagttctgcttaaaagtacttctcccaattagagtggcctggccgggcgtggtggcccatgcctgtaatcccagcactttgggaagccgaggtgtgcagatgacttgcggtcaggagtttaagaccaacctggccaacatggtgaaaccccatctctactaaatatacacacacaaaaaaattagctgggtgtggtggcatgtgcctgtggtcccagctactcaggaagctgaggcagtagaatcacttgaatccaggaggtggaggttgcagggaaccaagattgcaccactgcactccagcctgggtgacagagtgagactccatctaaaaaaaaaaaagagagagagagtggcctgtaagaagagggccctacagaaagtaatcaagaaatactcaagattcagaagatgtaatcagcgtaatttgaaggtttatcctctacgaggaaaagaattttgttactcgtgattcaaaatgtcaaagtccaggagagggtagaaaggagaaaagagaaagtggagaggtagaaagtatatccaactgcagaaaaagagatggggaagggttttttgctctagcactggagaagaagacagaatcgctacctaactttcgatagagatgttcatattgtggtgacagatgaaacacgaggcaggtaacttctgacactctaacaaacacttgatgtcttcagaatgtatttatggttcatggaagagtgttctttttttttttacttaatttcagttgattctcattatttgtagtactcatctttaaagttaccagtgaatattgaaccattgtgcctaggggaaatacagggtaaggttccttcaagcctcgggttacaacatttttgttagccgatcaatatgtagccttgttttttgtgtgtttctgttgaaagacaccctttaaaaatatatattgttcacgtggtaacattgaattctcagccaacagcagtgtaattataggcttatctaacacacatgtttttctgttaggcacatcacacctttttgcatttatgaacactaggcagcacttcagtgctgcactcggaggcaatttgttttttctgtttgtttgtttgtttgtttgttttgtagagatggggtcttgctatgttatccaggctggtctcgaactcctggcctcaagcattccttctgccttggcctcccaaagtgctgggattgcaggtgtgagccaccatgcgaagcctggaagctgttatttaaacagcttccaacaaaaaatcacaccaacaaaaagcacaaaaatgctgaaaacgtgccagtgaacagactgggcaaggggcacttgtttatagtatgagctgacaagaaggcatggcatcgtcttgtttgacttcagctgcggggagcatctgcatcgggggactcaaagttttttgctgcatgttctgaaatgactttgaaagcatccccagtattaattttgtggttacagagataatgtagcaagtaggcaaatgtgcacataatgaggattaactgtaattacattttgggggttaatgcatttaatgcatttaggtggcttagaaataaaaatattaagacatacagtgaaatgctccctcccataggcccctgtccccttgctacttctttcctgtgtgtccttgctgaagcaatttaaacttccacaagcaatacaaaagccttcaggcttaccccggagatattgcaggtttggttccagagcgctgcaataaagtgagccacatgaatttctcggtttcccacagtgcatatgaaagttatgtttacactatgctgtaaatatttcaattttaagaatactttattgctaaaaaatattaaatcatctgacccttcagtaagttgtaatctttttgctggtggaaggtcttgcctcagtgttgctggctgctgactgatctgggcggtggttgctgaaggttaggatggcttgtgacaatttcttttttttctttttttttttttttttgcgacggagtttcgctcttgcccaggctggagtgcagtggcgcgatctcggctcaccgcaacctccacctcccaggttcaagtgattctcctgcctcagccttgcgagtagccgggaccacaggcatgcaccatcatgcccggataattttttttgtatttttagtagcgacggggtttttccatgttggtcaggttggtgtcgaactctcgacctcaggtgatctgcctgcctcggcctcccaaagtgctgggattacaggtgtgagtgactgcacccggccagcttgtgacaatttctttcttttttttttttctttttttttttgaaatggagtcttgctctgtcacccaggctggagtgcagtggcgtgatctcggctcactgtaagctctgcctcccgggttcacgccattctcctgcctcagcctcccgagtagctgggactacaggcgcccgccaccacgcccggctaatttttttgtattttttatagagacggggtttcaccgtgttagccaggatggtctcgatctcctgacctcgtgatctgcccgcctctgcctcccaaagtgctgggattacaggcgtgagccaccacgcctggcctgtgacaatttcttaaaataaaacaagtttgcgacaccaattgmatcttcctttcacaaaagatttctctgtagcatgtgatgctgtttgatagcattttacccacagaggagattatttccaagttgcagtcagtcccctcaaaccctgccgctgttttatcaactaagtttatgaaataatctaaatcctttattgtcatttcaacaatgtttacagcatcttctcatttcttgagatcccatctcaagaaaccatttctgctgggcacagtggcttaggcctgtaattccagcactttgggaggccaaggcgagaggattgcttgagcccaggagttcgagaccagcctaggcaacacagggagaccctgtctctacaaaaaaaaaatttaaaaattagccaagcatgatggcacgcacctgtcagctactcgggaggctgaggtgggaggactgcttgaatctgggaggttgaggttgcagtgagccatgatcatgccactgcactgcagcctgagcgacagagcaagaccctgtctcaaaaataaaacaaacccattttttttgctcatcctctaagaagcaattcctcatccattcagtctgattatgggattgcagcaattcactcatagcttcaggctctacttctaattctagttgtcttgctatttctaccacatctacaagtccagtagtaacatcagagatcactaatcacagatcaccataacagatataataataataatatttgaaatattgcaagaattaccaaaatgccagcacagagacacaaagggaacacttgtcgttggaaaaatggcattgataagcctgcttgaaatatctgaagtgcagttaaaagaaataatgcctgtacctgttttagagacaaggataatttgatatctgaactgatacagcagctgttgaccccatctggagggaatctggaatgttggaygaagcattctratgtgattgtgctgtttgtttcctttaccaggsgtcactcccattgatggagctccccaccgatcatacagtgagtgctaycctgtcctgctggacggtgtcatggttggctgggtggataaggatcttgctccaggcatcgcagattctcttcgtcattttaaggtgggcttgaggctttgtgaattgtcctatcccttgaccttaggtttttcagttcctttctagttttggggttaacccctgggcggtctagagtgatcaagtggtcagggggtcacaatgtccagaatgcctgtgcattccctctggtgacagaggcttgccttatactggcctcattggttggggtcagtgacagatatttgacccatatacattctttggcagtttcattgaggcacctcagtctgcttatctaactaattttaactkttttcccccttcttaatactagtggcatagaagggatctcaaaatacagatatttcagtaatattcaaaatatgcaaggtagaagttataccccattgcctcctaggttttgaaaatatatttttaaaaagtagaatgacattctttgaataacttacctttgggatttcctcctagtgaagagtatttgttgctttgataatggccattgaaagaattatcctttggcaacaggctgtttgtggtttatattctgttctgtgtttttatttttaaaaaatgtttaaactaaattttagttttcgtttaagtgctgtwtcggacacttgggttgtttctaccttttggtcattgcaaataatgctgctatgaacatgagtgtacaaatatctatttaagtccttgtgcttttaattctttaattcttatattcctataagtggaattgtggctcatttgatataattttacacttagagcaaagatgtttaatcagtacatgggacccccctgtatacacattacccaaatccaccagttgctatgctttgccctacatcctttatcttctgtatactcaatttttttcttttgaaccatttgagagcagtattgagacattgtctcattttccataaagattttagtgtactttttctaagaacaaggactttctcttcaataaccacagtacatttatgaaaatcagagaaggtcatgtgggtgggatccatagttgatactcagattccaccagctgtctcagtaatgctctcttttttttcttttcttttctttttttttttagagagacgggtctcactctgttgcccaggctggggtgcagtggcacaatcacagctcactgcagccttagtgtcccaggcttaagtgatcctcccacctcagcttgccaagcagcctgaccacaggactgtaccactgtgcccggctaccctgacccagtcctttgggttgttatggaggctttattacataggatgactgatggaatcattggccactggggattagcttaacctccagcccctatccccttcctggaggttgagggtgggggtgaaagtcccaatcctctaatcctggcttggtctttctggtgaccagccccatcctgaagccacctagatgctgccarccaccagtcttttatttttatttttttgagtcagagtcttgtgcctcagcctcctgagtagctgagactacaggtgtgtaccaccacgcccggctaattttttttatttttagtagaggtggggtttcaccatttgggtcagtctggtctcctgaccttaactgatccacccgccttggcctcccgaagtgctgggaatcacagctctcctgtaatttaggtttatgttttgcttcctcatgatgagattcaagatatttcaggaagcacatgacgttggtttgtcctgttacgactcatgttaactgatcccttcaaagttgtgttctttaggttaattcactgtacagtttctgtttttctctgtaataagtaacttgtggagagatagttgaaagctatgtggagccctctttcttcatattttcacccactagttgatggattattagctgaattactattccattggtggttctttgctgagttaatattactgtgatggttaccacatggtgttttcccccaccagcattttttctatgtttattagttgctattctgtaagggagggctttcttttctattagttgttcatttatttatgttagcgtagatttatagatgcttgtttaattttgtgaatattctgttactacttattttgatgctcagaaagtgtatgagatttgatctagtgtacagttgagggttttaagtacattcatgttgtggagtcatcaccatcttcagaactttctcatcatcacaaattgaaactctgtaaccattaaacaatcattcctctttttttttttttttgaggcagagtctcgctctgtcgcccaggctgcagtgcagtggtgtgatcttggctcactgcagcctccgcctcccatgttcaagcaattctcctgcctcggtctcccaagtagctgggattacaggtgcacaccaccatgcctgggtaatttttatatttttagtagagatggggtttctccatgttgccccggctggtctcgaactcctgacctcaaatgagctacctgcctcattagtctcagattttatcttttttatagagaatttattttcattctcttttttttggttagcattgtggagcatcggaggatgaggacacttaagatctgctctcttagtaaatttcaagcatgcaatatagtattcttaactatagtcacatgctgtacatgagatctccagaaacttaattttgttgcataactgaagctttatactctttgaccaacatctccccgtgtccccctccaccaaacattctctcatttttaatgataatgcatctagctgtgaatccccatgagttctgacacatgggtttgttgttgttgttgttgttgttgttgttttcaggtttctgtaatttaggtttttatttctcctttcacccaggagtttgttggagtttttttgttttgtttttgagacagggtcactctgtcacccaggctggagtgcagtggcatgatcatggctcactgcagcctcaacctcctgggctcaagtgatcctcccacctcagcctcccgattagctgggactacaggcacgtaccaccacactcaggtaattttttaatttttgtagagacggggtttcatcatgttgcccaggctggtcttgaacctctgggctcaagtgatccacccactttggcctcctaaagtgctgggattacaggtataagccacccccggcccacccatgagtttttggtttattaaatttacaaataaaaccagtaatctactgtattttagatcacagaggacagaatttcctttagtgtatcgacacgtgcattcatggtgtgctttatccttagcctcagtagttagtgatttgcctactagctggggtgagcacccaaggaagtagggcttttaccatggctgagtgtggatgagtggtattccatggggcataagactggcagcgacagccatggccttgggacaggtttgttaaactctgtttttgttaaaaacaggtgttgagagagaaaagaattcctccctggatggaagtggtccttatacccatgacaggaaaaccaagtctgtacccaggattgttcctttttaccactccttgtagactggtacggcctgtgcagaacttagcaytgggcaaagaagagctaattggaactatggaacaggtaaatacatatgtgtgatggatgagtgtatgtgcttgtttgtatagtatacaactttcagagacttaactcttccttttttaaaagggttgttaatgttacaacaacagttggacatttgaaagaaagtcagactttccacctcctctatgatcagcacagagcaatttccatgtctgatctcactccacagaacctgagagagggctggtggtcacattacctgcctcccatcttatctagctcccagaactcctttgtacctggctctgcctcagccgtgaagtgaaaacattccattagattcacactcagtctttgcctacatatttacagttgcaaaattataggctttgtgctacttaaaaatttttcttcctattccccttcacaattggtctggggtagttttagagtgagatacgtaaagcaagtggtatttctaactggtcgcttccctgtgcttcccagttgatcccttcagcactcatgatgctgggtggggatggttttctcttgagtctttgagtactgaactctgagaaatggtaagagtaaatgtgtaascagttgcagttattttgtgccttggacatctgctcttccagatcttcatgaatgtcgctatctttgaggatgaagtttttgctggagttaccacacaccaggaactctttccacacagcctgctgagtgtgattgccaacttcatccctttctctgatcacaaccagagtccacggaacatgtaccaatgccagatgggtaaggaagagggatgatgttayagtcacaatcaggaaagtaaacttgatactagcacactcttttattgtccttatttacatatgctgaccatttgttccaaaaatacagtttatggcaagtttttcttttttctgtgccacaagcaaccagcccaggatcactcattgtatttagttggcatgtctatttagtttcctgtaatttatgacagatctttaaacattctttgtctttgacattgacatttttgaagaaaaaggtatagaatgtccatagatttgggtgtgcctgaggtcttattatttgattttttgaagaatacaagcaattatagtcacccgcatatttatcacttccagtcctcttcattcctgctgcaagattcaagttttcattgtatacaattttccttcagcctgataatcttcctttagcatttttttatagtgcaggttgctggccacaaattctctttgttttcatttatctgaaaatgtctttattttgcttcacttgaaggaatctttcactggatatacaattctgagttgacagttatttttcttccaacacttaaaagttgttgttacactgtctcttcttagtctctgtcatttctagttagaaggcagcagtcttctgaatatagtgtgtttctttttttttttttttgagacagagtctcgctctgtcgcctaggctggagtgcagtggtgtgatctcggcttactgcaacctctgtctcctgggttcaagtgattctcctgcttcagccttccaagtagctgggtctacagggactcaccaccacacccagctaatttttgtatttttagtagagacggggtttcaccatgttggcaaggctggtctcgaactcctgacctcaggtgacctgcccactttggcctcccaaagtgctgtattacaggcgtgagccactgcgcccggcctcaaattttgttttttttcagtttaattaaattgctaaactcttctgtcattatttttaaaaacattgctcctatccttttctctctttcctcctcttctatcagttattcatatatttaaaccttttgatattgttccataagacattgagtttctgttctcttttttctttattttcttcagattggatctttttttttttttcccgagatggagtctcactttgttgcccagactggagtgcagtggtacaatctcggctcactgcaacctctgcctcccatgttcaataaattctcctgcctcagcctcctgaggagctgggattacaggcacacaccaccatgcccagctaatttttgtgttttagtagagatacggtttcaccatgttggcctggctggtctcaaactcctgacctgaagtgatctgcctgcctcagcctcccaaaatgctggggttacaggtgkgagccactgcacctggcccagattggattatttttattgacctattatcacagtcactttttattctgtcttctactgaatttttgcttacagtcatgtgcccttaacgacagggataccttcgaagaagtgagtcrtatgtgattttgtcgtagtgtgaacatcatagagtgaacttacacaaacctagatggcagagactactacacacctagtatatggtatagcctgttgctcctaggctacaaacctgggtggcatgtaactgtactgtgtactgtctacagttgtaagacaatggcaaggatttgtgtagctaaacatagaaaaggtacagtaaaaatatgggatcaccatagtatatatgccatcctgcattgactaaaacattgttatgcagtgcatgcctgtatttttcaagtccagcacttctacttgtttcttttttttttctttttttttttttgagacagggtatcgctctgtcacccaggctggagtgcagtggcacgatcttggctcactgcaacctctgcctccccagttcaagcaattttcctgcctctacctcctgagtagctgagattacaggcatgtgccaccatgcccagctaattttttgtatttttagtagaggcagggttttatcatgttggccaggctggtctcaaactcctgacctcaaatgatctgcctgcctcagcctcccaaagtgctgggattacaggcatgagccattgcgcctggcctgacttgtttctttttttatagtttctttcttctctaagatttcttatcttcattcattgtgggcatgttttcctttatattttgaacatagttttatatgatgggtgttgtaaaatcattatctgcagattccaatgtctgggtcatcttagtatcagtctctttgagtataagtcaagtttcaccatttctttgtatgcccagtaatatcggattgtattatgwacattgcgaggagtatgttttaaaccctggatcctgttagggtcctctgaagaggattggttttgtttgtttttagtgtggtgtttggccttcaattacattttaatttttttcattttatgtctttccttcttaatacacagtccatcacctggttcagtgcatgtcaccaaaaattctccaggggaagaggattggtttttagttttcactggtacttaacttggtgaacgtggcagttgaagtacattcttcagccttaggtgggctgctgtgatctgtcccatgcatgyatagttcaggagtccaccaaagattcggacccaatttatatgctgaatttaagggtctccctttgtggttctctcatttctgaaatgttcccccttcccaattgttgtcatgctcagaactctatttcttggttcttcaagccagtaagattgtgggtttctatctaagttgtagctgccacactgggccataaggcaaaaataaatacataaatacttaaaaacctggaaattcacccagtgtgttccttttgtccaagtaaaaattcttctcagcttctgacagcttttggttactctccagtgctgtatgtgtagttgggggtctgcgtctcatacttatgtgttgagggtggtctagtaagagtagccctttattactggaagctctaagtctataatttttttaaaaatttcacttgtatgtatttatattttaaaatcattttgtcgtgaaatgattctctgtactgtgaggtagtacacagaggaatctcaccccatgctccactacttagaattaaatacatattccgctgtaagaaagtaatctaattacgtaataattcctatccccttttcttccccgagtagtgatagcctgtaatttgcgtacttcctttctgtccccttctaaagcttttattacatcatacatgtatccataaactaagtatagaattgtttggggtgtgttgcaaatacacataaatcgtatcatattaaatgtcagtctgcactttctcccactcagcatggttttcctggtctggtcacgttgatacatttaggtttacttcattttcacagcttatgtattagtctaaagtaagcataactaccatgactatttatttgttcattttcctctgatggatatttagttgtttccagtgttgcgtatcacacctataatcaagatgaaagcagcagaaaatgctaagatgttttttctccatgtaggtaagcaaactatgggctttccacttctcacttatcaagaccgatcggataacaaactgtatcgtcttcagactcctcagagtcccttggtgagaccctccatgtatgattattatgacatggataactatccaattgggaccaatgccatcgttgctgtgatttcttacactggctatgatatggaagatgccatggtaagttttaccaggaaatgttgttccaatctttttattttttaacttgtttgtttactgtgaaatcactgaaggaatatttttgtgtacccaagtacctagtatttggcacgtgatgttctattaaatgattagttcttagtctaagttgaaagtgggcaagccttgaggaatatccactaaatattcagatacacgtatgtcttgcatatttgagtgcatattatgagtaaattttgaagtttggttttggatctatctaccttttatatttaagtatgattagattttaagctatttctttgtgcctgggtttttgtttttcttgttttttgtttgtttgttttttgttttttatttttgagacggagtctcgctctgttgcccaggctggagtgcagtggcacgatcttggctcactgcaacytccaccttctgggttcaagcagttctcctgcctcagcctctcgaatagctgggactacaggcacccatcaccatgcctggctaattttcgtgtttttagtagagatggggtttcaccatgttggccaggctggtctcgaactcctgacctcaagtgatccacctgccttggcctcccaaagtgctggaattacaggcgtgagccaccgtgcccagccatgtctgggtttttgtagttagtatcagtgatttggaaaatgtgaggaaagttaaaatgtgatgccagttatcctaaaccaagtatgatagtcccacctagttttattttgaaaatcctcaattggcctcagtcttttaacgattcttttacttcacagattgtgaataaggcctcttgggaacgaggctttgcccatggaagtgtctacaagtctgagttcatagacctctctgaaaaaattaaacaaggagatagtagcctggtgtttggcatcaaacctggtgacccacgcgttctgcagaagttagatgacgatggattgccgtttataggagcaaaactgcagtacggagatccgtattacagctacctcaacctcaacaccggggaaagttttgtgatgtactataagtaagtttgggtatccaagctgttttgtttttgtttttgtttttgttttgagacagggtctcagtgtgtcagccgggctggagtgcagtggagtgatctcagctcactacaaccaccacctcccgggctcaagcaatcctctcgcctcagcctttgagtagctgggactccaggcatggaccaccatgcccagctaattttttgtatttttagtatagacggtttcaccatgttgcccaggtaggtctcgaactcctgggctcaagtgatccacctgcttcagcctcccaaagtgctaggattacaggcctgagccaccatccctggsctatttgtgctttttttaaaaactgtattatccaaactttgtcatctttctcacatacaatgttagcaatgtttcctagccaaaatgttgagctcatacctcttattagaaatgtcttattttagcttattttacaatataatttatttcaataggctttcataataatttttcagttgcttttgttgctagttttctttcagatgaacataattctgtagtgaatatcaccaatagctctattcataccatctctgtttgtattggagaataaaggtaagaatgagttttgcaggccaggcacagtagttcacacctgcaatcccaacactttgggagaccaaaacaggaggattccttaagcacaggagttcatgatcagtctgggcaatgtagtggggccctatctctacaaaaaaaatttaaagactagccaggcctagtggcatatacctgtagtcccagctactcaggaggctgaggtgggaggattgcttgaacccggaaagtcaaggctgcagtgagctgtaattgcaccaccgcactccagcctgggcaacagagtgagaccctgtatcataaaaaaaaaaaaaaaaaaaaaagttttacaaatatcctttatgaagcactaattatatcaatgaaacttatctccataagttaaaacaaataggttgaccttatatggtttactttttcctaggagtaaagaaaattgtgttgtggataacatcaaagtgtgcagtaatgacactgggagtggaaaattcaagtgtgtttgcatcactatgagagtgcctcggaacccaactatcggagataaatttgccagtcgccatgggcagaagggcattttaagcagattgtggccggctgaggacatgccttttactgagagtgggatggtcccagacattctgttcaatccccatggttttccatcccgcatgaccattgggatgttaattgagagtatggccgggaagtctgcagctttgcatggtctctgccatgatgctacacccttcatcttctcagaggagaactcggccttagaatactttggtgagatgttaaaggctgctggctacaatttctatggcacygagaggttatatagtggcatcagtgggctagaactggaagcagacatcttcataggagtggtttattatcarcgcttacgccatatggtctcagacaaatttcaagtaaggacaactggagcccgagacagagtcaccaaccagcctattgggggaagaaatgtccagggtggaatccgttttggggagatggaacgggatgcgcttttagctcatggtacatcttttctccttcatgaccgcctcttcaactgctcagatcggtcggtagcccatgtgtgtgtgaagtgtggcagtttactctctccactgttggagaagccacccccttcttggtctgccatgcgcaacagaaaatacaactgtactctgtgtagtcgcagtgacactatcgatactgtttctgtgccttatgtttttcggtattttgtagctgaactggcagctatgaacatcaaagtgaaactggatgttgtttaacttgatgttgaccttttggattaagaggactatcagattaaagcaaaatgtaattttaattcaatgaagatatcattaccaggttactcttgagatttttcaayggtgttagaactctcaaccaagacctgaaaaccaagtatgcaaggtttctgaatctctctggtagattaactattgacaatgattttytgttatctttgttcaaaaagttcatgtcttctcaaaatatgaaatattgataaatggaagagcatacggtgacaagtctcctttccaaccccaggttccctacaccctgctctcagcaggcagtgagtgtcacacacctgttaatccatcttgagcaggacagtactatacaaatagaatgcaagctgtaatgtaattttatattttcttatagccacgttgaagtaaaaacaaacaggtacagtgttttttaccagctttatagaagtacagttgttacatatttaatgaatacaatttgatgggtctgactatatgcacacacctttgataccatcaccacaatcagggtaataaacatacctgtcatctccacaagtttcctcctgcccctttgttttttgctttttggttgctgttgagtttttgttttgtcttctgtggtaagaacacttaactcaagacctaccctcttaacaaatctttaagtgcacgatatagtattgttaattccaggcaccatgttgtacaacagatctttagaccttacttgtcttgcataactgaagctttatacctgttgaacaactctccatttccctggcccctagcaaccacccttctaccctgtttctatgagtttgactattacagatatctcatatagtgggatcatgcaatatttgtcctgtgactggcttatttcacttagcatagtgaaataagattcatccattttggaagccaggcatggtgctgtgcatctatagtccctgctatttgagaggctgaggtgggaggatcatttgagtgcaggagttcaaggacagcctgggtaatataggaagaccctgtcttgaagaccctgacctcaagtgatccacccacctcggcctccgaaagtgctaggattacaggtgtgagccactgtgcctggcctccggtgagtattttatatttagtctacacttccatacttggcttttttctgcttttatattgatctgctttcatagcagtgtgtagagtgccacttatgttttctttcttgtgtacagtattttattgtatggatttaccatcccctgtgtatttaagttgttccattctttggccattataacttttttctgcaaatattctggtgacttatctttggccattataaactgttgataatagatcatcttgtatatacttctgcaattataagatgttttttgatgatgaaagctttcctaaggtaattctttcctgagtttggttcagatggtctgtcactaattataaggcagataggaacagacagaaaaatctatcatttcaagataggcttagcaggatgggcgcagtggctcacgccactaatcccaacattttaggaggcctaggcaggagcaatcacttgtgcctgggagttctagactagcctgggcgagacttcatctctacaaaaaaagcaacaacgacaaaaaaaattagccaagcatagtggcacacccctgtagtcccagctacttgggaggctgaggtgggaggattgcttgaacccaagaggtcgaggctgcagtgagccaagattgtgccactgcactccagcctgggtgacagagcaggaccctgtctctattttataaattaaaaaaggctgggtgtggtggctcacacccataatcccaacactttggctcagcagattgcttgaacccaggaattcaagtccaatctgggcaacatggggaaaccccagctctacaaaaaaaattagcctggtgtggtggcacatgcctgtagttccagctactcaggaggctgaggtgggagaatctcctgagcctggaaggtccaggcagtgagccaagattgtgccaccacactccagcctgggcgacagaatgagaccctgtctcaaaaaaaaaaaaaaaaaaaaagcggggaggcataagaaaaaaccaatttaatagaaaagataggctttgcttcaggaagctggttgagaagaagaaggaaaaagtcgattctactgactgacgtttccccctgctgttaagaatcccaaccacacactttcacacactattccaggttctggctactgaatgatcccacagctgaggtctattgtcatcgctccacttctatttttagcagcactaaaaacattcccaaaaaaaatgttttttagctttttaactgtagattcaccactaagaaattggcattggaacagtccacagagcttattcaaatttcacccattttacatgcactcatttgtgttgcatgtgatatatagttctatttcattttatcacctgtgtagatggatgaaaacagcaacataagcaagatacagagctgttccgtcatcacagagctctgccatactatccttttatagccatctctacctctgtcccccatttctaacccctggaaaccactaatctgttcttcataattttcttatttcaagaatcttacgtaaataggatcacgaagtataacctttgagaatggccttttcactccattcccttgagatacatccaggtagttgcatgtatcaatagttaattcctttttattgctacacagtactccatagtatgaatatactatgtacatagcatatatatttatagtttaaccattcaccttgaacattttggttgtttccagtttgggggcattaacaataaagctgatctgaacaatcaggtataatagtccccctttatctttgaagattatatcccaagactcccagtgagtgtctgaaaccatggatagtatatacactatccatatgtgctatatgtactatatgtcctctatatattttttctatacatacatacctttgatgtttaattaagcactgcaagaaactgacagcaataaatagaacaattatactgtaattaaatgaatgtggcctcaaaatgtactgttctcacatattttcagactgtgggtaactgaaactgcataaagcaaaactggctgggtgcggtggtgcacacctgtaatcccaggactttggcaggctgaggtgtgcagatcacttgaggtcaggagtttgagaccagcctggccatcatggggaaaccccrtctctattaaaaatacaaaaattagctgggtgtgatggcacacgcctgtaatcccagctactcaggaggctgagacaggagaatcacttgaacccaggaggcagaggttgcagtgagccaagatcacgccactgcacagcaacctgggcaacagagcaagactagagtctcaaaaaaaaaaaaaaaaaaaaaaaaaaaaaaaaggaaagcaaaattgtagataaggaggactactatacaggttattgtgtaaacataagtttcatttccctgggacaagtgttcaagactgggattgctgggtcatatggtagttgcatatttcatttaataaactgccaaacttttcagagtggctgtgccattttacattcctaccagcaatgtataagtgattcatttcttggcattctgaccaaccagcatttggtgatgtcactttttttttaaggctagtcaagtgaagcagtgggagtggaaaaagaacaaataaatctgtaagtggttgtgatcaatttgttgcaacaccattgcacttggaccagcccactatttcttattttagccattctgatagatgtgtagtgatatctcattgtggctttaatttgcatttctctaatggctgaaaatgttgaacatctcttcatgtgtttatttgccatctgtgtatcttcagtgaaatgtctgctgttcattttttaattggattgtttgtcttcttactgttgaatttcaagacttcattatatattccagatataaagcctttgtcatacaagtgctttgcaaatattttctcccagttcatagtttgtcttttcatcctcttcacaggtattttgcagagaaacaaatttaaattttgatgaagcccaattgacaggtttttggtgttgtgtctaagaactcttcacctagcccaaagattttctcatatgttattttctaaaggttttatagttttatgctttatatttaaatctatgatccattttccacttaagagttcatttttgtacaaagtgtaaggtttagatcaagattttttttttttttttttttttttgccaatagatatccaattgctccaggactgttacttgaaaacgatcctttctctattgaattacttctgcacttctgtcaaaaatcagatggccataggccgggtgcactggctcacgcctgtaatccctgcactttgagaagctgaagtgggatgattgcttgagcccaggagtttgagaccagcctgggcaacacagccagaccccatctctactaaaaaaattagccaggcatggtggtgtgcacctgtagtcccagctccccaggaggctgaggtgggagtatcgtctaagcctgggagtcgaggctgcagtgagccgtgatcacgccactgcactccagctggagtgacagggtttaaatcagatggccatacttgtgcggggctaatttattttgtattatttcatttttatctcctttgttggcttattaaccctacctccattttcattttttgttgtttctcttaaaatttctagtgtacatctttagacttgtcacacttttatgtaatattctaccacttcacaggtagtagaacaacttagcaacagcacacactttcctgtctcttggcctttgtgctattttgtcataagagttatatttactgtatctggagatcttgatttcatatgccagatttccattttccttcgaactgagagcttgcttcagtgtttctgagcttacttaggtgagaccagagcggccattagggctaattttgcctcactagacaggcagtatctttgagtagtttagccagtgcacagtgatggtctccactatggctccggggattgctctgcctgcaccttcctggtagttcccttggtttccaggagtgtgttcacaggcatgctgtgcgctacacgtgcaggaaaccctttgcaggtctgtgctgcgctactctctggtaccctgccttacaaactagctgccttggcctctccaaattctcaactttgtcccaactcagggacacccctgggctatgtagcctagaaactaactctccagacataagccgggccactaaggtcacttcatttgtctcctttctcttggggaccactgtgctacaatgcttgtttccaatgtctgaactctgttgtctcctattttgtccagattttttagttgttgatgtttgaaggataaatctactacctatgacatcaccacacccgggtaacttttgtactttttgtagagacagaatttcgccatgttgcccaggctgatctcaaactcctgggctcaagcagtctggccacctcagtttcccaaagtgctgagatttataggcatgagccactgtacttggcctatgtttctaacgcagaagccaccaccgtatgccacacctgtgactctttcccatatttgttgtagtaaaagggactgcaggccaggcgctgtggctcatacctgtaatctcagcactttgggaggccgacatgggcggatcacgaggtcaggactttgagaccagcctggccaatatgatggaaccccgtctctactaaaaatacaaaaattagcctggcgtggtggtgcgcacctgtagtcccagctatttgggaggctgaggcagaagaatcgcttgaacccgggaggtggaggttgcagtaagccgagattgtgccactgcattccagcctgggtgacaaagcgagatgctgtctcaaaaaataaataaaaataaataaataaataaaagaggctgcagtacatgacacactggcagcaccaactcctgcctggtggatgacatctatctttagacatccccactccagggttgctgggggtccatcaccattgttgacacttcttacaggttatgatgttatcatcagtcccagtgctatcagtcaactctacaatcctaggtagtcgttgaatctacagttgacccttaaacaatgcagtagaaaatccacatataacttttgactcccccaaaacttaactattaatagcctactgtcgatctgaagtcttactgatgacatagatgaacacatattttgtatgttatatgcattatatactgtattcttgcaatagtaaagtagagagaagaaactgttattaaggaaatcgtaaggaagataaaatatactattcattaagtggaagtggatcatcataaaggccttcatccttgtccttttcacattgagtaggctgaggagaggaaggggggttggtcttgctgtctcagagtgacagcggcagaagaaaatctgagtataagtggaccagtacagtttaaatccatgttgttcaagggtgaactgtaaactgtttgatttaatgggcaacccacgcacccaagtggttataagtggtactacaaaatgtattataaaaataccgtagaattttttttttttttttgagacagagtcatgctctgtcacccaggctggagtgcagtggtgtggtctcggctcactacaacctccgcagcaattctcgtgcctcaacctcctgagtagctccaggactacaggtgcctgccaccatccctggctaattttttgtattttttgtagagacacggtttcaccatgttagccaggctggtctcgaactcctgacctcaagcgattcgcccacctcgacctcccaaagtgctgggattacaggcgtgagccactgcacccagctgaacacaatctgtaccttccatgtactgatttatgtctttgtctgtaactcctgtccacctaaaatgtacaaaaccaaactgtaattctactgtctcaggcacactttctcaggacctcttgagcctgtgttccccaggccatggtcactcatattggctcaaaataaatctctttaaaacatttcagtttggtttttctgttaacaggtggttaatttttcctagttctttaatgagatccctagaaaccgggtttaagacaattgattttttttttttgctttctcggtcagataatttcagaaactccctccctgtgcacctgtgggcattcccacttccacacaccaacaagacaaggttagacagatcttctaaggcagcttctaaggcctttcagcatgtcaaaatgcatctttggggtatccgtttctgagtaccaacaagggaacggaatgggttaagatttcattctctcagtagaggaaaatctagggattcattctacatttgaagccaaaaacagttatctgactccttccagagcctttaaatgttgatcccttcccctcttctcccatcaaacatacacttggaagtttaagaagaatggagggatctcaaggtgtaaagttttctttctgtgcgatgaccagtgctggtcctcggatgtcaactgccaaccagggtagctcatggttacaacctcccgtacagctctcacttatccagaactactgaggctccaagctcagtatcaaactgttcacttgcactatgtcctctatgatgtcactgtcatcatcattttacagacacactgcgactccaagtggtcgttactagttcacaatcaagtagctctcgttcatcttctcgttcatcttcaactctatgattaactgcaaaatgttctgctcattttgactagagtcttgaaagatctgcaaacgaaacggcaggactgatgctcagttctctgaccaggggatatccagtctcttatgtggggaaactcacgcccaggtctaacctcac

SEQ ID NO: 93302 - DNA, 41291 bp, Homo sapiens
  misc_feature (1)...(41291): n = A,T,C or G
ttgaaggatatatcatctccatggattggaaaacaaaaatactatgaggatgccaattctctcaaattgatctgcttgttaaactcagttctaagtaaaatcccaccaggtttatttttctgaaaattagtaagctgattctaaaattttgccagaagagccgaggatattttttttgttttgtttttgagacagggtctctgtcacccatgttggagtgcagtggagtgatcatggctcactgcagcctcactctcctgggctcaaacaatccttccacctcagtctcccaagtagctgggactgtagatgtgcgccaccacactcagctaatatttttattttttttttatatttatttattttgagacggagtcttgctctgttgcccaggctggagtgcagtggcacaatctcagctcactgcaaactccacctcccgggttcaagaattctctgcctcagtctcccgagtagctgggattacaggtgtccgccaccatgcctggctaattttttttgttgtatttttagtagagacagggtttcaccatcttggccaagctggtcttgaactgctgacctcgtaatccacccacctcggcctctcaaagtgctgggattacaggcgtgagccactgcccttggccatatttttattttttgtagagacaaaatcttactatgtgcccaggctggtctcaaactcctgggcttccaaagtgctgcgattataggcatgagccaccgtgcacggccaaggcaatcttaagaagaaaattggagttcttcctttaactttctttttttttttgagagagagtcttgctctgtcacacaggctgatctgcagtggcatgatctcagctcactgcaacctctgcctcccggattcaagcaattcttttttttttttttttttttttgagacagagttttgctcttgttgcccaggctggagtgcaatggcgtgatcttggctaaccgcaacctccacctcctgggttcaagcgattctccagcctcagcctcctgagtagctgggattacaggcatgcgccaccactcccagctaattttgtatttttggtagagatggagggggaggttttccatgttggccaggctggtctcaaactcctgacctcgtgatccacttggcctcccaaagtacagggattacaggcgtgagccaccatgcccggcctcaagcaattcttgtgcctcagcctcccgagtatctgtgattacaggcatgtgccaccacgttcggctaatttttttattttttgtagagctgggggtttcaccgtgttggcctggctggtctcaaactcctggccttacatgatccgcccacctcagcctcccaaagtgctgggattacaggcgtaagtgagccatcacacacagccactttcctttgactttcaacttttattttattttttgagacagaatcctactctgtcacccaggcttgagggcagtagcatgatcgtggctcactgcagcctctaactcctgggctcaagtgatccttccatctcagtctcccaagtagctgggactaaaagagagtgtttacttttttgtagagccaaggtcttgctatgttgcccaggctggaacttttttcttttttttttctttttcctgagacagagtttcactcttgttgcctaggctggagtgcaatggcgcgatctcggctcaccgcaacctccgcctcccaagttcaaacgattcttctgcctcagcctcctgagtagctgtgattagaggcatgtgccaccacgcccggctaattttttatatttattagtagagacagggtttctccatgttggttaggctggtctcgaactcctgacctcaagtgatccacccgccttggcctcccaaagtattgggattatgggcgtgaaccaccgcgcctggccttttcttttttttttagtaacacctttttgtagatgtgacttttttttttttttaaggcgaagtcttgctctgtcacccaggctggagtgcagtggcaatggcgtgaacttggctcactgcaacctctgcctcctgtgttcaagtgattctcctgcctcagcctccagagtagctggccttacagggatgcaccacgatgcccggctgtttttttaatttttagtaggatggagtttcacaatgctggccaggctagtctcgaactcctggcctcaagtgatctgcctgccttggcctcccaaagtgttgggattacaggcatgagccagcgtgcccggcctgtagacatgactcttaccagtagcacatacttatattttgttttgtgaccttttctgaaagttttatttcttggtgtaaaatactatttgtattttttattctactttccatcatcttgttctctggggtttttaataccaccttgttgcccactccccacgcccacttaaagaattgaatagcagaactgggactctgcttttaaattttgttagaatggaggactggccatacacacacacacacacacacacacacacacacacacacacatatatatatacacacacacacatatgtatattctctggtcttttgaagttatatatcctggcttttaattctacaggtggtctcatattgatttttttttttttttttgagacacagtctcgctctgtcacccacccaggctggagtgcaatggcaccgtctcagctcactgcaacctccgcctcccaggttcaaacaatgatcctgcctcagcctcctgagtcgctgggattacaggcatgtaccaccatgcttggctaatttttgtatttttagtagagaccaggtttcaccatgttgaccaggcaccaggctggtctcgaactcctgacttcaagtgatccacctgcttcggcctcccgaagtgctgggattataggcatgagccaccgcgcccagtccttttatttttttatttttatttttatttttattttttttgagacagagtctcgctctgtcacccaggctggagtgcagtgttgcgatctcggctcactgcaacctttgcctcctgggttcaagcgattctcctgcctcagcctcctcctgagtagctgggattacaggcacgtgccaccatgcctggctaatttttatatttttagttgagatcgggtttcaccatgttggtcaggctggtctcaaactcctgacctcgtgatctgcccacctcggcctcctaaagttctgggattacaggcgtgagccaccgtgcccggccctgatttttttttttttaagagacagagtcttgctatgttgccctggctggtctgaaacttctgtactcaagcaatcctcctacctcggcctcccaaagtgctggaattacaggtgtgagccactgtgcctggccttatgttgatgatttttaaatggaatttactgttttgagttgcatttttgatcaggaaggagttgggctttatttcagaagtttgagtagtttggttcgatagtctggggaactgatctcagactttccagcctgagtgtcctgacaagcggagacatttaattgggtggcatctgctctggatgtcaggaagaaggtctaggcaggcctgggtggcagggcgagagtaccatgtttaggtcttcctctttgccagctgctgcttcatttcagtttagggcttctaggcttttcctgggcatggttcccagaaagtccctctgctgctactgccctgatcaggtttctggatctgttaataatagacaacagtgggggaaggggcagccaggatcatggtggaaataggaataaccataccagatggacatttactgtgcccagggggccctgtctgtctgctccctccctctgtttcatgagagtcctgcagtgggcatgccttggcactctggaaccatactaaccttgtgaaagtctccaagtccctgccccaaaaatcagaacatatgggctgaagaatactgttgtattcatgggaacattgaaacagaatatttgagatctagactctcccagaaaatccactatgagtgataacacccctcacagattacccaagagggaaggaggttgggcagcattaaattgatgcaaatagtgactcagaaagatggtatataatctgggggtatagaagaggagtgtggactgtgaaggtgaggcttggaaaaataagctggccatgttggggaagtagaaatgggagagcaagacaagcatgtaaaacagggcctctattaagtcaaatctgaaatcagcacagtttaaactacgatgccccccaatcttcctgttccccatgaatggcctccctcctaatgtgtccccttccttcatactactactcttctatcaaaacctgctctcagtaaagaatatagacaacccaacctaggtataaattatttaaaatctactttgaccttaggattgaatttttaaaaaattatttataatcggctgggtgcagtggcttacgcctgtaatcctagcactttgggaggccaaggcaggtggattgcctgagctcaggagctcaagaccagcctgggcaacacggtgaaaccccgtctctactaaaatacaaaaaaaagtagctgggggtggtggcatgcgcctgtaatcccagctactcaggaggctgagacaggagaattgcttgaacccgggaggtagaggttgcagtaagccaagatcacgccattgcactccagcctgggcaacagcgagactcttatctcaaaaaaaaaaaaaaaaaaaaaaaaaaatatatatatatatatatatatatatacacacacacatatacatatacatatatgtatatttaaaatcattaagccttcaaaagttaacacagatatatgatattttaaatgagacctaaaaaaataaatttaaaaacacatatagaaaatatatcaagagaatgtatagcttaataaattattaagtgaagacccttgttagcacttagaactagaaatagagtttagctagctatgccagaagccccctctgtgtcccatctcaccacaattcctccccctcccaacagtaaccactatcctgacttttatagtaatcacttaggaggattttattttaatgggactaaaaaatgtagctataatcactaatggtaaaatattaggcagttgagggatgcttgtggaaaccatgataggcagccagacgtcagcacacttaaaattacaccatttcacacagttcccctctgagcctatgcttcatctctgcacacatctttataaacatgcatgtatgtcctgaaggtgctacctccattctgagggctatgacttataacccagaggtgctgaacagatgcttgtaggaggaacgaatggatgtttaaaaaaaaatgagctgtttcacacgttcatctatgcattctttcaatatttaatgagtgcctaaaatatacatagattctaacctatctgtccctctacattctatcatcattcctgtcctccccttctcctcgtcttcctcttttcccatcttatttctttcttttcctgtgggacggagctacagtgagtgccctgcaggcaggattcagagatacaggagcaggccagtggaaacagacactatggaaaggagccagattaaataagggcaaaaacagccrtattacrtgcaggaaccagaatgaaaagcagtgattcacagagcactgcaactgaggacactcccttcactttgagagctactgcgggattggggtcaatgagggctggcatcaagatgaagggcagccaggctcctccctggagatgtgctgcccttaatccttctctccccaccccacccccactactccctcacattgaccagtgtcctgggcctttaagagttggatgggctggactggagagagctcacacctctccccttcttactgcttccctccggctataacttgccagtcacagcagccagctgctgtagaagaggggaggaaacaagccagtgcaaggggagcaaaagagaaaaggagccaggctgggcttcctgatcccacagcatcgcagagctcrggaggcacagctcacagacacaggaaacacaggactgctattctgctctcctgcccacggtaaggatctggaagctctgactaccctctgctctaagctctgtcttccctgartccctacctctgccctctagatgcttatccaccctgattaaattgtaccctagactcctttcctcatcccaacagctctacagggctcccacctcctggttctctctagcttatcctcctttatccttacagctttcctcctggctgtgtcagtcgccctttatatgaggtacctcttagcttatgcagggccagaagtgccaaccctagccactcctgaggtgaactccacccccaataagggaagaaaaaattggagtagctaagctttagcatagattcattaacagtttgttgagggttgcaaaataggggttggccaagaaccatggggaatcagagatccctggtaatagagagagttatgaaagtcccttagaaagttctctaaagaacttgttctttgcctattccatgggccagagcagtttcttagtgcaccagagtgctacgttggtaagaaaacctacttctagttctgcctgtgccattaactagctacgggacctggagccacaacttccagatctgtgatacgagagagtttagggtttcccagacttgcctgtgtaccaagtgtacttgttaaaaataaatatattattgagccccaccctgggtaactctgatctggtagatttttgggtagggctaaggatctcaatttcaagacattccagaggctattgatgtagctgggaatgtctggattagatgtgttataaaagaactggccgggcgcggtggctcacacctgtaatcccagcactttgggaggccgaggcgggtggatcacgaggtcaggagattgagaccatcctggctaacatggtgaaaccccgtctctactgaaaatacaaaaaattagccgggcgaggtgggtggcgggygcctgtagtcccagctactcgggaggctgaggcaggagaatagcgtgaaccccggggggcggagcctgcagtgagccaagatcgcaccactgcactccagcctgggcgacagcgagactctgtctcaaaaaaaaaaaaaaaaagaaccttcaagctccaacattctgtgacctgtgwccagagccaatttgtcctctatatgaaccaggttaggcataatccttctcagaagcaagggagtagacaaaatgattctcttctttcttgcccctcagagagacctgagacaccctgaatcccactgtaatctccttggtgccattggtaactctgccaaagtccatctctaggtgacatgaagtctcttagaaattgaggaccaaattgcgctctgcagctctgggctacttcccatctcattttgtgtccctattttcgtatctgtattagagaggtaattaccatatcattgaagatctccatatatgtgtctatgagttaatatttaagaccaacctttcttattatcagatgtcatcctctgtgtttttcccagtgccctcactcccaaaccctttgttccttctcttctcattgcacctgcatcagctgtgggcatccttcccattctaccattagacaccagaggaaacagcaagacctagaatacctaggttctaactcacattgtctgggcagtttgtttggtcaatctcctaggatacagagaaaagtgaggctgagcagagggacacgcatgctactgagttctgaacccaagtgtcctcccttctggaccacagtctcaaaattctcaaaggagatgagactcagagccattgcgaattagtggagtcaaaagagggaaccaactggaagaggtgatggggagaagggatgaggagaaggaagagaagaggagagactgacctaggtgagcaaacaggaagacagaggattaagagagagagagaggtggggatggggctgggcatgatggctcacgcctgtaatcccagcactttgggaagcccaggcaggaggattgcttgaggccaggagtttaaaactagggctacacagggagaccccatctccatacaaaacaaataataattwaaaaaaaawtttttttatagtgaactgggaagaaaggaaaaggaccaggtcaggcatgggatagggaaaggaaagaaaatgagatgaaagaggctgggcatggtggctcacccctgtaaccccagcacttagggaggctgaggcgggtggatcatctgaggtcaggagtttgagaccagcctggccaacatagtgaaaccccgtctctactaaaaataaaaaaaattagccaggcgtggtggcacacacctgtaatcccagctacttgggaggctgaggcaggagaatcacttgaacccaggaggcggaggttgcagtgagccaacatcatgccactgcactccagcctgggcgacagagtgacactccgtctcaaaaaaaaataaataaatagaaataaagaaaatgagaccaaagaaaagcaagactattcagagtacagagggaacagaaagtgatggagaggagagacaaaataccaatgtcccttattgattcctagccttgcttcaactgttttctagagaaggccctttccaagagcagagtcattgtgagatccttgagctggttgtatggagacctgggttcttttttttttcctcctgcccaagacagagttttgcttttgttgcccaggctgcagtgcaatggcgccatctcggctcactgcagcctccgcctcctgggttcaagcaattctcctgcctcagcctcccaagtagcggagattataggtgtgcaccactactcccagctaatttttgtatttttagtagagaaggggtttcaccatgtcggtcaggctggtctcgaactcctggccttacatgatctgcccatctcagccccccaaagtgctgggattacagatgtgagctaccgtgcccggccagagaccttggttctaattccagttctgtcactcattaaatgactctggcactaattctttttacttcacctaacctttctagtcctcgggctccttttctataaaatgaagtccagctctgaccttctatggctccctgatttgaaactggccctcttatgaccacatgtcagtcatgtgaatacagatttaaaatagtgattcatgaatgggagaaggattggaagaacaaagccaagctttggggttagaagaattggacaaaggaggaaaaaataattttctaaggcaggtttgagaggagggagtctccaaagtaagggtgttcaggcacttgggctcggttctcaggcttcccatgtttcaggacatcattgtgaggctcctggacacaggcgtaagggaaggtaatgcaatcttcttgcagtcctaaagttcaccacatcctagagtccctgtgtcccagaggtgggagctaaaattcagataggagataagccaggatgttggcagaagaggttagacttcagccccaggccaattcactctcctagagtctgaggacctaagaaatttttgttgttgtttttgagagagtctcactccgtcacccaggctggagtgtaatggtgcaatctcggctcactgcaacctctgcctcctggtttcaagtgattctcctgcctcagcctcacgagtagctgggattacaggtgtgcaccaccacagccggctacttttcgtatttttaatagagacggggtttcactatgttggcgaggcttgtctcaaactcctgacctcaagtgatccacctgcctcagcctcccaaagtgctgggattacaggcgtgagccaccacaccctgctagacctaagagaggtctgttgctttcttttcttttcttttcttttttttgagatggagtctagctctgtcgccaggttagagtgcagtggtgcgatcttggctcattgcaacctctgcctcctgggttcaagcgattctcctgcctcagcctccctagtagccaccatgcccagctaatttttgtatttttagtagagacagggtttcaccatgttgtccaggatggtctcgatctcttgactttgtgatccacccgcctcggcctcccaaagtgctgggattacaggcatgagccaccgccttcggccaggtctgttactttctacttcagtcttcacatagcttctgtaagcctcagattccaaactgcatccccactcagaaaagcagagatgattttctggctctcaggaaacactttgggtcccttcgtccaaccagaggtttcttctggtctccttcaggcacacacattcagcataagccagcaaaatcttttcttcctgaaattgtttcctgacagacttcttctcaaccttcccctctcactctggatacctatacattactacccatttagagaggcttctctaggcggggcagagtggctcacgcctgtaacagcacttggagaggccaaggtgggcggatcacctgagatcaggagttggagaccagcctggccaacacggcaaaactccgtctctactcaaaatacaaaaattagccaggcgtggtggctcacagctgtaatcccagctactcaggaggctgaggcaggagaattgcttgaaccttggaggcagaggttgcagtgagctgagatggtgccattgcactccagcctggcgacagagcaagactccatctcaaaaacaaaaaaaaagaaagtcttctcaaggtcttgtattcagggaagctgtattttcagtgacccccccacattctccctgaaggcttagtcactactaggtgactttatagggtcttcccacaaaagagacgtagggcactaataggctgtgtgacctgaggcaagtcgcatcacatttctagacttctgctttttcatctgtaaaatatagggagttgaactaactgcatgatgttttaatggaacactaactgaatgattgctctacaaatttttaaagttcttttaagatgtgcaccactgtcaaaattttaaacttttaaattaaggaacatggctgggtgaggtggctcatgcctgtaatcccggcactttgggaggtcgaggcgggtggatcacctgaggtcaggtgtttgagaccagcctggccaacatagtgaaaccctgtctctattaaaaatacaaaaattagctgggtgtggtgatgggtgcctgtaatcccagctacttaggaggctgaggcaggacagtcgcttgaacccgggaggtagaggttgtagtgagccgagattgtgccattgcactccagcctgggtaataagagcaaaagtctgtctccaaaaaaaaaaaaaaaaaaaaagcacataacatttttcaggtagagataccctttaaaaaaaagaaactcacaatatayttctattcaaatgtaggttctttgcttacacaaaagcatagagctttatgttttatgagatttgtctgtttcagcacgacctggtcaagaatgtttttttgtttttgctttttgagacagtcttgctctgtcacccaggctggagctcagtggtgtaatctcagcttactgcagcctcaacctcctgggctcaagtgagcttcccacctcagcctcccaagtagctgggaccacaagtgtacactaccacactcggctaatttaaaaaaattctttgtagagatggaggtctcaatatgttgctcacactggtctcgaactcctgggcccaagcaatcctccctcttcaacctctcaaagtgctggcattacagcatgagccactgtgcccagccaagaattgagtatttctataggggcatagctagaatcagtgtggccacatatcaaattttctagtccttttcaagggaagtttgttgtcagctactaggacaacttaaccaggtcctatatttcacagcatrtatcttttcttcttcttcttctttttttttttttgagatggagtcttgctctcgctctgttgcccaggctggagtgcaatggcgtaatctcggcccactgcaacctctgcctcccaggttcacacgactctcctgcctcagcctcctgagtagctgggattacaggtgcacacaaccacacccggctaattttttgtatttttagtagagacggggtttcactatgttggccaggctggtcttgaacttctgacttcatggtccgcccgccttggcctcccaaagtgctgggattacaggcttgagccaccgcgcccrgccttttgtatttttttagtagagacagggtttcactgtgttagccaggatggtctcaatctcctgacctcgtgatccacccacctcggcctcccaaagtgctgggattacaggtgtgagccaccgygcccagcctttttcctctttttattgagacagagtctcgctgtgtcgcccaggctggagtgcatggcacaatcttggctcactgccaacctctgccacccaggttcaagcgattctcctgcctcagcctcccaagtagctgggattacaggtgcttgccaccatgcccagctaatttttttgtattactagtgagacggggttttgccatgttggccaggcaggtctcaaactcctgacctctggtgatccgccagcctcggcctcccaaattgctgggattacaggcgtgagccaccgcacccagccaacagcctatatcttaaaagaggtacccttttttggtaggtagagaaaatttgaaaatgtagttctgagacttgtgtaacttatttggtccattaaaactgtgagaataactataaaggaaaggtataaaatatgctttaccatgtgaaggtagaagaagacaactaagtattgttaaagagaaaaaagaaagtctggccgggtgcagtggctcacgcctgtaatcccagcactttgggaggccgaggtgggcggatcacgaggtcaggagattgagaccatcctggctaacacagtgaaaacctgtctgtactaaaaatacaaaaaattagccgggtgtggtggcacatgcctgtagtcccagctactcgggaggccgaggcaggagaatcgcttgaactgggagttgcagtgagctgagattgcaccactgcactccagcctgggtgacagagcgacactccgtatcaaaaaaaagaaaaagaaaaagaaagtctgcactagcccctcaggagctggacagtctatgtgggagcatagatagagaggactcccagaatagggaagctgaaaggattccacctggaaatgagaaggctagggtgtgaagagattctagtttctgaaagggacatccagcaagatgttagttcctaataatgagagggtgggragtgagcaaaatgtggcactagtagactgtgggttattgggtaggaagggggtgctgggcggaatctttggtttacccttctctgaagatagccatgggaaatagcagaggctctgggatcagacatatcttggtttaaattctgatccttatgtgatttgaggcaggtttctaaacctatctaaagtgtcagagtcactaaactcaaaattagaagcaaaaatcagctacagactatcttcaagattcacccagagccctttgctcttccttgctcctttaggtgatctggtgccagctggtggaacagtgggtgatggcgtccctgctgcaagaccgtgagtgccggggcccctgcaggggaagaggccttagtgtacagctcagggaagggaaggaggttggacccctgttccagagctctccctgggcctgctaccctctctgctggctacctaacccctgcttttcctgacctagagctgaccactgatcaggacttgctgctgatgcaggaaggcatgccgatgcgcaaggtgaggtccaaaagctggaagaagctaagatacttcagacttcagaatgacggcatgacagtctggcatgcacggcaggccaggggcagtgccaagcccagctgtgagtgacctggatagtsgggggtggatacatgggtggatagaggcctgaggagcccggcaggggagggaccaaagtcctacgatagtgtgtgtttgtgctgtcctaattgtggctatatctgagcctgtaaaaggagatcataacagtacttgcctcataaggctgttatgaggattaaattagttattgtatataaaaggcttagaagagtcctggaacatagtaagatgtaataaatcattggttacatcttgttgttattataataagaccatgatcttgggcatcagcctgcctgaattaaagccctggctctgccactttctaactgagtagctgtggaaaatcaagtagttaagctatggctgggcatggtggctcaatgcctgtaatcccagcaatttgggaggttgaggcaggagaatttcttgagaccagaagttcaagaccagcctggacaacatagggagatcctgtctctataaaaaataaaaataaaaaattagctgggtgtggtgctgtacgcctgtggtctcagctatttgggaggctaagatgggaggatcacttgagtccaggaagttgagactgcagtgagctgtgatcacaccactgcactccgcctgggtgagtgagaccctgtctctacaaaaatacatatatacatacatacatacatacatacatacatcaagcttcagtttcctcatctgtaaaacagggattaaacagtacctgcttagtaggctacaaggactcaatgagttaacatgtaaaacacttagcatgggatgtaaaaccagaatgcatttaatgaatgttagccattattttatatatatatatatatatatatatatatatatatatatagagagagagagagagagagagagagagagagagagagagagagagagagagagagagagagagagatggagtctcgctctgttgcccaggctggagtgcagtggcgtgatctcagctcactgcaagctccgccttccgggttcacgccattctcttgcctcagccttctgagtggctgggactacaggcacccgccaccacgcccggctaatttttcgcatttttagtagaggcggggtttcactgtgttggccaggatggtctccatctcctgaccccgtgatccgcctgcctcggcctcccaaagtgctgggattacaggcgtgagccactgcacccggcctataataaatatttttaaatacaaaaaatgcggctgggtgtggtggatcatgcctgtaatcccagcactttgggaggccgaggcaggcagatcacttgagatcaggagtttgagaccagcctggccaacatggtgaaaccccatctctactagaaatacaaaaattagccgggcttggtggcgcgcacctgtagtcccagctactcggaaggctgaggcaggagaatcgcttgaacctggaaggcagaggttacagtgagctgagattgtgccattgcactccagcctgggtgacaagagcaaaacttggtctcaaaaaacaaaataaaacaaaaaaaaaatcataacagtgtgcacttattggccaaactctttatgataacaagacataatttgatcacaggacacatctaagagagtctgttttacagacaaattgctcacaatccataccgcccccagctgaggtaagagggtgaaagaatttctctggttccctcgtagacatctggaaagaggaagccctcaaacctggaatgggggccaggcgtggtggctcacgcctgtaatcccagcactttgggagkcctaggcgggtggatcacgaggtcaggagattgagaccatctggctaacacagtgaaaccccatccctactaaaaaaatacagaaaattagccgggcatggtggtgggcacctgtagtcccagctactcaggaggctgaggcaggagaatggcgtgaacctgggaggtggagcttgcagtgagccgagatcgcgccactgcmctccagcctgggcaacagagcgagactccatgtcaaaaaamaaacaaacaaacaaacaaacaaacaaacctggaatgagagaactggacttgggcatataatgctttagtataactgcttctgcctttcaaatgtatgtccatttgtcatccccatcagtcctcctgtgatcaccattggggctgcctatggaaggggactatccattgtatcagatgaggatactgaggagttaagtcattttggtttgtgtcatactgccagcttgtggctggaagccatgtcttgccacttccagtacaggccctttgccatgctgcctttgaaaacatcagtgattcatgtggactcctgaatccctggggtctgcatctctctgtactaatgctttttgggattcagcctgcagaggctggggttcttttctatggtgtcatggagaagggggtgctggtccttcactcttagcccctgctatttgttggaatcccttccttaatgcctccacctgtttcttctctggcagtctcaatctctgatgtggagacaatacgtaatggccatgattccgagttgctgcgtagcctggcagaggagctccccctggagcagggcttcaccattgtcttccatggccgccgctccaacctggacctgatggccaacagtgttgaggaggcccagatatggatgcgagggctccagctgttggtggatcttgtcaccagcatggaccatcaggagcgcctggaccagtatcggcaggatggagtcagggtgggggtgagggatcacgctatccctgaaggagccagatgcaacaggtttaggaaaggtgagaaggggtgcagggctagggaggcccaagggtccagatggtatgggcagggacagctcaggccaatgtgagactgagaatactgagggaggaatggatgccaaggatcacatagccaggcaggaatcaggacccccaggattggaggaagaggcagtgacaggcagaggagcaaacaagatgctgctcctaagagctgcacagaagatcccagtggcattaaccagcatgtaggtgggaagcaacctcttagaaggctcagtgatawaaactcactccaagtttcctggattgtttaccatttcattcatttattcattcattcatgatctattaagcagaatgtatcaggcactatgccagactataggggtacatatatatatatatatatatatgttttgttttgttttgtttttgatacggagtcttgctctgtcacccaggctggagtgcagtagcacaatctcagctcactgcaacctctgcctcccaggttccagcgattctcctgcctcagcctcctgagtagctgggactacaggtgcatgccaccacgcccagctaatttttgtatttttttgaagagacggggtttcaccatcttggccaggctggtctcgaactctggacctcgtgatccacccacctcagcctcccaaagtgctgggattacaggcatgagccaccacacccggccagtggtacaaagattaatgagactcacatattgcttcagttagtgaagaggatggaactgtgtaaataattttttgtttggcctgtaatcccagcactttgggaggccaaggcagggagatcacttgaggcaggcagatcactatgttgcctaacctaggcaacacagggaagactgcgtctctacaaaaaattaagaagttaactgaaagactacactttcagggataatttctatagttcattactagagaagtttctctgaatgtgtagagcaccataaaatacattttattttttatttgagacagggtctcactctgtcacccaagctggagtgcagtggcacgatcttggctcactgcagccgtgacagcctgggctcaagcaatcctcccacctcagcttcccgagcagctgggattacaggcatgtgccaccgcacctggctaattttttgttttgttttgtagagatgggattttgccacattgctcaggctagtctctaactcctgggctcaagtggtccatccacctcagcctccaaaagtgctgggattagaggtgtgagccactgcacctggctcataaagtaaactttaaaaaattaaattagccaggtgtggccaggtgcagtagctcacacctgtaattaatcccagcactttgagaagctgaggctggtggatcacctgaggccaggagttcgacatcagcctggccaacatggtgaaaccccacctctacaaaaaatacaaaaaaattagctgggcgtggcgacatgtatctgcaatcccagctactcaggaggctgaggcacgagaatcacttgaaccggaaaaggttgcagggagccgagatggtgccactgcactctagcctggtcgacagagttagactctgtctccaaaaaaattttttttctttaattataaaagaatttttatttatttatttataataaataaataaagtagccaggtgtggtggtgcacacctgtagtcccagctacttgagaggctgaggtgggaggatcactttggtctgggaggttgaggctgtagtgagccatgattgcaccacttcacttcagcctgggcaacagagcgagactctgtctaaaacaaacatacaaatgaacaaacaaaaaacagccaggtgtggtggtgggcgcctgtaatctcagctactcaggaggctgaggcaggagaatctcttggacccaggagatggcagttgcagtgagccaagatttccctagtgcactccagcctgggtgacggagcgagactctgtctcaaaaaaaaaaaaaaaaaaaaaaaaagctaaaggaatatggacttgttttgttttgagacagaatctcactccatcacccaggctggaatgcagtggtgccatctcggctccatgcaacctccacctccttgattcaagtgattctcatgtctcagcctccctagtagctggaacgacaggtgtgtgctaccacacccagataatttttttgtatttttagtggagatgggatttcaccatgttggccaggctggtctcgaaactcctgacctcatgtgatccacccaccttggccttccaaagtgttgggttacaggcaygagccatcgcgtctggccagaatatagatttctttctgcaggcaacagggaggtccctgcaggtgcctgggccatacagtgacaagatagattggtgctctagagagattattctagaagctgtgtggagaatggattggcaccggggagagagactggcaggaaagagaggggagagatgtcagtggacgaaggtgcacacacaactgcacacacaaacagatacattagtgcttttgccttgactcatacctggatggctgagcgattggtttcaacgtggagacaaaaatcaggatggtaagatgagtttccaagaagttcagcggttattgcacctaatgaatgtggaaatggaccaagaatatgccttcagtctttttcaggtgagtctgtggggaaggatttccagcggccaaccaggccacattttcatttggccagaagtcctctgaccccagtccacaacactcaattgttaaatctctgctatgtgccctaagtgctaggctcaatgccctaggctcaatgggaagtataggggatgattcttgcctttcagtcttgttgaaaagtcataattcggccgggcgcagtggctcatgcctgtaatcccagcactctgggaggctgaggcaggtggatcacgaagtcaggagatcgggtccatcctggttaacacagtgaaacmcccgtctctactaaaactacaaaaaattagccgggtgtggttgcgggtgcctgtagtcccagctactaggtaggctgaggcaggagaatggtgtgaacccgggaggcagtgcttgcagtgagccgagatcatgccactgcactccagcctgggtgacagagcgagactctgtctcaaaaaaaaaaaaaaaaaaagaaaaagaaaagtcatgattctatgaaaggtaaataacaatatgttattatgttggacctcaaggacctctctgtccatggccagaatttcacaggtgcctagaacaatggaaaaccccagctggaatgtgagtaaataggaggagggatcttctgacattttaggggcctttgggagatttaattctttctagttgaaaattttctctagtagcaaatggtatggctaaaattttgcttcttactgaagtgatttattctatgaacactaaatgtttaggagttccgtgggagttttatggaagcatgtttggatctatctgtctgtaaaattgcttttacagtgcaagtcaaggtcataacatttcccattctccatgatgtgcttatttcacattgcatgcctatatcaaaacatctaatttactgtataaatatatacacctactatgtacccagaaaaattwaaaaaaaawtttttttaattaaaaagataacatttcccattaaaagtttcaytcactctcccctaaacctctcttgcaggcagcagacacgtcccagtctggaaccctggaaggagaagaattcgtacagttctataaggcattgactaaacgtgctgaggtgcaggaactgtttgaaagtttttcagctgatgggcagaagctgactctgctggaatttttggatttcctccaagaggagcagaaggagagagactgcacctctgagcttgctctggaactcattgaccgctatgaaccttcagacagtggtaagagaaatcaggtggagaggcaccagacayaggggttggagagagggacatgattacaaggtccagagacaagcagccatctgcctgagagaaggttgagtctatccctatcctgacccctgcccaatcatctcatttaaccactcctcccaaaggagggcaggcatttcctgttcagacaagacaggggtttcctctgaggtgctagacctctcaggaggaagaagattccatggctcctcattcctccattatgctcatgtttcctttactttcaggaagttctttctgataccagctttgccctcgctggaaacggaaaacccttgatcctctttctttggcctcttctctagtgcaaatgattccttttcctctggttcttcttccatggttcctgtttgctattcctttaaatgctggctcgctgccctttcctgagttgtcttcaattcaagtggctctcttgagtctctaagcccctgaaccagaaagccagttagcccctggctgggggaataaggaggccagttatttagcttttaaggagtgcagctgaaatatacgctcttgttcttcaaagtttcttcctcttgcctcttcagtagactcatttcctgccctccattcccttcggagtgtgagaaatttacattaataataaatactttacaaggaactttcacgttcctcatttcatttagtcctcagtacaactttgcaaatcaacagtaatctttattggccctttactacatatcccataatgctctaatatctctatgtaccttttcctttttctatttttttgtttttttgagacagagttttgctcttattgcccagactggagtgcaatggcacgatctcggcccaccacaacctctgcctcccgggttcaagcaattctcctgccttagcctcccgagtagctgggattacaggcatgcgccaccacgcccggctaattttgtatttttagtagaggatggggtttcaccatgttggtcaggctggtctcgaactcccgacctcaggtgatccacccgcctcaacctcccaaagtgctgggattacaggcatgagccactgtrcctggcatctacgtaccttttctaatacaatgacctgttgaaatgggtcctgttattaagtcagttgtataaaagaggaaaactgaggtttagaaagattcaatgacttgctcaaagtcaacagctaatgagagaggaactgagattcaaacccaggtcatctgactcttagttggtgcctctcttgagaatgaggataagagatgggatgaatgagagctggacaagtgatcaaggtattctgggtctaaactcttactccctttcattcattcattyattcactacttcaatgaatgcttattgagttcctataatgtgtcaggacctatgctaggcaccagacatacattagtgcctagatcagacaaggacactgccctcatgaaacttagagtcaaacagaaaacattacaatctgttatttcagatttgtttgggtgttcagaatagagtagaggttgtaggctgagtgcagtggctcacgcctgtaatcccagcactttgggagaccgggcagataacctgaggccaggagttcgagaccaacctggccaacatggtaaaactctgtctctactaaaaatataaaaattagccaggcatggtggtgcacgcttgtaattccagctacttaaggaggctgaggcataagaatcgcttgaactcgggaggtggaggstgtagtaagccgagatcacaccactgcactccagcctgggtgacatggtgagactctgtctcaaaaaaaaaaaaaaagaaaagaaaagaaaaaaaagaatggaggttgtaaagcaatcatttcagaaaatgaaatcgaagagagttaaaagtttaagagatagaatctctaggccgggcgctgtggctcatgcttggaatcccagcactttgggaggccgaggcaggaggatcacctgaggtcaggagtttgagaacagcctggcctacgtggtgaaaccccatctccactaaaaacacaaaaaattagccgggtatggtggcaggagcctgtaatcccagttactcgggaggctgagacaggagaattgcttgaacctgggaggcagaggttgcagtgagctgagattgcaccactgcactccagcctgggcgacagaccaagactctgtttcaaaaaaaaaaaaaaaaaaraaagaaagaaaraaaaaagaaataggatcttttgttacctgtgcagaatccagtaaacatcagtccaagactctgtttcaaaaaaaaaaagcaagaaagaaaagagaaataggatcttttgttacctgtgcaggatccagtaaacatcagtccaagactctgtttcaaacaaaaaaaaaagaaagaaaaaagaaataggatcttttgttacctgtgcagaatccagtaaacatcagttacatttgtttcgacccmgacccctcttggtgtttccttcccttgaacttgacaatcagatactttatctggctacagagagtagtatcagtcaaaaaacctgggctcaggtctccactgtgtttcttattaactgataactgtgagcaagtcacttaacctaactaactcagtttcctcatttgtaaaataattgataaaatgaaataatgcacatgaaaagtatctggcaactgcaaatttacctgagtgatttattactgtcaagaatgaaactttctggccgggcacaatggctcatgcctgtaatcccagcactttgggaggccaaggcaggcggatcacttaagttcaggagttcgagaccagcctggccaacatggtgaaaccccttctctactaaaaatataaaaattagctgggtatggtggcgggcacctgtaatttgagctacttgggtgcctgaggcaggagaatcgattgaacccgggaggcggaggttgcagtgagtggaaatcgaaccacagcactccaatctgggtgacagagcgagactccatctcaaaaacaaaccaaccaaccaacaaacaaacaaaaagaatgaaacttccaccaggtatggtagctcatgcctataatatgggagggtgaggcaggaggactgcttgagttcaggagttcaagaccagcctgggcaacacagtgagaccccatctctaaaaataaaaaaataaaaaaaataaccaggcttggtggcacattcctgtagtcccagctacttgagaggctgaggtgagaggattgcttgagcctggagggcaaggctgcagtgagttgtgattgtgccactgtatccagcctgggtgacagagtgagactctgtctcccaaaaaaaaaaaaaaggaaacttcctgcccaacttcctgtccttcttcacaatctccaggccttgtgaaacctggagcaaggaagctggccatgagagtcatgttgttccaccttccaggcgagcctccttgtagcaacattattctcagtgagactgcacagcccagtggtgcagggcatggctctgacacctggcggcctgggttcaaatcccagcttctacagttactgattatgagacctggagcaagttacctaacctctcatggcagattatattacatctacttcatcacgttactgagaacatgagtgagatgctgcgtggaatgccctgggcatagagtgagtgcttgataactgttagtcattgttgttgttgttgtataaagcccatactgagattggagggagctatggaaggactaacagggcccttttctcaatgggagtgtagtctaaggagatgttgacaaatgatcctcaaaacatcatatgggaacatggacagtaagaagaaaccctcaggccatagttagtcacaggtacacagcccaaggaagaaaatacaggtaacttggccatgtcactaagcctttgactttgattctctctgggcctcagtttcctcatctataaaattagccctttggatgttgtccattatagtaactgtgagctccatttggctatttaaaattaaattaactaggtcgggcacggtggctcacgcctgtaatccctgcactttgggaggccaaggcaggcggatcacgaggtcaggagatggagaccatcctggctaacacggtgaaaccctgtctctactaaaaatacaaagaaaaaaaaaaagagccgggtgtagtggggggcgcctgtagtcccagctactcgggagcctgaggcaggagaatggcgtgaaaccaggaggcggagcttgcagtgagcagagatcctgccactgcactccagcctgggagacggagtgagactctgtctcaaaaataaataaataaataaattaaattaaattaactaaaatctaataaaatttaaaacttagttcttcagttacacaagccacatttcaagtgctcagtagccacatgtggctagaggctactatatatgacactgcagaataaaacgtttttctctttagtactatagcataaaaaaagaccaaaaaaaagttaaaaaaaaaaagacatttatctcatcataggaagttctattggatagcactggactcaaatgaacttttttttttgagacggagtctcactctgtcccccaggctggagtgcagtggcgcgatctgggctcactgcaagctctgcctcccgggttcacgccattctcctgcctcagcctcccgagtagctgggactacaggcgcccaccaccgtgcccggctaattttttgtatttttagtagagatggggtttcaccgtgttagacagggtggtctcgatctcctgacctcgtgatctgcccgtctcagcctcccaaagtactgggattacaggcgtgaggcaccgcgcccagccttgaatgatcttaatgattccttttaacattctttgagggtgggaatgattgaaatgatacacactaggtggggcaagtttgggatctaaaggctgggaatgggtgccatctgaaaggcagggctctggatggagtgggaggaaggatggactgtaggtgtgctgggatgctcccattcagagcttctcacctagtgttcccctgtccacactccaggcaaactgcggcatgtgctgagtatggatggcttcctcagctacctctgctctaaggatggagacatcttcaacccagcctgcctccccatctatcaggatatgactcaacccctgaaccactacttcatctgctcttctcataacacctacctagtgggggaccagctttgyggccagagcagcgtcgagggatatatayggtgcagtggtggtagagaaggggtccaactcatgagagggaccatgtagaaaagtgaggggagctgtcagtgtctaacagattgggacagtgttgtgggggtttaggggctgaggagccctggataccagagacacttggaggagatattgaagactggtgggagaatggtaatgaaaccctatgggtcaatggaacttctctttcacaagctatgaaactctcctggaactcagaggccctgacagatttatatttaacaaattaataaacagattgttaaatggaaggcaatagagaataggagttaaaaatataggttctggagtcagaccatctgaaattatatcctagctccttcacttggtactctggggctaagtatttaacttctatacctcagtctccccatctgtgaaacagggatggtaacagtgcctattctgtctgggttgttgtgaagagataattcatatgtcaatagctaataagcagttctgattttattgtgactaatcatggattagattgaatagtcaagrtatctttctattaccagcaactgaactagtagcttcaagggatacaaagatgagtggaacatatagtttccaccttaggaagtctagctgaggaattaaggtgtaaatttactgacagtttgaataaccaggatgttgtatagggatataaagccagaacaccactggacacaatggcttatgcctgtaattccagcactttgggaggccgaggcagggagatcgcttgagcccaagagttcgagaccaggctgggcaacatagtgagagcccgtctccacaaaaaatgcaaaaattagccaggcatggtgatgtgtgcttttagtaccagctactcgggaggctgaggtgggaggatcgcttaagcctgagaggtcaaggctgcagtgagccatgttcacaccactgcactctagcctgggtgacagatttagaccctgtctcaaaaaaataaaagtaaatataaataaataagtaaaaccagaacaccagatgcatcatgaggcaatgtgtgatggattgctatggaaggactgtgagtcrggtgggctgaagtatgggtagagatcagcgtgagcttgcagcagtgtccccatggatggagaaggctctatgcagatgtagcttgaaggggtctggatgggtaagtgytggtgagcactgttctctccagagtggggagagtccctaggtagaagatcagatattgacctctcctatttctcggtggggatggggttctttcagggccctgaagcgggggtgccgctgcgtggaggtggatgtatgggatggacctagcggggaacctgtcgtttaccacggacacaccctgacctcccgcatcctgttcaaagatgtcgtggccacagtagcacagtatgccttccaggtagtagccccaggatggggacactggtgaggccagaaggtctgagggaagaacgactggctctgggtctggggagggtggaggagtacaggggaagttccatcaaaagaggatttaactgtaaagcatcaggcaaatactaaaggctgattatgaataagtgttggacatgttactaataattagtagttatggaggtaattacttatggttagaaactattacttcttcaggccaggtgtggtggctcaygcctgtaatcccagcactctgggaggccgaggcgggtggatcacctgaggttgggagtttgagactaacctgaccaacatggagaaaccccgtctctattaaaaatagaaaattagctgggcgtggtagtgcatgcctgtaatcccagctacttgggtggctgaagcaggacaatcctttgaacccaggaggcagaggtttgcagtgagccgagatcgcaccagtgcactccagcctgggcagcaagagtgaaactccatctcaaaaaacaaaacaaaacaaaaaactattacttctaacaagttctatcacccttctggaagaggtggataggaaacacagagatagtggtgagtagggctgatgaacaatgggaatctggaggatgaaagcatgagagtgcaacatgaacacataaccagggaatgtggcctggccttcccactaagagcctgaaaactcaaaggtcccagaggggcctgggtcagacttggcacaggtatgagatttaggatcccaagatgtgaatatgtctttagatgtgggcagtgtcgcaggcatgggcctcagacccagcaagatctcactgaatcctataatggagttggaagagtttagtgatcagggtactcatctgagtgagtaagtagggaggcctaggaagcgggtacttgaagaagtaggttgcagtgttttagaactctgaatccattgttccctcccctcaccaccagacatcagactacccagtcatcttgtccctggagacccactgcagctgggagcagcagcagaccatggcccgtcatctgactgagatcctgggggagcagctgctgagcaccaccttggatggggtgctgcccactcagctgccctcgcctgaggtagggacactgttcctccagcccaggctctgctgtggcttctggattccgccacctgggctccttcctctatgcccctctttgttcccttctttctatcctcggatggaccatcttgctctttaatgtccttggatccttggagacaattttaacttaaacaaaatctaactgaacacagaattctatttatagctctctaagttttaaatcaacaatttacattatttcttttctcagtggaagtatcttgatttttttctggtagttcatagttgttgtggactatacaaacaatataaagggaaatctcccctcctatcataatcccaacctctcccataacaagcagctatcgatagatttttttgttttttttgagacagagtttcgctcttgtcgcccaggctggagtgcaatggtgcgatctcagctcactacaacctctgcctcccgggttcaagcgattctcctgcctcagcctcctgagtagcttggattataggtgtgcaccaccacacctggctagtttttgtattttagtagagatgagatttcactatgttagccaggctggtcttgaatccctgacctcacgtgatccaccctcctcagcctcccaaagtgctgtgattacaggcgtgagctactgcgcctggccctgagttttcaagttatgtttctaaaggctttcccacggtaagattattcaggccaggcacgttggttcatgcctctaatcccagcactttgggaggctgaggcaggtggatcatgaagtcaggtgttcaagactagcctggccaacatagtgaaaacccatctctactaaaaatacaaattagctgggcatgatggtgggcacctgtaatcccagctacttgggaagctgaggcaggagaattgcttgaacctggaaggtggtggtgcagtgagctgagattgcgccactgcactccagcccgggcgacagtgcgagactccgtctcaaaaaaaaaaaaaaaaggattattcaaaaaggttctctatttccttcttgtattcttatgttctttatattgacatgtaaatctctaatctataacgagtatttactgtgtcaaatgtgtggcaggagaccatatatattattttccatatggatagagatattaaaagtttgcttaacaatatgggaattccaattgtatgtatcaagcagctaatctcttccctcgggaacttccgaccactcactcacttcctctgcctttgagaacaatgagactggcatgattcccagaaggacccaagagcagacaggtagacaggccccttcatttttgtcccctaggagcttcggaggaagatcctggtgaaggggaagaagttaacacttgaggaagacctggaatatgaggaagaggaagcagaacctgagttggaagagtcagaattggcgctggagtcccagtttgagactgagcctgagccccaggagcagaaccttcagaataaggacaaaaagaaggtaagccaggagkggtctttctgctgtggtatttagtcaacttatgcaagctgaaggcctgttcatgaagactagagccgtgcaagatgcagggccaaggagcaatgacccttcctcccaatgaaggagatttaagaccgcatacatggcatcaatatatattatatactgccatatgtaggtatgttgcagtggctttccaacttctttgggccacatctttttttttaaaatgaaatcttasgcaaaatagataaacgcagaaccatcctagttgaagcacccatttggctctctcctgggtgccctagtgactcctgagacatttttgtacttcttggtcttcttaaaggccagcttgaaaaccagtgatgagcgggtgtgtgtttgtatgtgtaacattattatattgggtaagtaggggttactggaatgattgttgtgatctcaaccaaagtgggcatagagaaagctttttggaaaggatgagttttaggaagggccagcagtagccagaggagcaggaaggagagcattttgaggtggggaacgtgaaggctctgagaaggctgtgctagagtggtccatctccctatggggaagggaggcagagggagaagggatgccattggtggggcctccaagatcctggtttgaagtctgcctttctcttgtgtacttgcgtggctcactcagctgactgactcctagcttatcctgtgctttctggggctgtggtgtctaacctgctgccatgtccagggatggaaatgggaattcaggagacaaatccaaagatattactctgggactctcacatccttccaggtgtgacttacatgaccatttgcataccttgacatatctgtctggattcatgtacattttgaccmaaggttattgttcctttgttttaaatgagagggagggaggataatgcctctctgtttaaatataataataaatttaaaacctgtcacccaggatataacatagagcaaacacaagcccagaggttgacactgatcccagcagtacatgcakaccgcctttattcccattcccacccccaggttgtgacgtgcccgctgttttgtccgtctatctgttgtcagattgtggcccaggctcctatttccaagcctgagtcccttctcttgtcccggcaggtgaggcaggagggagaatacagtggggaggcagtgggcagaggtttaggttggatggccattatcttcttctctctcagactgctgagggttcaattccatcttcttttccaccttctccagaaatccaagcccatcttgtgtccagccctctcttccctggttatctacttgaagtctgtctcattccgcagcttcacacattcaaaggagcactaccacttctacgagatatcatctttctctgaaaccaaggccaagcgcctcatcaaggaggctggtcaggaccaaaatggagggatggggagggaagtgggatggataggttcaggcctgatggactggcaggtaagtcccaagaaaaaagacaaggtagctaaggagagatgaaggagttcagaaactccttagagcagacaagggcagaggagttatgaatagtggctcaagggtctaggggcaggaaagctggtctggatggacagagtagagaggcacagtgaaactttctggagccagcttcagatgctggagagaagggtgaagagtaggcakggtccttgggactagggaagtgggagattccaccccacttccatctccctctctatacccttttacaggcaatgagtttgtgcagcacaatacttggcagttaagccgtgtgtatcccagcggcctgaggacagactcttccaactacaacccccaggaactctggaatgcaggctgccagatgggtgaggaggcagcagggactgggaagmgggagtggaggagcagcaggtgggaaataagttctctagtgatggtagggttggggaatgctcaagaaaattgctaggctgagaaatgctatcagtggatattaccagcaggtaccgtgcacccagtacctatcttcttaactccctgaaagaggggctggaaggcctccatggtgaatcttgctcttcttttctcctggggccctcagtggccatgaatatgcagactgcagggcttgaaatggacatctgtgatgggcatttccgccagaatggcggctgtggctatgtgctgaagccagacttcctgcgtgatatccagagttctttccaccctgagaagcccatcagccctttcaaagcccagactctcttaatccaggtacagtggaaataaactgttgggaagaaactgagataactgggatagaagtgagggaagaggtggctaggcctgaccggaatgtagaggccggatagcctattaacagtgtctagttttagcttttggagccagctgcctagcttcaaaccacaacttcctaattgggtaatgttgggcaagttccttaacctctccatacctcagtctgctcacctgcaaaataggggtaacactaccacctgcctcacagggttataaggagtataacagttaatataaagttcttacaattcctggcacacaggaagtgctataaaagaggctggctgggagcgatagcttacacctgtaatcccagcgctytggaggccaaggcaggaggactgcttgagcccaggagtttgagaccagtctgaaactggtctcaacaaaaaatttaaaaattttgtagagactcccgtctctacaaaaaatttaaaaattagcctggcatggtggcacatgactatagatagtcctggctactcaggaggctaaggctggagggtcactttagcccaggagatggaggttgcagtgagctatgactgccccactgcattccagcttggtcaagagtatgatcgtgtctctttgaaaaaaaaaaagtggctgctgtcattagcatgcctactttcaaactgttgaatttctacctggatccatttaatttatttgtttattctgagacagagtcttgctctgctgcaggctggagtgcagtggcatgatcttggctcactgcaacctccgcctcctgggttcaagtgattctcccatctgagccttccgagtagctgggactacaggcgcccgccaccatgcctggctaatttttgtatttttagtagagatagggtttcaccatgttggccaggctggtctcctggtttcaagtgatctgcccacctcggcctcctgaagtgttgggattacaggtgtgagccaccgtgcccggcctttgggtgcattttaaattgcagatagaatactagaagaaaatatattacccatggaggatgttttacaaaccaaaaagcttcttctcccctggggttgggagtagggtcgggtggggctgggctgagcaggaacttgtgagattccagagccctgactacaggtgatcagcggtcagcaactccccaaagtggacaagaccaaagaggggtccattgtggatccactggtgaaagtgcagatctttggcgttcgtctagacacagcacggcaggagaccaactatgtggagaacaatggtgagaaactggcagtgctggggaggtgggggtaggagcatgattagttttccttctagtctgtcttccattaagtatagcatctgttattgcatgtccccacatgggaggcagtgtggaacagtacaaagaatcctggctcttcacttaaaagctccagtgacctgggcaaattacttgcttactctgagcctttttccttacctgtaaaatgctgattgccayctagattaaatgagaacacaagaaaagcaacccagtcaagaaaactgtcataatgtcttcttatttctttctgtccaccaactcaggttttaatccatactgggggcagacactatgtttccgggtgctggtgcctgaacttgccatgctgcgttttgtggtaatggattatgactggaaatcccgaaatgactttattggtcagtacaccctgccttggacctgcatgcaacaaggtgagccagcccctttgrcccctggccaataccccagctctggctgccttcctaatgctgtcctcctgccccttccaggttaccgccacattcacctgctgtccaaagatggcatcagcctccgcccagcttccatctttgtgtatatctgcatccaggaaggcctggagggggatgagtcctgaggtgggcatttcaygggaagggttggtrtgctggctttagacggggagaaacatctggaaggatgctcgagagaacaaatggaggtggtgaaaatcaagctttggattgtgcattcctaggcacaaaattacctcattcttcctaacaagcaatctgggacctgattttccaccttttttctcttttcttcccttcctttgttttcataagcctttggtatctttcctgcccttttcctttgtgtactctatactggagttcccttcttcctcttgctgtaggctcaatcccataccgacatctacaactaatctttcccatcaactctgtgtgaaggcaggttgcaactagaaattcagaggggcttggaatagagaaacctaaagaagcatcatcccctccatccccaacttcctcaaagcccaaagccaagggaaggataaatcaaggctcaaggcttccccagcaaagattagggaaagagacttgaccccaggactgtactacgactcttaagagaacactgcacagcactcaaagtcccccactggactgcttcctccttagccccactggtataaatacatctctctccaatttggcttcaatatggtctgtcattgttgggcaagaaggggaggtacaagggttgtggggacatctgggtagtcaggtgagacaaggaaaaggtagagaaagaggttcccaggagacctcttgcatgtgctacataggaaggacacagagtatggcttttaagaatcagggcaaaagcagacaaaaggttatgtggtcccagccttcctgaagagtctggctggaaccatcctggtttatgtctgttgtcccagcataattattaatagtaccctctttaagttttcccagtgtgtctcagtttagatgatcaattatatagtaaggcactacagaattatactgtgaagcagttatagaattctgaattggagattttcctctctagtcatctgcctttccatagtatccttgtgctttaacaccttagtgtagctgctgagccagtctgaggattgatgatgagctaaagttgcttctaggaggaggcttagtgggtagcaatcctccctctatagatacaggtagacaaaggagcttggaagtagggagcaggtcaagggtcaagatggctcaaggacagggagaaggcagacctaggcctgtttcagtatcaatactgagtgaagatggaagggacaaaagggaggcagaggtctgagaggggacagagttgatcaagatgacagcctggaaatgttaagacagggatttggatgaatctataatgtagtaaccactttctgtttaacatgctttatagagcattaggcacaacagcacatgcggttagatacaactgtttttagaagattctgaaagaaaataggaattgacacagtaagaaggaaagagaagatggagtgggtaaaatccagatcttatagccagggactttgatggagtgatggtgaagaaactgagaacttgcaggttaaaaacgcaatgtacagcaataagaaatcaacgttatagtccatgtccctcttttatatgggtgataatttcaaagtactatagccagagtcccaggaaggttctagtcacccttgtaccccaaaagccagtctttccttaggctctgagctcctcaggctagcgctggtcccagtctgcacatctcagaccataccctcttcctatacaggaggtggggcaggctttcagccctcaggtccagtgtggggagcggcaggagcaggagggctgggatcytccagctgcacatcatgcaggtgcactgkgggggtggtggggtctttgcccacaccctggtttgggtcggcttggtcagggtggtgcctgcgtacgtgcttgaccacctggaacttttgcttggccttgtagttgcagaggcggcaaaagaaggggtggcggtcggtgtgggtgagggcatgatggcgcaggccagcagcccagcggaaagcacggtggcacacattgcacacatagggtttggcctcactgtgcttgcgaaggtgggtgcgcagcaggaagcgcgtcttgaaggccttgccacactgctcacacatgaaagcccgtgcttctcgatgccgggtctcctggtgcacacgcagtgcatcagcccggttggtgcagtactcacactcgggacactggtatggcttcagtcctacaggacagggaacaaatcaccattgaaaggcggtggagcaaggtttactgggccatggagttactgcaatcagtggatataaagaatgcaagcagcaagttgactaatgaccatctctttggaatgctccagtcctccagtcctgtctgacatttcttttttcttttatttttctttgagacggagtttcgctcttgttgcccaggctggagtgcaatggtgcaatctcggctcactacaacctccgcctcccaggttcaagtgatcctcctgcctcagtttcccaagtagctggaataacaggcatgggccaccacacctggctaattttgtatttttagtgaagacagggtttcaccatgttggccaggctggtcttgaactctggacctccagtgatgtgccctccttggcctcccaaagtgctgggattacaggcatgagccaccgcgcctggccctgtctgacatttctgtgcctttccaacacagcgtccttgtacatcaacaagaactcaatgttgtagtcccagcaatcaatgttgtgggtgcccaatggatgctgatgattaacgggacctctaaccaactagctacctgacagtaatgratactcaaatatggaagggtttccccatgggaaattataaccctcttttggtcacagagtactcatggaattcgacaattcatttaaacacaacggcttgttcaactcaaaaagtcaaagacccagcctgggcaacaaagtgagaccctgtctacaaaaaaattaggtgggcgtggtggcgtgcacttgtagacccagctaattgggaggctaaggcaagaagatgatgtgcacccaggagtttgagattgtagtgagctatgactgcaccactgcactccagcatgggcagcagagcaagaccctgtcactgaaaaaaaaaaaaaaaaaaagtaaaagaaatacttaggaggggccgagcatggtggctcatgcctgtaatcccagcactttgggaggccgaggcgggcggatcatgaggtcaggagattgagaccattctggctaacacggtgaaacccccatctctactaaaaatacaaaaacttagccgggcgtggtggcgggtgcctgtagtcccagctactcgggaggctaaggcaggagaatggtgtgaacccggaaggcagaggcagaacttgcagtgagcttagattgcgccactgcactccaggctgggcaacagagcgagactctgtctcaaaaaaaaaaaaaaaaaaaaaaaaaaaagaaatacttaggagggaagaggtagaggtgaaataagtggcattcataaaagcagagggccttgaaatgctcctaatcaattcctccacatagggggatcagatgcaataagcacaggcacacgattgtgtgctttcaagaatcgggtttgtggattccatccacacccaggagaagaaaaggacagactagaacaggagaatccttcactttctcctttttaactcatgatagttccatcatgtctgtgtaagagccaagcaaatctgcccttagtcatacaagtttgagttgggggttctcaagaggggaaaaatgactgacttcgtaacacagtcacctgggaagcttttggaaagtacatatgcccaggctctcaggtttacccttctgattctgacaggtcttcagtgggttggggagccattctggcacatacaaccccaccctgctgtctactcccaatgtgaaattgatgttggccctgaattggaacaaggaccaaccttggtaaggttaggtttgccagggaacaaaggaacccttcaggcctgtcgaaaccacacagactcacctgtatgcttggtcatgtggtatttcagctggttgacccacttgcacttgtagccacactcagggcacaggtacttccgttcctccttgtggatccgcatgtggtactggaagaggcaagagcaaaaagcagaaaatatagtaagtgctcaataaatgttagctgttattatccaggttattcttgccctgttctatgcctttatcatatggcaagcagacattatggaactttgtttttcttaatcttcagtttacttgctagggatttttttttttttttttttaaagagacagggtctcactctgttgcccaggctggagtgaactggtgtgatcacagctctctgcagccttaacctcctgggctaaagcgatcctcccacctcagcctcccaagtagctgggaatacaggcatgcgccacaatgtccagctaattaaaaaaatttatttttgtaaagacagagtctccatatgttgccctggctggtctcaaactcctgggatcaagcaatcctctggccttggcctcccaaagtgctaggattacaggcgtgagccacctcacctggccgataatttttttttttttttttttttgagatggagtctcgctgtgtcgcccaggctggagtgcagtggcgcgatctcggctcactgcaagttctgcctcccaggttcacgccattcacctgcctcagcctcgagtagctgggactacaggtgcccgccaccacacccggctaattttttgtatttttagtagagacggggtttcacagtgttagccaggatggtctcgatctcctgacctcatgatccgcccaccttggcctcccaaagtgctgggattacaggcgtgagccaccgcacccagcctcaatttttttttttaaatggagtcttgctctgtcactcaggctggggtgcagtggcatgatcatagctcactgcagcctcaaattcctaggctcaagcaatcctcccacctcagcctcctgagtagctgggactacaggtacttgccaccatgcccagctgattaagaaaaagtttttgtaatgggatctcgctctgctgccgagtggtcttcaactcttggcttcaagcaatcctcctaacttggtatctcaaagtgttaagattacaggcgtgagccacattatggaactttatctttacaacaaccctatgaagttggtattatctcatttttaacagatgaagaatctgaggcttggtaaaggaactttcccaaagtcacagagctaatatctggaggagtcagctatagagaaccaaggcagtttaactccagagcctgtgctccttccacttcctgccccatatcctctgacattaccttgagacgagagggatcagcacaggcataggggcagaggtgacagtggtaaggcttttccccagtgtggatgcggctgtgccaggtgatcttctgtcggttcttggtgctgtaagcacaatcggtgcacttgtagagacgagtgcccccatgccctttcacatggtgatctagtaccagctgatggcggcatgtgaagtcacaaaagggscagtgtagcgggggctggccagcatccccatccccatctgaggctgccacggctgctgaagtctcctcatgctgttccaggtagtgctttaccaggcccacccgctcccgggcagcaaagtcacagagctgacagcggtggctgaaatgctgctgcctccggtgctcatccagagccagtcggctagggaaggcctcctggcaggccccacactcaagccgtgggtgctgtttacgggtgtgtcctcgtaagctggcagggctggggcacagcaacccacagcgggaacagtgcagggggccctcagtggtctctgcaggagagccaggggcaggctgtgyaggctcggggtgtcggcgcagagcatgctgcttaagtgctgtctctgagctgaactgggcttcacactgggagcaggcaaaggctggggtgccttggtggcagctgttgacatgacgagtgatgtcatggcgaaggtagccactatagtcacaaagtggacagaagtgggtaggtgttttgtcatgtacccttaaccggtgcaagcgcagtttcgagttggtaccaaacgtctgggggcaagagctgcaggggatgcggccaatgcctgtgtgtcgggactggtgagcctctaaccggtaccgtctggtggtcgaaaagtcacagaaggggcactgatggggcttcaccccctcgtgcttgagycgccggtgctgctgcatgcaacggctctgtttacaggtgaagccacagtccccacactgtagatggggccggggcccacgggctggggctgcagtggggtgcctccgcttctggtggagccttaaggcagtggcagcaggagcagtgaatgggcagaggctgcagtgcagctctccagactcctcgagggggcagccccggatctggtgagtcctcagagcccgttcctgctggcagcn

SEQ ID NO: 93303 - DNA, 29816 bp, Homo sapiens
  misc_feature (1)...(29816): n = A,T,C or G
cagcctcccaagtagctgcgactacaggcgcccgccactacgcccggctaattttttgtatttttagtagagacggggtttcaccgttttagccgggatggtctcgatcacctgacctcgtgatccgcccgcctcggcctcccaaagtgcccttctttcttttaagtctgtttgcttaggtctttcttttgaggtcttcttactctatacgtaaaactgcaaccctaccccacacagccataccctacaagattccatttctccctctattctctatttttttccttggcatttatcactgtagagcattctatacattttgtttatttatcttctttattgtctacattgcccctagagtgttagtttcccaagggaacagatttgctttcatctattttgttcactggtattaccccaatacctggaatagtctctgaaacaaaccaagtgttttctatatatttaataaataaaggcctatatatcgtattattctgtttccttaatgtctcatttgccaccaccctcattcagggcactgtgacttctgggctacaggatgatgatgatgatgatgatgattttgagacagggtctcactcctgggcccaggcctagagtgcagtggcgcaatctcagctgactgccacctccactttctaggctcaagctatcctcccacctcagcctcctaagtagctgggactataggcacatgccaccatgcccaaccactttttgtattttttgtaaagatgggggtctccctgtgtttcccaggctggtctcgagctcctgagctcaagagatccacccaccttggcctttcaaattgctgagattacaggcgtgagccactgtgcccagcctggtctagattaatgaaaagcttcctaactggtctccctccatctattcttgtcctcccttcaatgcattctccaaactgcagcatttctggggtgtgcatctgatggtatgggttccctgttcaacacctttcactagcccttactgatcctatgctctgagtgattgagcctctgctaagttatctaacttctctctaccccacaccctgcttccaagacagaacttcttttttatttttgttgttttttgtttttgtttttttgagacagggtctcactctgtcaggctggagtgcagtgacacagtctcagctcactgcaacctccgactcccagattcaagtgattcttgtgcttcggcctcctgagtagctgggactacaggcacataccaccaggcctggctaatttttgtattttagtagagacgggggttccaccgcgttgcccaggctggtctcgaactcctggcctcaagtgatccacctgcctcaggctcccaaagtgctaggattacaggcctgagccaccgtgcccagccagaacttcttattccttgacctcaccatgattcctcacctcctagtgttggcatacctggttttctgtatatggaacactcttatctccttcatcactggcttactcctgtcatcctcagggccccatttatagctcaactcccacttccattctcagggctgggtaatttgcccttcctgtgaactcctgttgctccttatatgcagctgtcatagcactttgcaccaggtagagagtaaaagaggtaaaaggacaagagatttctgttttcttaaggaaaggggaagccagaaaacagaggtaatcactgtagactaatttgacagtaaaatatggaagacaggatgattttgttgaatatttttataatgggagagatctgaaaatatttgaaagcaaaagagacaacttttaggcaggaagagtttggaataaacagaggaagaagaattaggagaaaataaaagaaagattgagaaccagactatagagatcgggatgctctctttggtactacaaggaggattggtatggagtgatgaagcaaaaggttttgtaatccaaaacatgccaaggctctgcatgaaatatgagtttggggtttgtgtatttggataggggttttggaacctcaaggagaggtttatatgtcttttaagaatacctaatactgtgttatcagtttgccagtatacatgaatagaacccttggcaatgaactaatgaaccccaccaggaaggaaaagaaaagagtatgtatttgaagagattatattcccaaacctctacgtgtcagattactacagttagcctaaacaaacagtagattaatgggcataatttccataacgtcctcattttatgatcttcagagaaatgatggcttagtgttgaccctttgtacaaagataattattcttactgaataaagataattacatttctaaaaccggtaggcagatggctctcaaaagggacattaatgaaaggaaaaaaaaagcagaccaaaatttagaaaatgtcttattttaataagattctaaatgctatggatgattttagctaagttgagaaaattttactgaaagcatctcatcctaaaatgtgagtgaaagacaaattaatgataaatttaaggtaccttcattcatatcagtaggaaactgacctaaaatgtgatcaaagcaaattaaacatttttacttgttatgaaaatttgttgaaatgaagccagtgatgtcataaagacatacaaacaaaaagtctctaaaacttaaggaaaaaaatcaaggggggccaggtgcagtggctcacgcctgtaatcccaccattttgggaggccgagatgggtgaatcacttgaggtcaggagttcgagaccagcctggccaacatggtgaaaccccatctctattaaaaatacaaaaattagccaggcgtggcggcgggtgcctgtaatcccagctactcaggaggctgaggcacaagaatcacttgaacctgggaggcggaggttgcagcgagctgagattgtaccactgcactccagcctgggcgatagagcgagactccgtctcaaaaacaaacaaaacaaaacaacaacaacaacaacaacaaaatcaagggacaaagtgtatgtttctagcattgttggggcaaatatgaaccctgtaattgaggaacatgaacattccgtcccatagaaaacaagcaaaaagaaaaaaaaagagagagagctcactaggttgtctcatatgaaataaaatttctcagcaaccaaactatttgagaacaatgttaagaagtgttgttcactgtctcaaagattcttaattcttgcataatacaaatatccagtgggtaaaataatctagattccactgtaaattttaaaactgcctttcaaaactgcatcagtactgtattgatttagatagcattggtctggccccctctgagcaagctggatattcaaatatagacattcaatctgaaaacagattcctgcactgcagcccagcatgaggtctgatctaaagcacctatgtcaatatttaacagctccatatacatgtcacagcaaacctgcatgcagaaagatataaccaagtactatttttttgccataaatttatccaaggttcaaactgaaagaaccaattacactgtctccaatataatataagtataggccaggtctcaaccttagttgagggtactcacgtttgggctaaataattcttggtttcaatgcacaaggctttcctatgaattgtaaagtgttcagcagcttccctggcctctacctattagatagatgacagtggcatgcctaaattgtggcaacaaagaatgtctccagacatgccaaaatgtaccctgtggaacaaaagtaatcctagttgagaaccactgatctaagttaaaagttgaggctacagcatcaggcttcctgggtttaaatcctcactccacctcttgccagctgttactttatgcttacaaataagttacctaacttgcctatacatcagtttccacatctgtacaatgcagattttaatagcacctacttcaaatgtatgttgtgaagattaaacaagttgatatgtaaagcccttaaatcagtccatgatatatagtgattaacacattcgcattcttactataattagtatttgatttatataaccattcactacttgcaaaactatttcataaacatattctcttatttgatccttatagccactttgtgtgttggcatatgagggaaggttgaggttgttatgtgctctgaaggtctatgttgggtaatgtgtgcttttttaaaaaatatctattttctagttaaggaaactgtagcatagagaaaataaataggattgctagaaatcacacacacgtaacatacaatttaccattttaactattttgtaatgtacagatcagtagcattaagcacattcacattgttgtataaccatcaccaccattcacctgcggagctttcatcatcctaactgaaactccatactcattaaacaataattccccattccttttctcctcatcccctagtaaccaccttactgctttctgtctctctctgtgtatttgactactctaggtacctcatataaatggagtcatacaatatttatacttttgcatctggcttatttcacttagcataatgtcattaaggttcatctatctagtagtatgtgtcagaatttccttcctttctaaggctgagtaatattccattgcatgtatatatcatattttgtttatctgttgatgaacactggggttgttcccacttcttggctattggaagttgctataggctgcatgtgttccttcaaaattcatattatgaaatcctatctcccagtgtgatggttttaggaagtgagacctttgggaggtgattaggtcatgagagctctgccatgggaataattgcccttatacaagagaacacggagggtttccttcctccttctgccacttgaggtgacagtgaaatgacagccatctatcaaccaggaagccagctcttaccagacaaagaatatgccagcgccttgatcttggacttcttgtgagaaataagtttctggaatttataaaccacctggtcaatggtaatttgttacagcagcagacaaagacagaagccaccccactttaaagttgagattcccgactcctggtctaatgctctttccagtattatcacaaagggaactgatggttctgtatcctaaaatctcccccaaactcaagagattttcagggaaatggtcatcatgtgtaaaataattagccagttgaaatattgatgctgagcttttgtgaataaatgaatcaaatagctaagctgggttcattcagactttatctaagtttctttaagcttatctctacattctcctttttcatattgaaaaaaggtaacaatttccagaaagataccaacagatcattagctgatgcagtatctccagaattctttttcttttttttttagaccaggccttgttctgttgcttaggctggagcgcagtggcacaatcacagctcactgcaccacgaactcatggactgaagcaatcctcctgcctcagcctcctgggtagctgggactacagacacatgccaccatatccagctaatttttttctatagtttttttttttttttttgagacagggtcttactatgttgcccagactggtctcgaactcctgggctcaagcaatcctctgcctcagcctcccaaagtgctgggattacagatgtgagccactgcacctggcccctagaattgtttctagaggtgaaacttcaaggtgaaatatagtacataactgcttttcagayaaacaagtccagagagcacaytctcttgtgctcttggcatcacttggcatcacttcatatttgaggtgtttcaaacccattagaacacgtgaacaaggcctgcttccaaagctggcttccatctggtagtcccattaacaactgggcacaccccttccctagagctctgtgtagacagtacctcctccctaggactacacaaggactgaaccagaaggaagaggacagagcaaagccatgaacatcatcctagaaatccttctgcttctgatcaccatcatctactcytacttggagtcgttggtgaagtttttcattcctcagaggagaaaatctgtggctggggagattgttctcattactggagctgggcatggaataggcaggcagactacttatgaatttgcaaaacgacagagcatattggttctgtgggatattaataaggtaatgtatacatcttccaactttttaaagtcacagagtaagatatgtattttaagaattatttgacttaccatctacttatctttgtatttttgtttttcaaagtttgataaattccctggtcccttagtctgtatatgtgtcaggttagttagatgaagggaatgtaattaagaactaagcagcgatttttatgacatggtgtgcaggttgatagaaagactcaggagccagtctccttccaagctgctaaatgaggcaagtcacatattatctctcagcctgttttcttggctctgaagtggggataataacttaggggatgggcaagaacgggatctgaaaattacagctacaaacaaaagtcaaacgaagaacttgcaacagaaacctttagtgcctcccctcatgcacaagcaacacagttctaaaatatttactgtctgaccctttacagaaaatgtttgccagtccgtagtcaaaaggattaaataagtaatattttcagcacttagcatatgataaacgatacgtggcacatgataaacaataactgtgttaaataaaatatgtgcgcagtgagtcaggcttttccttggacattagtatttttcctgtgttcttacttgtaaacactacattaacaaccccaaataaaactgaaggaactgaaatcttgtatcattttctctaaacttgtaaattctggtaaggccatgaaaatatatgcagagaagtgtttacaggattttaggattggaaaaattgtgaagtactccttgagaatcacattttctgcaaattacagtggttttaattaccattatattattactttctcatgttctttgctgtcatgtttagttgaaacctaaaatgtctcttacacttagagaactaattcttttctgttttttttctgaatagtgaagaatactatacaaaaaagctactacatttttatttaacagatatgagcatttatataatagaggagttgatgtatataaaaatgatttgccatctttttggtctttgaagaaattcgaatgaactttctggaagatagcaagaatttacaaatagagaaaattgttgcctgctgttctcaggcatttgtccaaaaatataaataagtataaatctatgaaaagggcttgatgaaatctaaccttcaaatctctttccagatgtgtatttttggggaaagggctatatttattaagttttttttaaattttaaaatttccagagacaagagaaaagtaaattagaaggaagtcgtattaaaaatgacttaagggcgggtgcagtggctcacacctgtaatcccagcactttgggagacggaggtgggcagattgctggagcccaggagttcaagaccagcctgggcagcacagcaaaacccccaactctacaaaaaatacaaaaattagctgggtgcgggggtgcacacccgtagtcccagctactcgggaggctgaggtgggaggatcgtttcagttcaggaagccaaggctgcaatgagctatgatggcatcattgcactccaagctgggcaatagagccaggctctgtctcaaaaaaaataaaaaaagacttaagaaaaataggtaacccaacctcaaaaattctctttgaatcattaaatttcatggttaaacatttaagctactgaatgattcactctaaggctgtaatgtaactcagatctcctttaggcgaggaagatgctggctgagttttcatcataactggctccttttgccctgtgagatgagagacacagtagcagtttggctcttatgcaatctaaactgttgcgttgggaatacggttcaaaaaacacaytggagtttaagctaaagcaagtgttttgctaacaaaaagacaaggcatcacattttgcaattgtctagctcagttataaaacagaagaataggccggacgcggtggctcacgcctgtaatcccagcactttgggaggccgagacgggcggatcaygaggtcaggagatcgagaccatcctggataacacagtgaaaccccgtctctactaaaaatacaaaaaaattagccaggcgtagtggcgggcgcctgtagtcccagctactcgggaggctgaggcaggagaatggtgtgaacccgggaggcggagcttgcagtgagccgagatgacgccactgcactccagcctgggcgacagagcgagactccgtctcaaaaaaaaaaaaaaaaaaaaaaactgaagaataattaattcttcaatcaaaacatctgatgaatgctctggtaacttatgctctctactgacctagaaacaaatgagagagtatggtgtggtttgtgcaatctggcagtgagcaagctaccaactaaatcagtgaaagactctcctattctttttttactcttctgcaatcccacaaaaggctatttgaggggatactgactttgagactgggtcctaacatccatgtttggggagttcaggctgctgctccagggtttagcctacagtagcgaaatacaaaggacccagagaccactcattcaaggtttgccctaaatagcagcaacaccactgtcatctcaatacacgaagaatagggcttttcaggtatccttgcctctttgtcacagagaagagtttacagattgtgagacggaaaagtataatttttaaaaccttataatattttctataaaagtcacctgaggtgaaaacttgaaaagaattataattttccagaatgtgagtcaagaaacattagagcaattttatcttaggaaagaggtctttgaatttaggctgaaagtaaattgctctgtctccatgtcctatggttatgggcaagtttggtacataaatgagaaatccatccagtggccttgcccatctcactcccaaacacctgaagaatgtaatgttatatctcctagagtagcagcatggtctccctatgaaagtccttcttctttaaggagacttctttcccttccctcctaggaggatgagtcagaatcatcaagaaaaatatgatgggcagaggcatacagtttaccattaccactagtttagaattactacttagcactttactgcctattacatagttggtgctcaacaaatgtatgataaattaatggttgagtttttctttcttctccatattcatcttccatgacaccacgaagagcaatgtttttcaagaatgttcttcaaggtttgaaagtagcctgctttagagaaactgcctactgtacagcctccaaccaagaggaaaagctgaaaaaagcatgaagggattttgttttgttttgtttgttttggttttaatatgagcattccctggcagaaaagccaggggtaatctcattgcaactaggcaatcactctcaagaaattttctaacaaataaggaggccaatttttattttattttgagacgaagtcccactctgtcacccaggttggagtgcaatggaatgatttcagctcactgcaacctccgcctcccgggttcaagtgattctcctgtctaaacttcccgagtagctgggattacaggctcccaccaccacgcccagctaattttttgtatttttagtagagatggggtttcaccattttggccagactggtctcaaactcctgacctcaagtgatccaccctcctcggcctcctaaagtgctgggattacaggcgtgagccaccacacctgacccaggaggccaatttttaaaaggttaactaatcttcatgtccaaaatgaatgttaattgttcattttggacatgaatgttaattttttttttttttttttttgagacagagtctcactctgttgcccaggctggagtccagtggcactatctccactcactgcaacttcctcctcccaggttcaagcaattatcctgcytcagcctcccaagtagctgggattacaggcccacaccatcaggcctggctaatttttgtatttttagtagagacggggtttcaccatgttggccaggctggtcttgaactcctgacctcgtgatccgccctcctcggccaaccaaagtgctgggattacaggcgtgagccaccgcgcctagccgaatgttaattgtctaaaaatttttcttctccaatgtcttctcctccacttttttcggaawttgtttcttcctaattacagcgcggtgtggaggaaactgcagctgagtgccgaaaactaggcgtcactgcgcatgcgtatgtggtagactgcagcaacagagaagagatctatcgctctctaaatcaggtgagactgcaggttcacaaatttcttcagattattttgtttcctaggacgctgacgtggaaaatgagaaaggtctttatgactgcctgatttaaattggattttagctgctaactgaagtagttatgtcaccaaggaaggatatatactttttttcttgtatgtaatccactcagctctgcccattattattgttcatattattaatcaatttcattctgatcagaagtgtgagcagtggcacagagtgactgacaaaagatttatcatcagggaatatggatcacttcctagttttgttttagtcctattaactttgcagtaattccatcttctctttaattatttcccttgtgagattttattttggtgttaatgtagtcttctgtagaaaatgtaatattaataattattatcacaattattttaaaagagtaaataccaaataatcacaatgaactaagcactctaacaaactttacattttttaattcaatccctacaataactctgtaaacttcattttacagataagcaaattatgactcagagaggttaagccagacccaggtcatgtagttattaggttatgaaaccaggatttctcaaccagcactttagaccaggtgcggtggttcacacatgtaatcccagcactttgtgaggccaaggtggaaggatcacatgagaccaagagttcaagaccagcccaggcaacatagtgagaccctatctctaaaaaaaaaaaaaaaaaaaaaaaaaaaggtttaaagaaaaacacatttttaaaaaatgaacactttaaaaatatttggtcagaatttatataggaatttatcaacataaatgttaatttcactttactgataaacttgcaaaacatgatgtgctgggtactgaaatttagatgttaaaagaacagtttatcccacctttatgacagtgttcccttggcctccacgatttgagctcaacagtctgtcttgcctgaactctgagagacctcatacaatagaagaaagactctcatctytggattatattggtcccaaaactttgagtttgaataatacacccagtgaaagtgttctttcaatttcaaaaggtgaagaaagaagtgggtgatgtaacaatcgtggtgaataatgctgggacagtatatccagccgatcttctcagcaccaaggatgaagagattaccaagacatttgaggtcaacatcctaggacatttttgrgtgagtgtgagtcagaaacatttctgatttgtgcaccttctcttaagatacatgaaacttataacggagttcacatacttctggacaggaaactggccagatctttgccttaatcaagaatcattaaatttgtttgagtagaagagccacagagtctctgacacaaggacacagaattcaagtggacacaacacaccagaatgtaagctacttggtctgtcttgtccaccagtatctgacacaaagcttggcatgtaccaggagctcaacaaatgtttgtggaggtttgttaagggttgtcagtgtacatcttttcaatgctgtcacttgtgacttcatttttttccctccacaccatgattttgtaatgtgtcctcattttgtggaattttagaatggaaaggacatcagaagtaattacttggatgtatataggatcgaggacacttttggacgagactctgaggcaagtgttctagatccatggggtgctggaactgagaaatgcagctatacagacctcatataattggttagttttgtgggagatggaaatatcaacttcaactgcctttgtatagaaatttttatgattaatcttccagtgcctcaatattagtgtagaatctagggcagatctggattctagaagaaagaagaaaaaaaagagatgtgtcccccttacctttaccagctcttcacatatgtgaattggctcccatgcccaccaaactacacggagacctcatacattagctacctatagctgcataacaaattatacaaaacttagtggtttaaagcaacaatgtatgttcactatcctctcacagtttctatgggttgggaatttggaggtagcttgggttgggagttctagttctatgaatttgcataggatttattaaattcttataaaattttattgatgtttctcacaaaagaggtttttggaaaaaaagaaagacttgttttctgtaacatcaacatataatatacaatattacaaatagggagatagtgaattcaatcatgattcattagtgtggtgtagaactctcagcttacactactcaactgtcttaatacagttacacaagatttcactcttttaattagaatgataaagccccaaaccaaaaaattatatgacaccaaattatcataaggaataattttagttctgaaaactctgaatttttcccttaatattgtttagatgacatatccaaaaaaggatctatttgattccttctgaagggaaggagggggagtactgagattagtgttggcatggggcttaccataccaataaatttgtatctttatttctatcatttgtaaagaattaatcatggaatgcttggaagtattttatttcattgtataagttctctcaaatgcctttctgtcttaacaaaaataaaactacctgatttggaaacctaacgtctatgtcattgtctttcttctttctgcaatgakccttaagatcacaaaagcacttcttccatcgatgatggagagaaatcatggccacatcgtcacagtggcttcagtgtgcggccacgaagggattccttacctcatcccatattggtaagtatcacatgccagccatgttatatatttttatactttgaagggagcattacacttcaaattgttaccactggagagtcctggttcttggcatcttgaacaaagaattggacaaaactcaccaacaaagccaggaaagaatgaagcaacaaaagcagagatttattgaaaatgaaagtacgctttacagggtgggagtgggcccaagcacaggggctcaagagccaattacagaattttctggggtttaaataccccctagaggtttccactggttacttggtgtacgccctatgtaaatgaagaggatgaattaaagttacagagtcgtttactcagtgtacaccatatgtaaatggagaggatatttcctgtcatagctggagtgtttccatttgatttagttctaggaagtcagcatgaatcggccttatgttccctgcctccagaccctgttctcctgcctcaagattacaatgctgagagcagagtgatttggatttacagaatttaaatttatagtagtttagaatgattttttaaatgactttttctaaaacaatgaaaccaggttgtaattatatttaagatatttttagatttctgcaaactcctctgtagaacaatgagagaaaacagtaatgccaagcatgtttccattgtttcctggaataagaaacagaaaccccacagactgagaagcaaaacctacagaagctaaaatgaacacatgtctatgtcatggccttggtgcccaagataagacaatcagagtggtccctggatcaaaacattttacagtgtgcttgtgccatgaaagtgtgtgtgtgtgtgtgtgtgtgtgtgtgagagagagagagagagagaaaacgactctacctgactaaaagttgcagataccacactccatgcaccaccaaagacataaagggaaggaggtgagaggcgttaaggatgtactgctgtatttgccaaatatcctttcctgtaaactcttctccagatcctcataataaaattaagaggccaaagtggcaaccattgtcaagagaaaaactatcaaccattgtcaagagaataactcagttattgagagagagaggagaaatgagcagagtcctacagaagtctgtcaacacagataccagttttgtagaatttctaaatgtatttttcctgattcatatttttcaaaataaaagcagcaataaaaactgattagaaaacagtttgaagattcaatggaaaaaccttacatgtaggatggaaaactgaacattaagccaatcaatagagttatttttgttcttttgttatcattgttgtttaagaaatgagatacgttcacaattctgcttaatcatgtaagaaaatgaaaatgaattgccatttatactctcagaaaaatcacaagtggctgatttttggcttccacttgttcttaagccaaatgataccgccttctcacagaaagctgaggattggtttcactctcccttagctaacaatgcttaataattctcttacagttccagcaaatttgccgctgttggctttcacagaggtctgacatcagaacttcaggccttgggaaaaactggtatcaaaacctcatgtctctgcccagtttttgtgaatactgggttcaccaaaaatccaagcacaaggtaaggtcaaaatcaagttagaatgggtatgtggtatgataaattgatatgaaaactaatgagaaatgtttaggcaggccaactaatagaagaaaatgaaraaggaaaaataatttttcttmttmttattattatcttgaaattaaaggaataaaggggraaaacacattagggactagcaggaatgatcagccaccgatgaactgggatatttatttgtgtccgggagaaagcacatacatttgatcaccgttaccaccctgtctttaaaatgcaaatgttccaaggaccagcaaataaattgagtatctagctccttagtcaaggtgaatttctgcaagaactcttgtctctggtgagacaggatttgagaccacaagagaagaaaaattagtcctgaaaggagaagaaaaaagcaggaaggtgtggataagaacccgaaaattaagccatctgcttaacaaatttttctaatcctagtatatattctgctgcaggttaacaaaatatactaagcttaatgattcgaaaccaattttttactggaagggaattaatcctaaatatattcattcaaaagaactaaacaattctctgttgagtgccgcctcatttgaggatactgactcttacagcctgagttagctatgtggtctctgcagctggaatcactccctgccactggagtccttcatggtgttagaccataggtactgttgactaaagaaaaaaaaaagtttttgtttttatttttgttttttttgagacagagtctcactctgtcacccaggctggagtacagtggcgcgatctcagctcaccgcaacctccgcctttctgggttcaagcaattctccttcctcagcctcctgagtatttggattacaggcgcccaccaccacgcctggctaatttttgtatttttagtagagacggggtttcaccatgttggccaggctggtctcaaactcctgacctcaggtgtcctacctgccttggcctcctaaaatgctgggattacaggagtgagccaccatgcccggccaaaaaaataagtttttaaagaattaannnnnnnnnnnnnnnnnnnnnnnnnnnnnnnnnnnnnnnnnnnnnnnnnnnnnnnnnnnnnnnnnnnnnnnnnnnnnnnnnnnngcgtggtggcgagcgcctgtagtcccagctgcgcgggaggctgaggcaggagaatggcgtgaacccgggaggcggagcttgcagtgagccgagatcgcgccactgcactccagcctgggcgacagagcgagactccgtctcaaaaaaaaaaaaaaaaaaaaaaaaaagaattaaaggtgttaattttatttagaagccttactgaagactacagtcggaggcctatagcctgagagcagccctttagagaggttcagttgaactgttctgatagtgggggccatgtgctctatcctgtattgtcttcaaagcatctttccagagagctgcacattgtcacagagtcagggactttgtgaaattatgctgacaaccagaagtgagtaaacgtggcttcttacatttgctacgttgtctcacagtacttaataagtatgcaatatgtaagtaaatactatagtactattgcaactcctgattgttttcttagacaaggaattgggcccaataaaaaccctcttggtaggcattcaggcttcgtgtaccatgagctttcctaagggtatcctgccactcttggggaaggcatgatagatgaggggagtaaggataatggaactctgggtacagggttcctgggggctaacttagaggtagacacaggcaatgctaaatatttgggattgattttatagaggttgctagattgtgaatttccttagtaagggctaaggcattgatatgtaatgtcacacttggctccgaggctgggttgttggatccatgtagatgaaatcagggagagaaagggcagaacggagtaatttagaaatgtattgatttgtattactctctgttggcttgctattcaaggcagtggagaactcaatcacataataatctgcagcaaaccacagatcatcccagggaatgaagttttaacattcgctggctccctaactcctcacccagcctttacattcactggctgttcagtccatgcctggacatcttaatttgaatacaacattttaaatccatttttctgtcatcatcttgcactaacagacaattctacactaagcctatgtttatgaatatttctcaagagtacatgtacacagccttcagtataaggaaaactggaagtatgacatacctccagttgtcatactccttgggcccctcttaaattctcattaaactgcaggataggcaagtcagaggtgaatctcaaatacgaaattcttaccggaaaggggttccaatccagaccccaagagagggttcttagatttctcgcaagaaataattcggggcaaggccayagtgcaaagcaaaagcaagtttattaggaaagtaaaggagtagagaacagctactccatggagaagaatggcttgagctgctccaccaagggtatttagagttacttcttgattatatgctaaacaaggggtggattattcatgagttttccgggaaaagggtgagcaattcccagaactgagatttcctcccctttttaggccatatagggtaacttcctgccattgccatggtatttgtaaactgtcatagtgctggtggaagtgtctcttagcttgctaatgtattatagttagcttataatgagcagtgaggacaaccagaggtcactttcatcaccatcttggttttggtgggttttggccggcttctttactgcaccctattttatcaacaaggtctttatgacctgaatcttgtgccaacctcctatctcatcctgtgacaaagaatgccttaacttcctgggaatgcagcccagtaggtgtcagccttattttacccagaccctattcaagatggagttgctctgatttaaacgcctctgacaaaatgacgacctcaaaacaatccagctttatggaatacctccacaagaaagaaagtatacttagctatagaattttctccttgcatccaacagrctttgagatgtcagatgtttccttcctgtcccatgattaatcctagccattcctctttcttgtctggctccactactccttaccatctaatgcctcgccaccattttgatattttgactaagtgagctatgaaacacacctactggatatgaaagtataagtttctgataacaaaacatcaacatgggatgtggaggaagtgggtagggtggcattaatgcagcaaatcctggaatattttaaatcttcattctaaatttagtaaaaatataggataattttcctgccatcatttacttataaaattaaaattttagaaaataaaaataatattttcctctttttaatcacagattatggcctgtattggagacagatgaagtcgtaagaagtctgatagatggaatacttaccaataagaaaatgatttttgttccatcgtatatcaatatctttctgagactacagaagtaagtacagcacagaacacccaaatactaaaacaccaatagagcttttttttttgctttttttttttttagccagagtctcactctgtcaccctggctggattgcggtggttgcagtggcatgatcttggctcactgcaacctccgcctcctgggttcaagcaattctcatgcctcagacccccaagtaactgggattataggtgtgtgctgccacactacacccagctaatttttgtattttttgatagagasaggtttccccatgttggccaggctggactcgaactcctgacctcaagttatcctcctgtctcggcctcccaaagtgctgggattacagtcatgagccaccatgcctggcccaatagagctattattatggagcatctttcagttgtgaaaattggcatggaaactctccatccctggggagaacagttatttcctctgttattttcctacccagtctataaaaagagagtgattcattttctctaccaaatctactgtctctgcccaaactttgctgaagactattctaactaaaggaaacacagtttaaaaagaatgcaatatagtgaagtagttaataataaagactccatttttaaaagtctgctggaagtttggttgggattgcactgaatctatagatcaattggggagtattgacatatcaacaatattgagttttctaatccaagaacataatatctatttttaaaatcttcttcaaaatctttaaatctttaaattgtattttgtagtttttggtgtttaagtcttgcacatattttgtcagatttattccaaagtatttcacgggttcttttttttttttttttttttttttttgagacagagtttcacccttgttgcccaggctggagtgcagtggcgtgatcttggctcactgcagcttctgcctcctggcttcaagtgattctcctgcctcagcctcccaagtagctgggattacaggcacctgccccctcgcccaaataattttttgtgtttgtagtagagacagggtttcaccatgttggccaggctggtctcgaactcctgacctcatgtgatccacctgcctcagcctcccaaagtgctgggattacaggcatgagccatcatgcccagccctatttgacggtttttgacgctaatgcaagtggcattttaaaaaattttatatttcccattgtttgttgtcagtatatattggatttttgtaatttgatctcatattttgcagtcttgctaaattgctaaacctctttttgctaaactcgatmagcttttttttttttggtagattcctgggcctctaattttctttatgggaaagtttttaattacaaatttaatttctttaatagctacatggctattcaatttacttattaattcttggtaatgtgtgtctttcaaggaatttgtccatttcatctaagttgtagaatttctttggcataaatttgtacataacattcccttattatccttttaatgtctttagaatgtcttatttatttatttatttatttttattatatttttttgagacagagtctcgctctgttgcccaggctggagtgcagtggcacaatcttggctcactgcaagctccgccttctgggttcatgccattctcctgcctcagcctccctagttgctgggactacaggcgcctgcaaccatgcccagcttaattttttttttttttttttttttttttttttttttgcgcgctttttttktatttttagtagagacggggtttcaccctgttagccaggatggtctcgatctcctgacctggtgatccgcccgcctcrgcctcccaaagtgctgggattacaggcgtgagccaccaagcccagcctatttatttatttagtagagacagtctcactttgctgcccaggcaacaaaggttttgaatgcctggcctcaagcagtcctcctgccttggcctcccaaagtgctgggattacaggcatgagccactgcacctggccaaatgaatatgctgataatatcttctttataaggatgacataagaataaaataatgtaatacaaacaaagcccctgtcactgaaaatgtatagacttcaaatgttaaagtcttagagaacagaatttatatgaaatagcaacagcaacaatttcccagaggaaatactctctcagctttcttctgaggagcagtttctaaattgaaattgtatcagtgagaagataactatactaacttcataaaccttgggcctttttgaaacaaatccatataaactatgaacaaacttgaaatagaacaatttgagaacagggtacaaactgcattggtgtatcaatttcagtatttggttttagcttaaatagactgacttgagataacataaggagaaccttgacccccaagcaacatcatctcgcgagttgactaggccggggttgtggtgtctcacgcctgtaattccagcactttgggaggccacagcaggcagatcacttgaggtcaggcattcgagaccagcctggccaacatggtgaaacctcagctctactaaagatacgaaaattagcaggcatagtggcctgcacctgtaataccaggcactcgcaggagaatcccttgaacccggaaggcggagattgcagtaaaccatgattgtgccactgcactccagcctgggcaacaggagactctgtctcggaaaaataaattttttaaaaaaatgaaaaaaaataaaagttgactaaattagtgtcttggtactaagcactgtaggaagtgagtttcatggaaccccaactctcttggggcccaaagcaagtcatattaatattgaaaattacatgcatatacatgcatatgaccaaggtgataaaaacaattattctgcctgagttggagaatagtatcccagtaaaataaacaagagtctcaaagtcttttgtatcctttgaagctgtcatggtggtttgtaactaggcaacaggtatatattgttaatcttctttgcatttaattccttttatagagagacacaattttacgagcagatgcaattactagcatgaaggtttctttgtgagggtagttaaaaggcccacatgagctctcttcttatccttgtccttctttcagccagatcttccctgcccctttrctcattccatctttcacccacctacccccaaaacaaggaagtaaatcttgcattagtcaacaataccaaagtgattttcaatatgactttctctgcagaatgttattatttctgcctctttacattcacatactgtcttcctttttttttttttttttttttttttttagattgggtctcactctgttgcccaggctggagtgcagtggcttgatctcagctcactgtaacctccacctcctgagttcaagcaattctcctgcctcagcctcctgagtagctgggattacaggcatgtgccaccacacctggctagtttttttgtatttttagtagagacagggtttcaccatgttggtcaagctggtctcgaactcctgacctcatgatctgaccacctgtgcctctcaaagtgctgggattacaggcgtgagccaccgggccagccactctcttcctttcagttgcctactcatctcttatgcattcctggacatcagttgtccttttgaagctttcctccactatcccagcccatgtgaatcctccttccagttatagcccttaattctagatggctgatatttttcaataattgttttaagatgaccattttagcctatcagctaaacaatatcaaagacaatagctatttttcaagtactttagtttaccttattatagagtgcataatagatattcagtaaatagtaaaggagaggtgaaggcttgcatagaatggattctggtggtgtctcttggtgagcttttagcatcaagattaatcagcagtttcagcaatgagctcagaccttcagttttagatctttactcatatcagataagagagtgagaagagtggtatgtatcagtgctttatttatatttgcatccaatttgaactatgaatattacaaaggtgcacacataggttcagacagattgatttaaaatgaccaaagatgacctgtcgtaagcaacctgggtatcttaagatgcactccttggagagggaatgttcctaaaaacattttcagagggacgaactgtatgaaattcagtaaaacataaatcatgaggaaaactgattactctctttttgacatgaaatgagagttttaatgcatggttacgattattaacgtactccgctgcaagacgttaataaagttactgttttgcaggctagaatgtcttgatgctgtaatcagaacacactttttcccctttcttccagcttcaaatgcagattcataattgggctgacttctaataactgcaatgttttctgccttgggcttgcagcagaagcctggcaaaatagtgtttgtttaggcaataatttatttatttatttatttattgagatggagtttcattcttgtcgcccaggctggagtgcaatggcgtgatctcggctcactgcaacctctgtgttcaggcaataatttagactttaccttacttgtgattactatagcaattactatagccacaaggcataattttactgtctcatttcaattttatgaatttgaatgtttttacacttttcctaatgaagtccactatgaagttatgtcaaaaaaaaaaaagaaaaagaaagatgcacacgtaaaagagaggtggttgcaagagaagaaaagaacggaggaaarttaaacgcaaaccagataactctcagcgtattctaaatgaccaaaaacagaactctgttgtcaaagattttaaatggaaaatttttcaattkttttttcttttttgtacaggtttcttcctgaacgcgcctcagcgattttaaatcgtatgcagaatattcaatttgaagcagtggttggccacaaaatcaaaatgaaatgaataaataagctccagccagagatgtatgcatgataatgatatgaatagtttcgaatcaatgctgcaaagctttatttcacattttttcagtcctgataatattaaaaacattggtttggcactagcagcagtcaaacgaacaagattaattacctgtcttcctgtttctcaagaatatttacgtagtttttcataggtctgtttttcctttcatgcctcttaaaaacttctgtgcttacataaacatacttaaaaggttttctttaagatattttatttttccatttaaaggtggacaaaagctacctccctaaaagtaaatacaaagagaacttatttacacagggaaggtttaagactgttcaagtagcattccaatctgtagccatgccacagaatatcaacaagaacacagaatgagtgcacagctaagagatcaagtttcagcaggcagctttatctcaacctggacatattttaagattcagcatttgaaagatttccctagcctcttcctttttcattagcccaaaacggtgcaactctattctggactttattacttgattctgtcttctgtataactctgaagtccaccaaaagtggaccctctatatttcctccctttttatagtcttataagatacattatgaaaggtgaccgactctattttaaatctcagaattttaagttctagccccatgataacctttttctttgtaatttatgctttcatatatccttggtcccagagatgtttagacaattttaggctcaaaaattaaagctaacacaggaaaaggaactgtactggctattacataagaaacaatggacccaagagaagaaaaggaagaaagaaaggttttttggtttttgttttgttttgttttgttttttgtttttttgagatggagtctcactctgtcgcccaggctggagtgcagtggtatgatctcagctcactgcaagctccacctcccgggttcacgccattctcctgcctcagcctcctgagtagctgggactacaggcgcccgccaccacrccmggctaattttttgtattttttgtagagacggggtttcaccatgttagccaagatggtctcgatctcctgacctcgtgatccacccgcctcggcctcccaaagtgctgggattacgggtgtgagccaccgtgcccagcctttttttttttaatagaaaaaataatccgactcccactacatcaagactaatcttgttttgtgtgtttttcacatgtattatagaatgcttttgcatggactatcctcttgtttttattaaaaacaaatgatttttttaaaagtcactaacaaaaacaattcactaaaaataaatatgtcattgtrctttaaaaaaataacctcttgtagttataaaataaaacgtttgacttctaaactctgtctctatgagtgtccttcaagaaccaaggatgtggatggtaacagctacatctggcagttattaaatgaatccaggggttttctcaactctggtttctttgacagcaggagtgctggtttatcaactggaacttactgacccctttctatgtgtgagattaagcacagtgctattgtttctaattttttttcttagtcaccggcaataatttttttcataacattcttttaatttcttgccttataatcaagaaatttatgagtaaaatgtattatttttaaagtatggttacaaaaattcaaaagagaaacatggaaagtaaaaaatagaagcttacccccagcaatcccatttcccagaggtcacactgtcaatgcacaatcttccagtcttttactgatgcatgttcatgacaaatacattatattcttattgcatgggtcgtatcagtagtttcataccatacattatgttctgtaacttgctcttttagcttaccaacttatcacaaacagctgtttgtttcagtatagagaattcaactttttttcatgagtacacagtactaaaatggtactctaaccattcccttttgataggcacttaggatgtttccagtatttcttagttcatctatttaaatattaatttaacaaatactgagtgccctcaaagttctaggcccagggaaacatatatgaataaggcaaactccttgtcttaacagagctcacattctagtaggtgggacaaacaataaagggactgcaaatatgagagagagcatttaaagtagtagagtcagggaagagcacgctgagaaagaacattttgcggacgaactattaccatacacaggcaactaaaaaatattttatgatatacatattgacaaaaatagaaacctcttaaattccagtgttaagttcagagcagaaaacttcttattttaattccattttggttttaatcttttatgaatgaagctcagagaaatgtgcgagcaaaatattcatctctctttgtccatttttcttgcttattttgagtgtagtcctcctccttaaaagttccacctgcagccaggcgtggtgactcatgcttgtaatcctagcactttgggaggccaagggggcagatcacctgaggtcaggggttcgagaccagcctggccaacaaggcgaaaccctgtctctactaaatatacaaaatttagctgggcatggtggtacatgcctgtaatcccagctactcaggaggctgaggcaggagaatcacttgaacctgggaggcggaggttgcagtgagctaagatcacgccaccgcactccagcctgggcaacagagtgagactccgtctcaaaaaaataaaaagctccacctgagcttccaaatgttttcctatgacaatcttcatctataattctctctaagagccctctctttcaccaaaatcccagttccaagggctactgctaggatgtgcagatcaccagacaaatatttttttgcagggcttctatctatataaacacttttattaaaaatgctttataaaatttataggtccatgtgcatgcagtatagtgattttttgataaagatttagaataataggaagatttgtgtatttattgtccgagcagtacatgtaaagattcttctcggcatcctggtactatctctttggtccaggaatcatttcttttttatcaaatgagccattcctagctaatttcatatcttttaccacaagaaagggtagcaatgctgttattattcataatgccatggctctttgtaatatgtttgtaataaaataatatgaatcttcacccctttccaataccctgctaccatttatttaatcttagctacattatgccttttgacattgcatcatccattgtgctacccatgaatactgggtatcactcagagacaatcactcaaagattgttactggtacaacacagttcaatatagtacaattgttactggtacaatgtttgatgataatcacaaattcaagtcttacccagggtatatatacgagaaaacatgaatgattcgttgtttattgctcattttaaatttatcatttagaatgttatagcatcacatagaacaacacatctttcaactgtgtcttgtcttgaactttttaggccatcatcattacatttctagaattgatctctgccactcctgaccgtaccctacctcccacacaccaccagcagcagagaggggattgtggacagaccaaaatgaacagccccatttgcacaaggaatgtctgtccctcctctaggagagcttaacattgaccagggagaagagaacacagcatcatcacatcagtcagaaaggcccactgttgtgaagaagcaatagtcttaaaagccctcagaagagataagtgcagccaccccccaacccccagccaaaaggactgcctgacccatggcatagaacctgcagaggggataggatgattttcctgaatgccattggcaagcggggtaaggacatctgatgtcaccctgcagcccttggatgttatatagcagaagtggcatcatactcagaacaaactgcgagtggatgcatgggtcaacacatgcggcttgggcagtggaccttagatagcttacaaccctaaattagatctatgcccaatgtgagtgagaattatccaaaatcagcatgtcagcatcattctggcagccaaatttcatgtaatcctgcaaaagaaattctttgccaaccagaagtagcagtctgctctccaggccaccctcctgaaacgaaagcctggaaacaagaccccaggatgatcctatagttacaagttgcagagctccccaggayatctggtcaaccttatacacagggagagaaagggagagtaccccagagagaaaaaacagagcaggcatccgaagaggacttggaaaatttcatagagggcactccaaagaataaggctctatgaggcacaggactggggtaaggccctcacttgctcagatctgagggtggtataggtacagccaatcttcaactgtatgcaaagcttaaaggagtagcagagtaaatgtatggttgaagagaaannnnnnnnnnnnnnnnnnnnnnnnnnnnnnnnnnnnnnnnnnnnnnnnnnnnnnnnnnnnnnnnnnnnnnnnnnnnnnnnnnnnnnnnnnnnnnnnnnnnnnnnnnnnnnnnnnnnnnnnnnnnnnnnnnnnnnnnnnnnnnnnnnnnnnnnnnnnnnnnnnnnnnnnnnnnnnnnnnnnnnnnnnnnnnnnnnnnnnnnnnnnnnnnnnnnnnnnnnnnnnnnnnnnnnncctgtgtaaatggggaagtttaaacatgcccttgcagcatggctgccgcatgagaggcatgttggaaatacaaactgttgcaacccatctcaaacttacaaaatcagaatctgcattttttaaaaactcctaggtaattcatatgttttagaggcatctttttttataacactaactttgaatttagtgcagcattatgtgaactgggctgttctgtacatgtgataattacaacgaatttaacagttacccttgtgtttatgtcttcacaaattacgtgagaaaccgtaagggggaaatgccaatccctgtcctaacagtgctctcacgctttctactatttgcttcctcttgtgtctaaaagttttcagacagctcatgaccttttctattcagctcttcaaatctgccaagtgttttgctgaaaccccttctttatctgattggatgtattacatctgatcaaatttgcctgtcagctgcttgcagcaagggtggaattacaggaaagttaagtgggaacttacttgtatttaatgggaatcttttatagtaaaagtaatcacagtgaaatcaaagcaagtacattctgacttgcctagggtgcaatcatgtctcattcaaactaacttcacaaacccagtgagcagctagagaatattcataaattcacatcaaaacacttatgaaaagtgaagtcatttaccaattgcactccagtaatgatccattatctcaatagagatcttcttacttttaaatgtgaggctaacttgtataaattaagacttaaatattcccaaacaacactgaaaaccaaattgcctgttcccatacctaattccaataactaggatttttcacttttttttttttctttttgagacagagtctcactttgtcacccaggctggagtgcagtggtgtgatcttggctcactgcagcctccatttcccgggttcaagggattctccagcctcagcctcctgagtacctgggtttataggcatgcaccactacatccagctaatttttgtacttttagtagagacagggtttcactatgttggccagactggtctcgaactcctggcctccagtgatcagcccgcctcagcctcccaaagtgctgagattatgggcgtgagtcacygcacccagccctggattttttgactttctgtttctcaacacctctttccttctgatggctctttactaattagttcagacttcgttcaattaatttgatgcatttagttctctacttctcttccattgttctctttctcttttcagccttctctttctaagcttctccccacatt

SEQ ID NO: 93304 - DNA, 13184 bp, Homo sapiens
acaagttccactgattccacttatatgagatatctgaagcagtcaaattcatagaaagtaaaatggtggttgccaagagaggtggaaagaagatgttcaatgggtatcatttcagttttgcaagataaagttctagagatctgctggacaacaatgtacatatagttaacactagtgtactgtacacttgaaaatggttaagatggtaaattttatgttgtgtttttcaccgcaataaaaaaagacactacataatgacaaaagtgtcaattcccaaagacatagtatagtctaaatgtgcatacacctaacttcaaatcttcaaatcttcaaaatacacaaagcaaaaccaaaaagaactaaagggagaaacagacaaattcacaattataattgaagagatttaaacattcctcttcagttatagaactagttagcagagaattagcaatgacataaaagaacagaacacatcattaaccaactggatttcatgggtgcttatagaacactcctcccaacaaaggcagaatatacattcttttcaagtgcacatggacctatataagccatatcctgagtcaataaacaacmctaaacaaatttaaaagaaattacattgtataaaatgtagtctctgaccataacggaattaaactagaaataagtaataaagacaacagaaaactctccaaatgcttacaaattaaatgcacacatctaaataatccatggagcaaagaggaagtcctaagagaaattagaaatttcttcattaagttagttcttaacaaaaatgaaaatataaaataccaaaatatcaaaatttgtaggctacaggtaaaaaagcagcttaggtgaaagttcagaaaattatgtgcttacatcaaaaaaaagtactaaatcaaaaaaattagctgggcgtagtggcaggtgcctgtagtcccagctactctgaggctgaggcaggagaatggtggcatgaaatcgggaggcggagcttgcagtgagccgagatcacaccgctgcactccagcctgggcgactgagactccctctccaaaaaaaaaaagagaaagtattaaatcaatattctaagcctttactttcagaaaccagaaactagaaaaagaacaaaataaactcaaagcaagcataaggaaataaacagcacaaacaaaattaaaatgaaaataaaaaacaatagataaaaatccaaaccaaaagctatttttaaaagatcaacatatttttagtagagacggggtttcagcatgttggccaggctggtctcaaactcctgacctcaggtgatccacctgcctcagcctcccaaagtgctgggattacaggtgtgagccaccacacctggcctgttgatcaacagaattgataaacatctggcaaaaaaggcggggagggaagacacacatcactaaaatctgcaatatcagagactatcattgcaaaccccactggcattaaaaaggtaagtaaggtgaatgctatgaaaaattctacacacataaatgtgacaacttagatgaaatggaccaattcctcaaaacccacaaactaccaaaactcacccaaaagacaacctgagcattgctataactattaaattaaatcacggtttgaaaagcaatcttcaagcacagatggtttcactacattctaccaaacatttaaagaagaaatagccttgactctacaaaatctctttcagaaaacggaagaggagaaaacactttccaacttatttcatgagaaaacctatgactctgataccaaaacaaagatagtacagaaaaggaaactacaaatcaatatccctcatgaatacagacataaaaatccccaacaaatattagcaaatataatccagcaaaatatagagaatgatcacgaccaagtagaatttatcctaagagtttatgcaaggctgcttcaatattcaaaaaaatatagtctaccatattaccagcatattaaaccatactaaaccaccacaacaacatactaaagaagaaaaaccacataggaagtaaaagttatctccagtgcaataaagcaagaaaaagaaaaggcaaagactggaaagaaacaaaactgtccctatcagcacacataattgtctatgtaaaccattcccaaggaacagctagaactagtaagtttagcaaggtcactaaaaacaaggtgaacatggctgagcacagtggctcacacctgtaatcccagcactttgggaggccgagatgggcggttcacaaggtcaggagatcaagaccatcctggctaacatgatgaaaccccgtctctactaaaaaaatacaaaaatttagccaggtgtggtggtgggcgccagctactcaggaggctgaggcaggagaatggcgtgaacctgggaggcggagcttgcagtgagccaaaatgtgccactgcaccccagcctgggtgacagagcaagactctgtctcacaaaagaaaaaaaaaaaaaaacaaggtgaacacacaaaaaattaatcataacatagcacactgtagtctggaacttcaagccactgcacctggctatagttttatatagtttctgatccattttatataatatataaaatatatttttatgttatatatataactatacctaaaacaataaaactttttgaagaaaacacagaaaaacttcatgactcggggtcaggctactagttgttaaatatgaaagaaaaaaattgctaaaatggactccatcaaaattaaaaccttttgctatgagaaagacaccataagagaataaaaagacaagcttcaaatcaggagaaaaatgttggcaaaccacatatttgacaaaaaatttacatcccaaatatataaaactttcaaacttaacgaaaaacaactcaattaaaatatggaccaaagacttaagacacttcaccagtgaagacacatggatggaaaataagcacacaaaaagatgttcaacatcactgccattacgtaaatgaaaattaaaataatgaaccaggcacagtggtgtgcgcttgtagtctcagctacataggatgactgcttaagcccaagagttcgaagctgtagtgcactatcatccgatcatgcctgtgaatagccactacactccagcctaagcaacatagcccctgccacatccccatacacacaccccacaaccataatgaaataccactacacatctattagaatggctaaaataaacaatactaacaataccaagtgctggtgaggatgtgaaacacctggaattttcatatactgctggtggcaatgcaaaacagcatcactgttctaaaaaaaaaaaaaaggtggaagtttcttacacagttaaacatattcttatactatgacccagcaatctgactcctggcagtttaacctagagaaatgaatgctcgtgtttacacaaaaacttgcatatgaaaacatatagcagctctagttgcaattgctaaaaactgaaaataatccaaataaccttcaacaagtcaatggataaacaaactgtgggtacacccatacaatagaacactacctcacaataaaaaggaacaaacttggtacatgcaacaacctggatgaatctcaatggctgctgagtgaaacaggccagtctcagtaggttactacatactctatgattccatttatatgatatcctcaaaaggataaaatcatagtgatgaaaaacagatcagtggctgacagggatgaggggcagggaaagagtatgactaaaaggagacggcaaaaagagagttttatgggatgatgaaactattttgcatcttttttaagtgttaatttaaaattgatttgggtgatgattagataaatctacacatttgttaaaattcatggacttgtaccccaaaaatgtcaattttgctatatgataaaaaataaaatggaaaaaaagattgttgcattccaacatactcaggataaaactcaaaagacacaaggcaatataatcacaagccactctactgcttaagggataaatcagcccataaaaataaaatataaaggctggccagacacaatggcacatgcctgtaatctcagcactttgagaggacaagctaggaggatcgcttgggcccaggagttcaagaccagcctgggcaacagagtaagatccagtctctacaacagattttaaaattagccacatgtggtggcacgcacctgtagtcccagctacttgggaggctgaagtgggaggatcgcttgagcccaggaggtcgaggccacagtgagctgtgatcatgcctctgcactccacccggggtgacagagtaagattctgactcaagaaaacacacacacacacacacacacaaaggaagacatcagcatcacgatagaaaacactatctgccgtcatcgttctaattgcatgtaaattaaatcatttagtcctcactacaactctatgaagtagctacttttattttgccctttatccttccgcctcagcaccccctgcccaagtagctggaactataggcgtgcaccaccatacagggctaatttttgtattttttgtagagatggggttttgccatgttgcccaggctggtcttgaactcctggactcaagcgatctgcccacttaggcctcccaaaatgctgggactacaggcctgagccactgcacccaggagtcttctttcacttattttgccatgccatattttgtgccctaactatctgaagaaactgaggcacagcaagatggagtgaagcccaagtaagtggtggagccaggatgtgaacctaggcagcagggctccccagcctgtgctattaactaccacactacagttcaaagcactttagaagtgaaatataattacagaacaaaatatatgaaaaaccaaggtccttatcttctccctcactatacttttagattcccctacttttacaagtagcaacaccattttttcagttaccctacttcaaaacatgagccatatttgactcctctcaactttcacaacctatccacttcaattctcctggattctacttggaaaaatctctgttcatccatccctttcttcctattgtcattgaactctattctctctcattgtactccagttcagatccacatactaacctggattgtagtgacttcccctaaccaatcaccacattcctccttgccatcaataaacatctctcaaggattagatgctgctggatttatctaactcaaactgtcctttccaaactgcttaatgtatgtagctcagcttatcctggcattcaaggtcctcattgctctggctctagtctaccttccagtctttttctccattcattttttacataaagtagggaaagggggaaagaagatggaaaaactacttattaaaccactgtgcaccacctattttgccagtaatcttaaatatactcttgtttaagcatcaccttatggatggttctaacatccctgacttgcccaaggccacacagttctgtagaaatggtgggagatggggtttcaatccagctgtgattaagtccattctttttctactatatcacagatttaattattcagttttcctcaaatgtatttgcaaatgctcaagctattccttgtgagggaatgatgtcaaggcccaacttaaataattcctttttatgaattatttcctaattctcccaatgggatgtgatctttcttgtgaacccccatagtacgctgtatttctccaactcgttcactttttttcttttgtattttagacttgcctgcttaacacagtctactcttttttgaagactgtgtcttaacaatatctatgtatttgccgacaatgagccggagtcatgagtgactgaattaacacgatctctatgggttgggttttttcccccaatgaaaaaaactgggtcaacttggctctctgctcctcccatttgacacacagctgcatcttctcatgcattgccagctgcatcgctgaggtagtgaaggtgatggccggagtcaacggatttggtcgtattggatgcctggtcaccagggttgcttttaactctggaaaagtggatattgtcgccatcaatgaccrcttcattgacctcaactacatggtctacatgttccagtaggattttacctatggcaaattccatgcaccgtaaaggctgagaatgggaagcttgtcatcagtggaaatcccattaccatcttccaggagcgagatccctccaaaatcaaatggggcaatgctgacgctgagtacgttgtggagtccactggtgttttcaccccyatggagaaggctggagctcacttgcaggaaggagccaaaagggtcatcatctctccccactttgttgacgcccccatgttagtgatgggcatgaaccatgagaagtatgacaacagcctcaagatcatcagcaatgccttctgcaccaccaactgcttagcgcccctggccaatgtcatccatgacaactttggtatcgtggaaggactcatgactacagtccatgccatcactgccacccagaagactgtggatggcccctctgggaaactgtggcgtgacagctgcagggctctccagaacatcatccctgmctctactggtgctgccaaggctgtgggaaaggccctctctgagctgaatgggaagctcactggcatggccttctgtgtcaccactgccaaggtgtcggtcattaacctgacctgccatctggaaaaacctgccaaatatgatgacatcaagaaggtggtgaagcagacatcggagggccccctcaagggcatcctgggctacactgagcaccaggctgtctcctccaacttcaacagcaacaygcactcttccaccttcaatgttagggctggcattgccctcaacaaccactttgtcaagatcatttcttggtatagcgatgaatttggctacagcaacaaggtcgtggacctcatggcccacatggcctccaaaaggaagaccaccagaccaccagccccagagagagcatgagaggaagagagaggtcgtcactgctggggagtccctgccacactcagtcccccactacactgagaatctcccctcctcactttccatgtagaactcctgaagagggaggggcccaggagccccaccttgtcatgtaccattaataaagtcccctatgcttagccaaaaacaaacaaacaaacaaacaaacaaaccttggtcaactcttgttagtctagtgagttgtcttcttcttctttttttctttttttttttttttgaggcagggtctcactctgccacccaggctacagtgcagtggcacaatctcggcttatcacagccttgacctcccaggctccagcaatcctacaggcatgcaaccaccatgctgggccaatttttgtattttttgtagagatggggttttgccatgttgcccaggctggtcttgaactcctggactcaggccatcttcccccctgggcctcccaaaatgcggggactacaggcctgagccactgcgcccaggagtcttctttcacttattttgtcatgccatattttgtgtcctatatgagtattatgacagcaggtatcactaatatcttatttttaaactttactaagttaaaatgcatacagttcaaaatgaccatatacttttcccccttacatcaaactactctagctctatctagtgaaagttttattattgttgtcacaaaatgttttcatttgtcagcgtactatttctatgaaaagggctttaataaatattcatttttataaaattatttttacatttgaattcagatttggataggacacaacagctcaaaagctgtctataccaaattctcttaaaatggtctgtttaaataatgcaatgtcctcaactttaaaaaatctattatatataatagaacaggaagacagaagcaggaaaagagtacttactcaaagactattcactctgcctaagaaactcagtagacgttaggacttataaagtccgtatattagtatcaagtaaatatgtaattcaacctacactccagaatttaaaacaatcagaatttttttaaaaatatgcctaagattctgatttttagggagaaaaataaatgatattcctccttcctcaaatatattaaaagattaaaagcacaaaacaacagagaggaaaaaaatggacatccgtggcacatcattgtcataacatgctacagatgtccatttctatcacatgttggcatattatgacaatgaagcagacagaaagctgattcctttttttttgctcctctaagtgccagtaaaggcatatcgatcaacaaaataggaagttatgaagagaaaatacttcaaacagaagcagacaggtttatagttcaacgcagagcatatgtaacaaaactaatatatttttataagtaaacattatttccaatgaattacagaaaacaggactgatagcaaaagcttaaagatactattgtgctaagccagaccaccttattctcgttctctagcttcctttgtacttataatttctatcacatttagcatgtgatattaatatgtaataccattacgctgaatactgtactaactcactttacactgtattatcctcataactctttgcagcacagtgactgtgttttcatactacacattaatcaaaagactactaaacagaaagaggaactccaaatggcacttggtgttccgttttgggtttttttttttttttttttttgaggcaaggcctggctctattggcccaagctggagtgcagtggcgcaatcttggcttactgcaatctctgacttccgggctcaagccatcctcccacctcagccttctgagtagctgggactacatacaggcacacacctccacaccgggctaatttttgtattttttgtagagatggggttttgccatgtttcccaggctggtggtgaactcgtgagctccagcaatctgccggcttcggactaccaaagtgctgggattacaggcatgagccactacgcccagccccaaatggcactttgaaagcacctcttaaagaactcaatgccagctggttgcagtggctcacgcctgtaatcccagcactttgggaggccgaggcgggcggatcacgaggtcaggagatcgagaccatcggctaacacggtgaaaccgtctctactaaaaaaaacacaaaaaacttagccaggcatggtggcgggcgcctgtagtcccagctactcgggaggctgaggcaggagaatggtgtgaacctggcaggcagagcttgcagtgagccaagttcacaccactgcactccagcctgggcgacagagcgagactccatctcaataataataataataataattaaagaagttattttacaattcagttagatgaagattttggatacaaaagattatattttatagcagtatgtgattaattttagagctacccctgaaagttgatggaagacgtgtgtgcatttaccaaaatcaattcttgcatacttgtgaaataacaaaatggcaaaccccaccccatgttccatagagcaaaacctgaatgtgtttaattttccacatactttaggctatttcacacctctctgcctcctttcaggctttctgctctttctgaaatgccctttaccacccctctctcctgctaactcttgctcatcttctaagatcagcccaggttcatctgctcaggaaggccatcccaaaacatcttcctattcctagtgtacttcctctgtgctcccacaaaagtctgatatttttttcattatacttatcacaaagtataccctattcaatttttggtcaaattcaaaatacttaatacttataagtgcctattcactactagtcttccctgtaacactacataagcccctaaagtataggcaccgtctctcttcactgctattactcccatgttcagtaaacacatataacacaataaacaaacagaagtacttaaaatatttttataatggatgaacagattatgaacactagagattatttttctactataatccaaattaatgtatgcttaaataattttaactaaagtaacactgtgcataagacatttacttcaatttttgaatcactttatttcaaaggtaatactcttcttaaaatttccatttttacttttaagtcaggaaaaaagtaggctatactcattatttcctttttatttacatttaaaattttgaatcaaacagtccaaaatataccaatcattaaacgagaatctgctggtttgaaaaactgtataatagcttcaatagttcctactcaaagtatacatgacttccaacaaattactgccgtgactttaaaaaaatgtttttcttggccaggcacagtggctcaagcctgtaatcccagcactttgggaggccaaggcaggcagatcacttgagcccaggagtttgagaccagcctggacaacaaagcaaaaccccatctctacaaaaaatacaaaaattagccaggcatagtggcacatgcctgtggtcccagctacttgagcctgggagatggaggttgcaatgagccgagatcactgagttggaaagaataatttcctaactggaagtcagggcgtgctgaaattcaacactgataggagacccaatggagagatctagtaggttactggaaagactgattagagaggtcactggtgctgaagtcaaagtcatagttaaacttaagtgtgaattagatgcctgcaacagctcgatgtcagagtcctcttttagacagatgtgttcttgaacaataactgagtaaagaccaacaataacatggccttcagttagtagtacagcaacactgtctgctgaaaactgtccttacgtatagaaaaaaggtagatttaatgaaagggaaaatgatcaatgagaatatttaaaaatccttattaatcaatgaaattaaatattgccaaagacaaaaaataaaattggtagggctgtcaggaaataaacactctcacactgctgttcatataagccttcctaggctccatttagctaagatatccaaaatctttttaatttacgtgccctctcatgtaacagttccaccttttaagaaatatcttgatgacttaggctgtgagttatacaacctagtaatttttttttgaaaactgaaaagctaaaaacaaccagttaccaatgagctgggaggactgcttgagcctaccaggagttcaagaccagcctgagcaacatagtgagagccagtctcgacaaaagatcaaaaaattagccaggtgaggtggcttgcacttgtagtcccagctactcaggggactgaggtaggaggatcatctgagcccagggaggtcaaggctgtagtgagccatgatcttgccagtggactccagcctaagcgacacagtgagaccttatctcaaaaagaaaaaaaaaaattttcttaacaatagcatttacagtctttacagtcatgtgctgcatatcagtgttctggtccacaatagatgatgatggtgaccaatgcatagatgatagtctcataagattataacactttatttttgctgtaccttttctgtttagacacacgaataggtaaccactgtgttacagtattgactatattattcagcatgttactacatgctatataggtttgtaacccaggagcaacaggctacaccacagagcctaggtgtgtagtaggctataccacctaggtttgtgtaagtatactctatgacgtttgcacaatggcaaaattgcctattaacatgtttcttaagagtgtatccccatccttaaatgacacacgcaatattagatactactattatcaaagcctgcttgttaaatactaatgtcatttctagggtctataaacaacattttcactacactgaatactttgtaagatgtttattttgggatctgttttattaaaaaggaattcctttgacaccttacagtaatcatttccttgtttgaactgggccacttagtttatcacaatcatagtggtctaaaagtctagtataaagtattaaaagaaagatcttgaattttacctaaatatgcgaactacatgcatgaaccttaacaggggcctatattactcattatttttatttgagaatgtcagagaagtgacagggttgtacttaagataacaatgcctactaaaaaattaatttatcaataatttgttgccaagtatcaaagtatggaatatttcacactggatgtttgaaaccaaacgaaaagcacaaagctgaatttactacttactgaagggatagctatgccatccaggcacggtccctctgaatagagcacattgctgagcttacatagagtttagggggtagcatgggattcagggattggcagactttcagaggcttattaacatagttactgacattagattactactagctacattactgggaagttacctaatctctctgtgtctcaatgtctttatttttaaaagaacacagcatggctgtgttccaataaaactttgtttacaaaaacaggcagcaagcttggtttagcctacaggcagtaggtaatcagtttccttctggttcaaaattacagtagcacattttgctatttaaaattatagaagctgttgccttgcttttgagagatatctgtcagccatacgcgacacaaggcacataaactggcggttagcagcagacactttagagctagacagttttgggattctgtgttaattgtgcagcctcgggcaagttacttaaaattactctgagcctcagctctaaggttgttgtgatgggtaagtgaagtaatttatataaagtatttagctctgtatctagtacatagtaagattcaataaacagatgttattacttttataaattatgtgatcctgagtccttggtcaggaacacagtcctgcaatcaacattttttccagcaaagaaataaaatatgctttataatgctctacatgagattgcaattattaggaacccactatagaaaagatggtaataccctaagtcatctttttttttttaatgacaacagc

SEQ ID NO: 93305 - DNA, 289244 bp, Homo sapiens
  misc_feature (1)...(289244): n = A,T,C or G
gcacaatgaccattctttctgtgccactggcaaacaatacaactgaatcactggttaaaatggctatcacaaatagcaacagtgatattacctatgcatacaatgaaagaccaaaaagtttagtctcctgtaaattccagaaatctgttatccattaaaaaattaaccagatgaaatccacagatgccctttatttcatcattgtaatagtgattttcattcttgacatgcagcagtatgaactcaaatatgtaattcatgaaaattagggttgtttcttaaaatattctattcagctctgctggttacaattagtatttgtcaaacagtttttatgctcaagtgaaaaggtaatgataaaacaccaccagaactgctagatgcagtatccctttgctgggtttcatgatatgtctctctggtaaatctgcgcccctagagtaatcagtgcgaatatgaaaatgagcacattatttcactgttarcaggcactgctaagatgaaagcgaaggcatataggcctgctgatgtttttatttttctttttgcaacaattaactgaataagaaacagtatagccaaggtgctagaaatacaaagcttaatcgtagagttttacaacttcatatttcaaatgcatgcagtttatgagaagtgttacactgtcaactcacagctcaaataagatgtcatacttgaccttcattttactaataggaaaactgaggttcacagatgtaaatactaaagaaataaacacacgaaaaagagttcttagtcaaataatgaaggtatggtaggtaacagccactgggatctcaagtgtttgaggatgcatctcattggcaaaataggtactatcataatcccctttccacagatcaaggaattgagattgttaagtaactggtccagggtcatggagcttttaaatcacagagtcaacacttgcaatgtctacctctgtgcttcagtctgatatcagagtgcagaatgctttcaatagtgctattgcctatggccatagttactgttcaagcagttcacaattgccattttgacacagcaaaagcgtagaatagctgttcattcaccttaagccaatgcttctacatgtcgcagccgatttagaccacgggtagaaaatgggtctggtaccaggtgtcaaggctctctgaaagcaccagtcatcatctccatctatgatttatcaactttttgtcctatatttaggaaccaaatgggggatagcagagtaactcgtctttggattcaccaggaaacatcttcagagttcaccactatggtttgctttgtttgcttttttagttctcaaactaaagaacactttggaaagattatttaaaatgcaggtcccagtctccatcctaagtgattctgatttcatgagtatgaggtggagaccaggaatctgaatatttgaaactctaaaacaaaatgtaatggttccttgaccactactctctatcctcttcttggaggcaaccactttagactcttaatacttttgtctggcatttgtacatctctgtaattctccagtgctatcaagataaattacaaagtgtcaggggtctcctaacctacatctcagattggccctagtgtttcacatttgatatcaagcaaatatttgttatggacccactagaggaagaaaaagaacatctatgaagtctttactatgtgcaaggtctttacatgcaacatctgatcattgactacttactactaccctatgaaccaggtattttcctagtcacaggtgttcaagggggtggaggtcagatttgaatccaatccagtttggctgaaaacttaatgcttgttccaggaaagcacagtgcagaactctggtagaatctagattccctgttctcaaagagattcctatttgggggaggttggagggtggaagcggggagtatgaaatagggagaaatcttacgaggaactctataatgcaattcattccacatatgtttattgattactttttctaatcaaagtccagtgctagacactggaggtgctacataaatggttctctttcttccttctgtcccttctcccctaccaccttcctgcagagaaggcagaatgagataatacgagtaaagacactgaggaattgctgatgaaagatttggaccccagaaccaaggatgagacagtcttccaattcagacaggaaaactcttaggaggctgctaaccctggaaagaccccaagttacgcaccagtagatagtaaacaaatcaaagaataccaaatgtacttggatgacaatcagaaagcctctcccgactccactttcaaaaatccccccataatagaataatcgcatcttaaaagaacactcatcaatcaaagacagtcttaagagtctctcctttatctctataaaactaacacttctttcaaacgacttctagtctcatttggaaggaaagtgatagtagccaactcccttagcatagtaacgtctgaataaacagcctttgattaattctataggtggtcttcctccttttggcaaaatgttcacaagctctcaccaagtttaaacgttcactctcaaacattagcaagtctttgctctatcccggcggacccagtaggggtaatgatgaacaatatggaaactcaaatccagttttgtcaagaggagggtgctaagagtgattggagtccagctttgggaaatttgatcccaagctgtgtcacccttggcaagttacttgaccttagagtcatgtaaatgtcatgtggaactctgtggccaagtttctctctggcaaaatgggaataatagtaggaccccatttgcagggctcctgtgaagattaaatgactgaaaacagaggcagcagagtgtatgtatcaggaaagagcatcggtttgccatttaataaaaaagaatccatgagtccacagtgatacaagtgaataaaacaattcaccgacgaatagtgttacagtgaactaaatatggcctaaggaggactcggtacttctatatttgagtccttgtggacgaactgcaacctagcttaataggtagacaagattgaaaacctaacttagaagtatggacctaaaacaacagctaagtcttggcaatcccagtggccatattttaaccatttatacattgctgagtgttcaaactgtgtaaggcaaatgccaagctgtaaccaatccagctgttctgtacctcacttctgatttctgtaagtcatttcccttttttcctctataaatcttcttccaccacgtggctgcgctggagtctctgtgaatccactgtgattctgggagctgcccgattggcgaaccgttcattgctcaattaaactcctttacatttaatttagctgaagtttttctttcatcaatggagatgatggaaagagtgcagtttttctgagtagaatacagactaataaatgtaggatggagttagaccttgccactttgccaccatcgtgacaataattgatttaaacaatcatcatcatccttatcatcaaaagatgctacatctagtgggtaaaactatgtctcgaaatgggctagaaattatattaaaataaaaatcctcagctcccccactttccaaagagagagattaggaaagaagctagtagcaacagctgtctacttatgtcacattgtaccttttttcatgatcatatgctcaagaatgagtaaggttaaaaaaaaaaatctaaaatagtgcttaatttgggggtgggtggaagggatgtgaatctcatctcttatcagacctgccacctctggcaagttacttaacctctgtgcacctcagttttctcttctgcaaaatggggattgtacacttctactcatttaaaactttgctatgaagactaaacaagtttatatttgtctaatgcttggcacacattcagtaactttgctgttgtttttattatatgcacattgcttagactcgcgtaaactctgtgaaagggaaataatcttgggactcccaaatcactaaggtaaagggaaaagttaaggtgggaactgcttagggcaaacctgcctcccattctattcaaagtcatccctctgctcacagagatagacgcacagctgattgcttcctttggaaaggccaatcagaaacccaaaagaatgcaaccctttgtgtcttatctacccataacctagaagcccctccttgcttccagttgtctcgcttttctggaccaaaccaatgtacattttacatatattgatgtctcatatctccctaaaatgtataaaaccaagctgtgtcctccaccacaccttgggcacatgtcaggacctcctgaggctgtgtcacaggcacgtgtccttaactgtggccaaataaacttcttaaattgattgagacctgtgtcaggtatttggggttcacagctccaaatgaatgttgcttttatcactctgattactgggcttaaaatcctccaatagctttgtgtccggaattggttccttcccgtgggttcttaatcgtctcgctgacttccagaatgaaactgcagaccctcgcggtaaagatggcgtgaccagaatttgttcctgcagatgttcaaatgtatctggggtttcttccttccggtgggttcgtggtctcgctgacttcaggagtgaagccgcagacttcacagtgagtgttacagctcttaaaggtggcccgtccggagttgtttgttcctgcctgtgggttcgtggtctcgctgacttcacgaatgaagctgcagacctttgcagtgagtgttacagccctcgaaggtggggcatacggagttgttcattcctcccagtgggttcgcagtctccctgacctcaggagtgaaactgcaaacctttgtggtgagtgttatagctcataaggatagtgcggacccaaacagtgaacagcagcaagagctactgcaaaaagcaaaagcacaaagcaaccacaacctggaaggagaccccaactaggggccactactggcgccggtgtccagcttttattcccttatttggccccaccctcatcctgctgattggtccattttacagagtgccaattggtccattttacagagtgctgattggtccctttttaaagagtgctgattggtgcatttacaaacgtttagctagacacagagcgctgattggtgcgtttttacagagtgccgattggtgtgtttacaaacctttagccagacacagagcactgattggtgcatttacaatcctttagctaacagaaaagttctccaagtccccacctgattagctagacacagagggctggctggtgtatttacaaacctttagctagacacagagcgctgaytggtgcatttacaatcatttagctagacagagaagttctccaagtccccaaccgacccacccggcttcatctctcagctttacattgattttaggttaaggatagaacaaaacaaaacacccacaactccttaagggatggagagcctccaatggcctctccttgactcacctgaagccctgggctgcaggaacctcacctgtctctattcgttaaagtctcagctcaaacaccactgtcccagataggcctcgtgaccgcaggactagaccacggttctctgcggagggcgtcagctccgtgagccacccttccagcacccactgccatggcgaatatttgcttgtttggccatccagggactgtttgagccccaagaccgcagggctcggggtctgtctttgctcaggacgataacctggggactggacagtaggccctcaggccttgggaccgctcaaagtgaaccggggccgggtgggggacccagggctctgcagccttaagaacgcctgtgcccccgggacrcaggggtcaggcccggcccggcccagaccgcctctgcctcctcctccttttcctccccgcgcccgcttctcctctgacccctcctcccgctgctcctcctccgcctccttcccctgcccgcgcccgccctactgccccgtgccgagtttcctgtttaagatggcgtcccccgtagcagcgcaggccgggaagcttctgcgagccctagcgctgcggccccgcttcctggcggccgggtcccaggtgagcgtgggggcaggagctgcgggcgccagcagcggcgccggcctgcccgggcttccctcgccccctgctactcttggtctccgcctgaccccctgcgcggcccctcgggcgccccacttcgggaggtgacgyggcgccgggtccaggcgcagcagggaaccccgctccagtgtggggcaggggcggcgcggcggcagccccgggtgcctcggggtatgagcgacccaacgcactagagtctccgctgtctgcccgcgcagactcatggcgaaggcgctgaagcaggcgctggacgcaagtttaagaaaagtttcttggaccgggttttggagccctgaggttttattgtcagctctactaattctgcttttcaaacttctggcactaaccctgagcacgtttagaccacgtgataaacatgcctggaaacccgtttcagcccaactaggaactcaccccctagggtgaacttcctgcaggctacctgcttttgcagacttttaatgtgcctgagttggtcaaatccgtgggtcaaggagaaaaatgggaaacgatctttctcctctttccaatgaaaaatcaggsctgtcactaaaacgcattagaccattgaccctgtccatgtcctccttkttgatggagaatgaaatcaaagagggtcagtggtgggctggatagcgattggaacttggcctctagcagatttttaccttctgcagatggcaagcgttaaaatagtcagaaggacttcaggaaagttttgagttggtgatgactcttgtagaaatcactcaaccactgaactggttagtctccgtagaytatctctcttcccttttaaagaaagcacagtctgggattcagccacagcagagttaatgaccttgcctatttccccatttttaattgatgagaggcaaattatcactcatacaattttaaccaggatgtgcatagtatagttttttagaaaatttaaaaaatagtgattaatgattttttgagttcctctaaactttgrttatgacatctgtgagctatttttacccctctcctttcatttcctgcctccccatttctctgttattgttaatgtaaatttaaaaggtgctaatacttactactgtaatattcttaataggtgcttgacagtatagtgaggtagcaaaaggaatggcagttttgtctaattaaaactcactaataactgttgtaatagagtaaggagaatagctctaggagatgaagtcctattcattatttaartgttagaaaaaacaagaactagggtgcttaccatgagtgtagacttgaattgatgagaaacatggggcccagggcagtgaaaactcatgaattgtacagagaaactgaaaatgcagagtgtttagctgaaatatgtgaagcctacttcyctaaccaagaaataagaggctgaacgcaacacaggagaaaatctggttggggagagatactcttggtttgtcaagaaaactgggtaaaaagatctgttagcacgccccatctggttactgtgatttacatatttgtggatgatgtgtttttctgtaaattcttagaaggtaaaagtaggtttttttaaagatagaaaggtacacagtgtccaagaactggaaatggacattagcaatcatttagtccagccagctcatttcatgggtagagaaattgaggcctaaagaagttcaatgacatattcaacgatacagtgagagtttgtggcattccagagtaaaggcttacctttacgtttccgttacaccatgctgtttcctggtgagtatatacttcctcatgaaaatatattatatcaacatgcaaattaatctgcatgccagtagtaactatataacatccaagtcattagcaccactgacacatttttatttttttctttatgaccatcttagaattgtccataaaaatggtgagtattgctattttcaaattcttgggtgcttcctatgatctgtttcatgtacactgatttgatattacgtttccatagtcccttgcccgtggcagacattgcagttaaacatggcccacttctctcatcatacttaagaatcctcaccaagtgtctcagaaatctgttgccactcttggcccagacctattttataccaccaggccttgtgaaaaactgttgtctgtacagaaataaaagacccagtttctgcttagagaaataactttaactggtctctcaaagatacccatagaatgacattttgtctacctcctccctatggttaaatttaacatttgacacatattcctgatgcttagtgtcattgaagtttttttttttttttcacctttgctgttagctttactgttttgacttttgattgatagtacgtccttaaagggtccactttagtcatttcttatttttcatatagtttttattcagcccataccatttggcaggactgttgtaggccctggggtttggggatggtgaatgaggcaggcagagtctttggccacgtgatactttattttaatggaggtgggagagagtgagccagtacacatataaccaataatgaaaatgatttcagccaatgacagattctgtgaagaaaatcagtcagggtcatgggatggagaatggattgcttcacagcagggtagtttagactggatgatcagaggagacctatttgatatggtgtgtttttgattggcataattttttaaactgaaatataagacatactgaaaaatgaacaattacaaatgaacaacttgatgaattttcataaactgaatgcaaacccagctaactaggtacagatgaagaaaacgatcatttaacaacaacccagaggccccctggtgctcctgcctgtcactacctccaccctacaaagggtcaccagtcccctgacttataacgctggttttgttcagttttgtactttaggtgaaattatatgtaggcatacacatacttcacattgctcagcattatatgtaagtgatcctggagatggcctttttgacatatgagctgagacctgagcgatgaaaggtagccagctaggtgagactaaggggaagagtgtgttaggcagagcagacagcaagtgcaaagactgagatgagaatgagctgggcatgtctaggtaattagagggggaaagtggtagtagactaggtctgagaggaagacaagggccaaatcatgtggagacctgcagggtctgctaaggaggtttcaggggtttaaaccatacagaggctgaatcccagtcctggcagccaaagcacaggcatgtaattaatgtactgtacacgccccctgttataaatctaagttaggctggctttgaaacttttagcagagtggtgttcagtgaatttagcagtaagggtctaaccatggttagaagtctttccaaagacctaaatcctggtagacaggggccatgttgctgtgtccatatagccaagtgaaaagtgtgtgcagtacttggtggtgtaatatagccaggcactgccatggtgggcaagatatgagtacatactgccagtcaagtcttaggggaaatgttggctgagggcactgagtttgaaatggttcttaagtctaagcacagttttgttgtctcttagggtatttcccctctctttggctagtggaagttcatggagctctcttgtaggagaagcactgcctttcaggtctccaattttattttactttttttttgaaagagagtctcactctcacccaggctggagtgcggtggcctgatcttggctcactacaacctcctcctcctgggtacaagcgattctcctgcctcggcttcctgagtagctggtaccacagatgcacgccaccatgcctggctgatttttgtatttttagtagagatggggtttcgccatgttggtcaggtttgtctcaaactcctgacctcaagtgatctgcccccttcagcctcccaaagtgttgggattacagatgtgggccactgtgcctggccaggcctcctattttagaatccttgttgtatgttttctgtgcagcccagagcttctgtccagggacttacagaggaatgtatgttgtcaaagaaactgcttaaacccatgcccctgctgttgtatactcagaaagaatggctccagcctaattttctgcctttacggaagtgggaggagaaagatgaatgcatgacttttgtaagtgaaggactaaaggttatgggcaagttcttatcagctaaatgaggctgtggcggctgcattggaagttgtgacttacctgtatctccctcttgcctaggagaataaatatttgacttttttctttttttaaaatgaagtacagctgcaatttctgcttttagaaaagggaatccatctcaaataatttagatgctaaactattgaccttccttgtggggaagaccgttaagtgatagctttgtcctaaattggttttgtttgctgtaaataaggcatttcttttatgggtgagtgattgagtgcacagacccacagtagtgagaacattcctgccctcgtaccctggtctagttctgcaggcgcaaagcccagaaagtcactgaaatatggcatatttgggggaggaaaagaaattacataagtaacctcagatcatttgtccttcagctgtctttaccactcaatctgcaattgtcacttgatgcatcactttctgttacttgatggaaaagttttactgaagaacttgagagatttggaaatatttgaacaaatgataatatcagtacactaatgaaatttggagattaatcttgagagtttgtgaggaaggtggaggtgatgaagaaggcagtccaggtgaattcatgcagaggcagaggtgagagaacagggggagagtagttgtagtgagcagtttagtatggagaagggagakgtggatagcagaagttgagggacaatggcactttygggtatacaaagaagtctaaatggggcttcagaaagcccagaattcagcagggaataaaattaacccccacaactgaaaaatcaaacaaatatcatttatgtagcaaatattttctgaatgcttattacagctcattctttatagaatgttgggcagataaatatgactgagtgaatgcagacaggaataagaaacacagctcctaccttcagagggcacagaggtacaactggcctataaacctgtagttatactaaaacatagtrggtactgcaattgagctgtgttcttagccttctaagatactgttggcctctgtcaaccacttaccctgtgtctgcagaactattccctctgatcattcattgcctgatctctgtcttcatcagctttctgattcaacgttgattcttcagataggctttttcctaattaccttacccagccctgcctttccagggattattctctgtacccttatctgctttgttctttataacacttgactgtacctggtagtgttatttgttyattggccrtcttccccgctctcctacaagtttaagaaygtaagctccacaaaggcaaagtgatacagcttaatgtaacagcgtgagtgattccccagctggccggagttggtattcagtaagcatttgtggtctcagtcaatgagtagggtgcacagagaagggagagggaggtaaggaacaggagaagttgagggatgatgtggctcatttcagcaaatgaggaagaaggaaggggctatagaaatcctagttgtgaaagggtcctcataatcatagaactgttccttgggcatgtagtatataacaaggctgcgtgaagtaatctccacacattatttctttaacccttacaacatcactgcaggggagatttcacagtctccatgttttatagaagcagtcagaggcatagagaggccctatagtcatttgcttaaaatcacagtgccagggagtcacccgcctcatgctgataaaggacttatgctgttaaattattaagctctgtcactgaaagatcctagttgggctgaactaggcagttaaactgattgcttacctttccccatctttttgcccttgagtgacactcgcctttggtcatttggacttgtgctgatgaaggtgtgctgatcaacttggcatggttgccctttctggactcttatccaccttcctctctctctggcttcagggtcttgtcaacagagtagtagggagattaaagacacgaagtctgggttcaaattcaacggagttcaaattcttatgggatctcccatgttctttctctgcaacctggagcaaattattgaacctgactgagcctcaatttactgttacttgaaaaggggatcatttgcacagatagttacaaagattaaataagatgatatttragacatttggcatatgacccgatggtgggcccaggatgattatttctcttgcactgaatttgaagctaaattcgctggtctttttaaaaggctttattgagctagaataattttgctttcccagattcagtaagcatttatcatgtgctgccatctcaggrttagtcactggcttggtgcttccatacattttatttcacttcatccttgcagtagccatgtgaaataggagttattgttcccagcttacttctggggaatctgaggctcagaggggtgaagatctgcctcccgggctctgattatcttcaggattycacagttgggatgaatgtctggtgaggcctgaggtggcagtggggaggagctcatggggagcttaattgtaccatcctggttattactcatttcacaaacatttacatgtctcagtgttgacttagtagtgacgactgctggacctcgtgcatcaaagatttgaggtgagggaacacttaaagaattggcagtagccacagcatgaaccaacggccaactggacatgactttcactgtgtgcttagcacaaactactgccctcagcgtttcaagaatgctggagaaattgtgaaatgtcattgcctttgcagagtgggctttgggggatggtgttggaggatggagtttcctggtattctgggttcagactttgaccagtgtactgagtatggtcagcttttaccctttctagaaatgattccaaaagaataggacttaggcagtagccataaatgcatagatttctaacatttacctttgaattttatttttattttaaaattcgagggatttgacataatatatgaattgttaatggagacatggcaaagcacaaggcatggtttgtgtaagtttgggtcctgtgggttggagtggggggactagcatcttttttctgctcccatccatttctccctgtgcttgctgtatttccatttgtgggctgtcttagtcccagagttgtgacttgagagccctaaggaggttcaggagggctgccttgtagagtttacggtgagaaatgaggccagagacaagagcaaggacaagatcgctgatcctggtaggcctggtaatgaagctaagcttgttcttgaggagggcaatagggagccattgaagggttttagacagtgaagtggcaagggcagtttaatgcgtagagtactctttctggatatagtgtggagagggttggagaaatgcaagaatggagatcatttgggcgactttggcatcgattcaatgctgtgagtcattatgccaggatactagacgtacaccgtgagtggaatcagaytgcccgggtttaactcttgccttcagcactccatagctttgtgatcttgtgacaattacttatatttctttgtaagataccttttttttttctttttcacatttcagtgtctctgaaagctgaatttatttatttttatttatattttttcagacagagtctcactctcttgcccaggcttgagtgcagtggtgagwtcttggctcactgcamcctccatcttccaggttcaagtgattctcctgactcagcctcccaagtagctggaattacaggtgtacaccaccacacctagctaatttttgtatttttagtagagatggagtttcaccatgttggccaggcttgtcttsaactcctgacctcaggtggtccacccacctggcctcacaaagtgctgggattaaggcgtgagccaccgtgcccggccaaactttattgtttcgatattgtctggttttaagtaagggatccacccccatcttattgtctgtggctgaagtcgggaggcctgtggagaggaacagcaccatgctttcctccctgcctgaagcagggctcagggctctgggtacagtgtctggggagtggcctgatccatttagggcaccatattctcccctcccctcccstctcctcccctcccctcccctgccctcccctccattcccctcccttccccgtgcccacagcattgattggcttgcccacagcattgaatrgaagtagggatcagcattatagctttaccagaaaatattaaggttttctccttatcaatggagatctcttcacatttttataaggaactattttttatcctttgctttttgtccccagcttctgcttgtactctcttacctgttgttgagatgctrtgctataccatctggacttgaaggacttatttgagttagtaagtcctttcctacctttgaaagaaagggggaaaaccagttctcataggcattctcattccagcctgagggcttacgtgggcctttaataagtaatagaaagtggagagttatgaattatttttgattaagggaataaactattaatgatgagtgtttctttgttaagattcagggctcttttaaagtgatgtatcattaaaattgaaagccaacaatacagggaaaaaaggaatttttcagcttttaacttttttataattaccatggaaaaaaatatacgtgctatttggcacattagaaaaactaagtaaattttgagatggtgaagttgtaaacagattatcctcatgaattttaaaatgatgcagaaggactgaatggctgagtgttgaataggatggttggaaatggaggcagaaggcttgtgacttgtcctaagcgagggtgggcctgaggacgcttttaggattggagtcccacgtccaaaactcacagcatagcatgttgtgagtgtctaatggatcctttcttttttgtttgatatgagtatatgatgaggcttttatgaccagtataaaatagcttttatgactatattttgtataaaatataattttaatatgtggggagacttacagagttaaactttataggaagatgagagaaaaatactaaattttctttatgttaaagggccccaagtgagaatatttagtagtggtatttcattttgcttaatattggcagtatatcagtaatgttacgcttatggtaagccaagagtcatagtgttcctttcttgaagatgtgttgtcatgtgctacaggatgaatctatttcctcctgcatacttcagagtccttcttttcaggtcagtggaatatttttcctggaattttgatgttaagcaacattgtcataatttaggtaaaattaattattgacacaaagcagtgttttctgattgacttttagggtgttgagggaggtggcaaaagaattgcttttttgattaaaaatttggatcattaagttccttttttgtctctgaaaccttgtttttgatttccaaagcttctaaagatactaaaaaatatgaatgtgtatattctttaatttaaaatttttattatatatttattattgtagtaaaatatacatgacataaaattgaccattttaaccatttttgccatttttatcattttgccattttaaccatactcggrcattgttatatattcatattgttatgcagccatcaccatcatccatttcctgaacttattcatcctcccctactaaaactctgtacctattcaatgctaactcccccatctccccttcccctagtccctgccaaccactgttctacttttgatctctgtgaatttgcctactctaggaaccttatctaaaaagattcatactatagctattcttttatgactggcttatttcatttarcataatgtcttcaaagttcatctgtgttgcagcatgtgcaaaaatttscttccttattaggctgaataatattccatgatatgtgtatatatcttttttttaatccattaatttgtcggtggacacttgggttgctttccctttttggctatgtgaataatgctgctatgaacatgagtgttccgtggaggtatacctyatgttaacattcacctgagtagaaatgttgtatcatatgtagcttgggctacattttcagtttcccatgtccaactaaaatgtctattaagaaatatctttcctgataatgtttctgttgtatattcatattcattgattctttcagtgggtcaaatgcagcacaggtccactattaggcccactattaggcggtggctcacgcctgtaatcccagcactttgtgaggcccaggtgggtggatcacctgaggtcaggagttgaagacaagcctggccaacatggtgaaactccatctctactaaaaatacaaaaattagccaggtatgatggtgtacacctgtaattccagctacttgggaggctgagtcaggagaatcagttgaacctgggaggcggaggttgcagatggtgggtttgtaggaagcttggggatatgagacagttgctgcctttaaggaacctacagtctcatttgttggagactgatgagaaatgggcaattacagtgagatgtgtttggtgttgtgagagcaccccagccctctggggatactgtaagtcctcactaaagacattccaatttgttctctgcttccatacccattccagcactgaatgtaggaagaggataagaagttaattatacagccttggaggacagaaatggtttcaccataaagcaaaccagttttctataggctaattgatgtaaacaagagttttaagttcagcatacttcaggttacagaaacatcatcaaacttccaaagaccaaaaacaccgctaatattaaacagtgaattaaatgtaagctctacttacatttcaaaaagattaataaaaacaagtaagataatgatttacccagtttctggtgataagtgagtgatggcggtcgtagtcgttgtagtttaagtcacagaataaatgtttgcaaagtgaaaatggtagggagcacctcctttcaccacaaagttcagaaacaaacacaaacactgagtacttttggaccacgttgtttagtgtgtttktatgattattgtagacttgatgaatgtttatttgacaatcatttacattcattcattttattccagttcsgtgtcacaggtggcagatgcccatcccagtagctcagggagcaaggcaggaacctgtttgccaggaaccaggatgccattcccttgcagggtgccatctctcwcacacacacacacacacacacacacacacacagagtccttttctgttggacttgcctgtacaatggctattaatggtgtctggataacacacacacacacagagtccttttctgctggacttgcctgtacaatggctattaatggtgtctggataacctgaagtgaagcacatgtacaaatagacacctgatgtttatcaagcacattctgtgggccaggtttggtgctgtgcacttgaggaggattatcatgttgagtattcatggcagccctaggaggaaggcattattatagccattgctaagctcattttattttctttacttatttatgtagagatggggtcttgttgtgtcatccaggctggagtgcagtggcaagatcgtataacagctcactgcatccttgaacttctgggcacaatgaatcctctgttctcagcctccagattagctgggactacaggtgcatgccactatgcctggccaattttttttttttaaattttgtagagacaaggtcttgctttgttgcccaggttggtctccaacttgtggcctcaagtgatcctcccacctcagcctcctaaagtgctgagattacgggtgtgagccaccatgcctagctactaagcccattttaaagagtaacaaactgcggctcagagatcttaaacaacttccttgttgtcacagctgttgccctgcacatctcctcaggatgccactcacgtgggtccactgaattatgcctgataatgggtggaattgtgtcccccacaaaattcctatgttgaaatctaaccttcagtatctcagaatgtgacctaatgtaatttgattttctctgtaaagactctatctttaaaggagatagaaggtaagagatagatagaggaaatcaagttaaaatgaggtcgttagggagggccctaattcaatatgattggtgtctttataaaaagagaaaawttatactcgggcacacacgcccagggagaaagccatgtgaagatgaaagtagtgatgcttttgcaagccaagaacaccaaagattgcctgtgaaccactggaagctaggagagaggcatggaccagattctccctcacagccctcagaagaaaccaacccttctgataccttgatctcagactttaagcctcctaaactgcaagagaatacctttctgtagtttcagccacccagtatgtggtactttgtatgccagtcctaggatacccagtatgtggtactttgtacgccagtcctaggatactaatacacacatcaatgaactttttgtggtctgtacatttgtgaagaatgagagtgacaaagtcatcctagtattattatgaaaatagttttgacctcacagacctccagaaccaccctgcattgagacaacgtgggtgtggttgatttttttgatcaaacacatctgaaattgtaggttggtgcaaaagtaattgcggtttttgaaatttgtaactttgcaccaacctaatatgtgaccagatgagcctttgttttttcaccttggcacttctggagtctctgaacttttgctggagatgcatgcttttctggctgcttggagagctagcccatggaccactgccatgagttcttttgctttatgcttccagcacttgttttccaactaaaacattgtttcctacaccttatttgctggtgttggatttgagaagctctgaccatttctaygagtgaaatcaacttaaagacagacgagttgcaattgagaagaatatcccaaggaaaggggcacaggtttattgtcatttcccaaataggagctctagaaatattttaaacaatagcaagagattggaataaatgcagagcsttgttcagatgtatcaattttggtatttttttattttgattttaagtaaatccagcaaacctcattattatttttaatctcacttagtttttaaccattctctttatccagacagctcacccaaggttaaacaaaaacactaacattttactacctatgttccaggccttttgaaaaacagttttgtaacttaattcagctgatctttggtaatcagaagctaacaccaagcactgtttttcttcagcagtctaaagttgaaatttaagaacaatcagcatgcaatcaaaagctgattgtaaatgaacaataatgaacataaaagtgaaatcacttctgagggttctaatgaaagaaaaaaaggagtaatagcagtagttgaaaaaggagcatgataaaaagtgggtgcggttatgccaataggcaaatagtggtgaaaattagccagcaataatattccatggaatgctcaacgagttttggggagaatggggaaaacaaatgttataagagagtaaaaaatctatataaatgtgtagatttactgctgtagatgaagtcatctaggaagaatcgtagtggatttttaggagtgaatcacatctctgttctagatgcaggcagatggtatgcagagaaaaggttcagttgtgcctgtttctggcccactgatcaacagcatggctttagggaagagactcagtttccttactaaactctgtttaacattcattgtacatctatcatgtatcagggattatgctgtgtgccagatacatgcttaactttgcaaaatggctgttgaaacagtgctgcccagagcacgggacacatccattggcagtacacgagatgagtttaggtaacgcagggatgcrgcatccaataccagtgagtcacatagtgctgaattcattgttactgtctttggaaccttaggattttgtcacggagaaattttcagttttgtgcttgtgtgcttttaagatcttcagcttaggacttyatacctcaaataatcagaattgaatcccttttattttttaattatgctatctccttctacttaaacaaacagtataggtagtgctctaaagttttctctatctttaagttaaaataaacatcataaataaactgatactggtattagtgttctctagatgtagcaagaattgtgtatgagtgattcttgtttggggaaccttggaccatagtaacccyaagacttttcttattgttccctggtcacacatcctgagaaaaggattcatgtgaaagtggcttttcggggaggcattctcaggaaaaactcaaaggggtttagagaagttgaagggaaggaggctgagaagggtgtgttattaaactgaatcccaaagagggtgactttgcttaattccacaggacagctatggaaactgtgtaggttacacctcagagttgtagttaggggcaagagagttgaagtatttatataccctcttcaaggttctttaagggcatgttgtcttcagcatcttaagacaaagacctgccggggctgctcttgggagtaagagtgcacagtgagtctgtataaaaatggtggcgcgatctgaggccatgcggatggagcactgagagcatctgctgcaaggctcttccatggctaatgtgacatgtaagccacttactagctttgtgcctcggacaactggtttaacacttcggtgcctcatctagggtaatacctcttcagggctttttgtgatgtttaagtatcaatatcattgacttcacatttttcttctaaatctattcactattaaaaatatttaaatccacatttgagcccctccataagtaatagtgtccatgaaagtatgggcttggtaaattactgatacatatacatttttttcgaatgtacattacaataaattacacagaagaaagccttgacagagctttctttaaaaacatgccaggaactattatccgttaactgaagccagctcttcttttctctggacacatggctgtactggatctcccagcttgccttgcagctggacaaggccacggaatagctctagatagttaatctagataatttttttttcttattttcttaaacttctatgagggaggaagttcttcctataaccttcccattagacttcctctaggttatcactgctggggattaggtcatatgctcattgctgagccagttattggcaaaaattggaaatctccattattggctaagctgctgaatagtttagaaaaagatactggcgagtcacttacaacatccgctacaattgggttactgcttagtgaccaagataggatttgaacacccacctgtcagactcccaagtctacgtgatttcttctgtgccttacagcctttctaaatctgtctgcttgctataaaggctttccattgaattgatttatttctggaattagactttgatgaccagtaattccaaattatgttcgattgtccacttgctggctttctttatccaccaaacttgcctgtctctcagctgtagggcatctcctgatccatggagctcctaggtaaggcaaaagaactgtgtttgcattcagctgtgtgctgccctatagcagtatgaacagcttcacactgtcaactaggaggtgaaatgccaagtgtagctacaatctggaaatgtgttgatgtatatcagcttggaaacaatgcagggggcaggttttgggcctttgcagtggagagaccagtccagagagggccactaagtgctaggcattccaatggcattttctctttgacactcagcagcaatctgtaacataggtactatcattatcattatctatcatttatcttcattttacacaagaggaaactgaagcttagagaggttgagaagtttgtctaaactcatccaacttgtaaataatagagtctgaatttgaattcacagctgtgagacttagaagcttacactcttctttaaagctttttaaaattgtgcaatgtagcataaaatactgaaaaaatacttatcatatatgtagtttaacatgtaattataaagtaaacagcacttcctaggacctaagtagaaatttactagtacttaagaaaatctccctctgttcactctttttttgtaacttcatgtctaattttaatggttgtcatttagttgggaaacttgccctctgtaattatcctgtttaactgtcctcttatagcaagtcataatgtggtataggagaaagctacatggatcaaaagttactggcatggatgctccctttctgaactggatttaccttgggcaagtcatctctctccaaaaaagaaaggcagagtaccagataacttacggaaacgtcaaccaccattatcctgataaagaactggttccctggagcatgaagatcaggttggagggcagcctttgcttgcttttttctttgttaatttagtagtgtatttatataaacccttaacaatttcagtgacagacttcactcattttgaatagcaagtattttgttgaattatgtaagtcagtaaattgccctcacactttattgattaaaatgtcctagcttttgaaggactcacaagtayaattttcctgagacagactgtactttcgttttttaaaatccaccgttgaggactgtgcatgataaagtggaagcaagtggttattaattttttattgaaatcttctgaataagtgttttctcctggttggtttcaaaaggagtcatattcctgaatctaattagaggcagttcatatactgtgggcttattaagattcaaggcacttttttattttagcctgtctgatatccctttttaatttcacttaaatttgaattactctaaacatcatctgggcatattgaagaaactcagtaatcttaataatgatgatgttgacaaatctgtccttattcttctcaagtcctataaccttatacttgattctggcttgtgaatacctgagactgagctgcccctctctcttcctgtcgtagacatcaataatcactcatgatgctgttctgagtgattattgatgtctaccatgacaaagccttgaggtcttactttctacagctccctgggcagccatttccagctggtcagagttaagaggctctgccatccctggtctggatgttgtctgttttgggtctgaacgtttatatcctccaccaggatctctgagtaagttacattatcagctgattctaaaaaaaaaaaaaagatactgccagccaggcatggtggctcacacctgtaatctcagaactttgggaggccgaggtgggcagatcacgaggtcaggagattaagaccatcttggctaacacggtgaaaccccgtctctactaaaaatagaaaaaaaattagccaggtggctgggtgcagtggctcacgcctgtaatcccagcactttgggaggccgaggcaggtggatcacgaggtcaggagatcgagaccatcctggctaacacggtgaaaccccgtctctactaaaaacacaaaaaattagccgggtgcagtggcgggcgcctgtagtcccagctactcrggaggctgaggcaggagaatggaatgaacccgggaggcagagcttgcagtgagccgagatcctgccactgcactccagtctgggtgacagagcaagactctgtctcaaaaaaaaaaaaaaaaaggattctgccttggtgtccattttcctacctctttgaatgagaatcttctccttttctagaccctttctattaccatactttgtgtgtgttttcatagctctcaggctgtctgcatagtttgttcatcccaaacaagctcctggacttattctttggccagtctttacccatttctttggagtttctgcttggaagtgacttcctctcctaaggtgaagactctttgtcatttaataggatgaactttcaaagtattgtccctgttcatgagttagtgttccctggctrtgtggaatagaaaagaacatctccgcttgagcttgaatccctctggaatatgtgtcattgacagatcctatttcctgtgtgaccatgtaagctcttaacagactgggctttgcatagctagtaactatctgctttggagaaaatataaaacaagtacttgaaggttttggaaagtgccaaaggctgggagaccctggaggggagtcgaaactggaaggaggggagttgaaatgggaaacaaaaggcctgctttgagtttccagtttttacttccagcttttacttccagctttttggtcttgatgacagggtgcaatggtggctaaactccrgtagaaaacctgtagtctttttgcactggagaactgaaggacagagttcaggatccctaagcagcgggaaactgggggtgggagggtgtctcagaaaggagagagtcagagaggaggagtcctggattctgtgtataaactgaccaaatcagaaggtrtttcatgaacaacacatgcataaggctgactgtaagtggcccagctaaagtaaaaaagaactaaagtaagacttgagctgctgcccaagagacagagtttgcagtttgagtctgaatatgtgtcacccatgaatcactcttcactgggatctcagcttttttcacttatgtctgatacacacaatgtaaatattctcttttcccactgttcagttgcctgtctcagtttcatatgcttagttcacagttgttgggctttgaaaggcaggcaagaggtctgaaaaactgataaccagtgcaaagcctcagccaaggcaggaatttgatatgaatttttaagggtgatggttctgccacagttcctacctcttttgcacaattactggtgtgtcatgaagattttcgtcatgtatttgaatgtcctaggtcacttcatgttgttttgctggctcttcatgatgatgttggaagcagtgttgaatatcgcaaaaatcatagtataatagatgagaatagctgatattttctgagctctccttacgtgacagatgccctaagcactttactcatcctattctcctagcaatcctgtttattattcttgttttacagttgaggattaaaggcacagagtggttgaatgcacagctattaagtagtaaagccaggaactaataggaaaaggaagattggttagtatgacatatacacacgtgcacattctcaaacatgtggttagaattggaagacaggtattgtctgcactgagtttcagcagattcctgaggaagataaatatgaaaaataccattttcatgatactgtgccctgtcaagtttactggcatgaacttggcagggaaaagactaagaaatactaatgagagcccaaagattgaatgaacctttagttaaagagataaatagtgactgagtagtttgcttatccagatgagttagattctgtaggcaatggtttactgactcttgtagctagaatactgctgaaattttcattcatattgaggagcaaattattaagtatagttaattagaatgaaatgatgaaaataaactttataagataactaatagttgactttgtttgcaccagaattcttgaaatctgctccaaaagaagcatatactcttaaaaaaattttttttaaattttaatataattttacaaattgagagtgggtcttgctcaagcaatcctcctgcctcggcctcccaaagtgctgggattataggtgtgagccactgtgcccagctgaagagtcctacagactcttgatagtaaccttggtgatggtagtggtcctggtgaagagttagcaaaggaaagagaattccctgcctgttgtggcaccaaagagctttttacaagacactgagcactgcaatatactggctatgaagaagctagacgatgcaggatcatgtggatacgaaaggaagttgtagcattaggcttagataatatatggagggtgtctacagtggggacatgatgtttcagctctgttctgtattcaaccacatctgaaaattttagttttctgaacaccatggttataaaatgaatactttattccaggaatggagtagtcttatactggattaacagataacagataaaacagtgataacttgtggacaaaatatataaaatataagaaatattttaaaaatattaaaatattttaaagtcttggagtgtaactaaaagtaggcagaaagcggagaggattccatccttgaaggaaaggaaccacactgagcgagacccacattgacatggcttttcctctgagggcccttcatagcccacagcgtgcattaaataactgtccattaaaatgtttctgcctaacaaagttttgttttattattgccaggtaaacttattgaacatagacattgacaggaagcattgttctttaactggcatttactacaactaggtattttcctggcatttcattatggaatttttatttaatttcatccaaacctggggagcaaatcactgtaattatgcctgttacattattttataggctatagaacatgaagaaatcaaatacagaatgaaggagtcagggtataataactctgacttttggtttagaacttggtgtttgaaaacatgcagaccttggtttgctttttctgtatttgaaaggtttgacctctgtgtaaatgactttactacagaaactgattgcagtgtactacattgtttatgaatattgatataataaatatttaatggatacattttgctagtaagtacttcatctagcataaaattagagaaattttacttgagacagtctgcaaaacagcccaaaaaaataatcatgtccttttgaataaccttaaaaacattttacttttcgttattaatttgttcttgattttgttttctggcttaagcacattaattaaaaaatgcactacctgtaccttcatcctcctacacttgtggattctagcgatgagaatggtgaaaagcaccgttggacaagctcagatttatatctcaatatgaaggattataaaatatctttgtacatgttagctaaatctgtgaaagatcaaatgagttctttgcttgacagtgtagatgattatggtgatgtgatagttataatgaaagcatttgttgagtgtgtactttgtgttaggtactgtaatgtatcctcaaaagcaggatctcattgattacacatgataacctggcagcaaagtgattaaggtcatagactctagaagttaggtttgtatccttgtgaccttggaaacatgtgttaatctttctgtgcctccgttttccatctgcaattggagatcaccctttacctaccttatgatttcaaaagcaatacgctgaaacagtgccccattccctggtcagcttgtattattaataagtggttgtggtcattatcatagtggggccagggctcaaacaagtccgtgatccagtgtccatgatcttaaccacatcactgtatgcttgagcatcactggtgctcaagcatgccacctgacacatagtagatgctcattaaaaaatgagctttgggccaggcactgtggctcacatctttaatctcagtactttgggagggcaaggcgggcagatcactcgaggtcacccattcaagaccagtctggccaacatgatgaaaccccgcttctactaaaaatacaaaaattagctgggtgtggtggtgcgtgcctgtagtcccagctacttgggagactgagacacgagaattgcttgaacccaagaaggggaggctacagtgagcagagatcgcaccagtgcactccagtctaggcgacagagtgaaactgtgtctaaaaaaaaatgaactctggattttccctgtagaatttgtgcttgaactggcttatttgtctatttatttgtacataatatatggctcaatgcagagagaaactttttagctttgaagtcttagagataaatgatgatgggcatatgggctgaaatctgtattattctggaaacacgattactgaactgttagccctgggaagtgcctgaccttgtctaataatttgttgtcacaggaaccattattatttgtctgctatgaaggcaagtcagtggccccagttttagatcgagggtcattgtgtccttgggctttgtatctaattaattaattatcattcaacaaatactaaagaagcaccaggtctgtcccaggcatgggaaatgcattggtgaatgcatgagacatggtttgtgcctttgagaccatcatagtctcatgggacgtggcagacactgacaaatcacccacatgtataattacacattgagaggtgttatgaggtaaaatgagaggtcagtaaactttttctgtagatgaccacgtagtaaatactttatttttttattttttttgaaacggagtctcactctgttgcctaggctggagtgtagtggtgtgatctcagctcactgcagcctctgcctcccaggttcaaacgattcctatgcctcagcctcccgagtagctgggattacaggcgtatccaccacgcccggctactttttgtatttttggtagagacggggtttcaccatgttggcaaggctggtctcaaactcctggcctcaaggaatccacccacctcggcctcctaaagtgctgagagtacaggtatgagccctcacacccggccatagtaaatactttatactcctgggccttacattccctgctgcaaccattcacctctatcactgcaggtaacaagagggtcatcttttcctgtggtctaggccagtgaggacgactagcagggagattctgatgagagtcagagagccttatcatttgcttagtaaagcaaatgtcttcacatacctgcactgggaggctgctgaatgctgtcaagtagctagtgaggatctcctgtgggactctcagtgctgttgtaagagagcatcagcctgcaatttcctcatctggactctcaagaagtttatctgcatcttcttataggacattggtcttcttcataggacattggtctgcaaactttttcttaaaggatcggggagtagatactttaggttttgcatgagactactcaaaagcaaaagcagcaatagacagtacataaaggggcaggcatggctgcattacagtaaaacttgctgatgcagggctttgtatcgtatgttagttcaggacagttgattaaagtttagtattctaggcaagtaggttcaccttgtatttcaactcctgttgatggtatccatgtggaacactgtgtaatgaggattgtgaggctgaggtcattcttttgggaaaaggagacgattgactagtgatgtckgtcataggttcagcttgtgggagcactggttggtacaagtgctgggcatctttaatccttgcggctaggagtgccttgcgagcaaggattttgccatctatctttatacataaggtgcttggtacaattgttagttttaaaagggtttatcaaatgaatggacatttatcttgatgccttcccacaaaaccatatttaaatcatttatcctacacaataagtacttactaaatgcttatagcgttaatggcaacatctttttattccagttgttttcgaaagaaaggaaattcattgcattctatgtttaatgtccttgaccatcagtatttaatcttctatataatagaaccaccaaagtctacagtttaaatgattttctttccttgtgtccttgtttgtgcttaaggcctttacatttcttataggtaatattaaacaacataatgcaattagaatttgtttaacatttattttgaaatatgtaagataggtaattaaggagtttttttttcacatttgctttataaagtaggtttcattcctttatcgtaaatagagtgtacagtaccttgtatcctcataatacatttctctgaaaagtttttttttatttttagagacagcataagaatccttttataagctcaatatgcatttcctggctgtaccacataatttatcttttgtgtttttagggttgcaagatgagaagggggcagagagtaggattagagaatgctgtaatgaaagctgattttcctagcatgtaatgtgtggtataatgaatatatatatatttggtcatggttcctggttcctggcacatatctaaaaccctgagtggtaggagcttcttttgttacttataaaatgttcttttgttatttttaagctcctttcagccatacctgggtttttatgctaatgaggtgactgctggtggccctttaaatagttttaagggaggggttagccatgccaagaagggtggataggacttttagttttcagtcccctaccccaacacctctaagtaggggagagaggctggagattgagttcagtcacgaatggccaatttcttaatcatggctaagtaatgaaaccttgattaaactctgaaacactgacattaggggagcttccaggttggtgaacacatatgggcgcccccccctcccccatatcatgttctattgcatctcttccatttggccatttctgaggtttatcctttataataaaccagtaatcataaatattctctagagttctgtgagttgttctagtgacttattgaacctgagcagtgggaacccctgtgtgtgcaggtggcctgccaccctgtttgcagctggcatctggagtgggagcagtctgggggactgagcccttaacctgtggtgtttgtgctaactctgggagttagtgtgagaattgaatggaatttttggacaaccagttggtgttggataattggagaattctgaggaaataacacatatttggtgtcagaaaacaccacacatgacatctgtctttgccagtgcttaactcaatatggtgctcagcctctcttcatattcagcagaaaacgttcttacaccaaagcgtaccgaacagattatgctgcaggtttcagagaagaaatgtgaaggcatgctgaatccacaacatcttttctcacgcattctcatcacatgtgtctgttcttccttgttctcttcccctgtctgccttttcccgctgctcactgataacgttctcctgtgttaacatggagcagttcttgctatatataattcccaacttgctgtattagttcattttcacactgcaaataaagagatatccgagactgggtaatttataaaggaaagaggtttagtggaytcacagttccacatggctggggaggcctcacaatcatggtggaaggcaaaggagaagcaaagcacattttacagggtggcaggcaagacagcatgtgcagggaactctcctttataaaaccatcagatctcatgagacttactatcatgaaaacagcatgggaaaaacccacccccatgattcagttacctcccaytggtaattatggaggctacagttctaggtgagatttgagtggggacagagccaaaccatatcagttccatgtccactcaccaaaaagtcctgtggtcagctagacacccttctcttcgatggaagtttgctttctatctgtggttacttaaacataccctctgggtgtctcatccactcatcccaaatagtgtatcaaaatattccttacaattgcatataggggtaaatctacctttgaccatcttatacattcatactcaccttcattcaataaaaaactaaatcgaatgcctacaatgtctcatgcagtgttctgggcacggggcactcatcagtgaacaaaacaagtgattgccctgtggagctgctctagccatatacatatataaaattagtacacataagaaagtatgaaacagggaagtatttactaaatttctatgtatttatatatgtcttcctattcctgcttttattatttggggtccagttagaaagatagagactatgcccattattttaacagataaaatttaacatagagaattgagtaaagaagtattggaggactagaagggcaaaaaactccaaaaaaaaccaccactaactaaaacagagattataacttgcaggaggcagtgtcccccacccccaacccaagataaaaggaagaggttgaagctctctaagaacttgggaacttggaacataggtcctgcagagctgggatctagagttttcggaaaggctgctgcttggctggtttcagtggctccaaggctggtcagggagtgctggtagcacctgtaaactggaaccagctagtcttgaaaccagctccttttgccaggatgaggagctgtggggccaggggctatggtgacaaaacattagaaaggagcagatatcatctctatctgccagccctttagtctccctatagtgtgccccatatgggcagaccctaataggaagccagatggcgaaagagaaagtaatttgcaggattatcagccccgcagagcaatgaacacctagaaaggagattttggagctgagacaaaataacttcataactggcacgtcactgataatggcccaagtctaggtcctcttcatctttcttttgatttactacattgaatcccaaagatgctgttcagatctaatgagaaaataattgtgaaatatccaagtaaaagtattttcacacagatgtgcaacagctccaatttgcttctatatggtgtatggttagttgtgtactttgtcctgttttgcagtctatggcatttcccaaaggagtaactaattccatgggatttaaagcagatgccaagtaaaaattggttgggggataactaaatatagtyaagtagatttttttttttaatggtcaagctcctcagaacctcaaataaagcatatatcgagaacctctaagtgaagaaaataaaactgtatttcccagatatttgaccatgaaatccccccatcttcaatttcaagctcactgatttgtcttctggttatagtctctctactttcaacccatctctagtccttttttaaaaacaaaaacatttcaaacttctagttgaaaattttttgatacatatactgtcctctcacgtctgtctgatgtattatgctttttttttttttttttttttttgagacggagtctcactctgtcgcccaggctggagtgcagtggtgcgatctcggctcactgcaagctccgcctccggggttcacgccattcttctgcctcagcctcccatgtagctgggactacaggtgcccgccaccacgcccagctaattttttgtatttttagtagagatggggtttcaccgtgttagccaggatggcctcgatgtcctgacctcgtgattcacccgctttggcctcccaaagtgctgggattacaggcgtgagcaactgcacccggcatgtacttttaaaaagcagttttgtgctatgtcctccttcaactttttctccttcagcgttagttcttctatttgtttctctttcatgatgttggtctgtgttgtttcatcattcttgctcttgtgccctagaccatcctgtcaccagtgactgccagtaactggtcttttcctgttagtagtcccctgaggcactatttcatctcttgggcccgtgtaccctacaattgctgtttttgtccagcataccccttgctgcttggtgctgatcattttgatggttgcccgagcccccgctctgctccatgggtgcccagccttcagacaaaagataaccctagtggccgggtgcagtggctcacgcctgtaatcccagcactttgagaggctgaagtgggcagatcacgaggtcaggagatcaagaccatcctggctaacacggtgaaaccccgtctctagtaaaaatacaaaaattactcccagctactcgggaggctgaggcaggagaatggcgtgaacccgggaggcggagcttgcagtgagctgagatggcgccactgcactccagcctgggcgacagagcgagactcatctcaaaaaaaaaaaaaatgtaaatatatatatatgtagctactcctactttgggtacaaccctgtcctatgctcttttgactgtgggatcctacttcaatctagttcttatctgcttaccattctcctctaccaggggcactccattaatttttttcccctagtgctgctatgaatatagcagcttggtttagacagcttggtccagtcttacattcatcctttctgtgtccccactgtgcttagcactagatcttaccgtgtagtgtaggtgatacttggtgttcagcagattgcttttgggagggggcttgttctcaaggcctcagttcattttcccggccatcrgtatacttccttggggtgtttcttctgccctgagaaggtgagtagctttcatgtctagtgttttcagaggcagcaggagcttcagagatcaattttaattttgagctgactgtcctcctttagaggcaaaggtcctcaagagaagagagtaatggccaataagggagagttgtttagatctttctcctgcattgggtagctaattagatgctggctggatctacctggtggaaggtcatagaaccaaatccccactgtggtgcatttctcacctccctggtgttgcttcttgatcctggacgaggtggaaaagagatttcacagaaatctttcattttactttgccagcaaacttgtaaggtcatggtggttgatatttgcagttagcataaacaaacagaggtcacctgtgaataaatggcagggtgaagatgacccaccgagccttcgatgccactcacttaagcttatttctcaattatcaactcccagaactgtcatcttgacattacagcatactttgatcctttctgcctcattctctcttcacttctagtttgggccagttgttagcttgtagcaatatcatctagcatttcactatgggttcctaaaagaagagtcattagtataaaactttcttgatgtttcttaggttcttcggctcctctgattttaagagggtatagtatgtttaggatattgtttcctttgctgcttagatactgtgtcagattgtctatttgtaagagtctttttgtgtgtacttttctgaggtctttgtcatcacagtggacttttcaaatgaatgacagtatgtatttcacacatttcctggacagtgtgacaggctcatttgactaccgtgcattctgcacttgggtataaatttttttttcagggattattttaaagtttccttttcatgatatctagttttctgaaagctcaccttgaatttaacttctatggattattcttatagataaaagtaatatttggatgatttaccctctccccctccctggctaaagaaattcaaattactataagagaagagatgactaacatagatggaaaaatttggcatgtgtttttcttttttataactagggcattttatgtggaatattggggagggccatggaatttaatcatcaaaattattatttctccttaaatggagattttgacaatgaaattgtgaaagaaagggtgctctctgcaatgttatatttttctttaaaagcatctaagatcaagttttccatagcagtagtattttattcatcaacaagaatgaaatgtctttctaaacacaaatagtggacttcagacctcacagacaccaattatcattctgcacagagaacattcaaaatgtcagatgatctcaggaatttccccagcgaaggtcgctcatttcctactctacaagtcatttctttggcaagccagtgtgacaggcaaacttgtgagattgagttagctaggtcactcaaaactgccgctataaagaagtgatgagaagtctcttgctatcaggtaaatcccattaaactcaaatgtatcctaaactattaagcactattagatccttagaaggagcaggagtgggttgattgaataaagtctgtcccttgcaagctttcatctggatttattggaaaggactgtggggagtaatttaaggagggctaacaaattgctaactgcagggtgtggagatggtagcagggccctgtgagacagtcamatctgatgcattgagatgacatgtttgacccctggtaatggtgatggtgaatgtgcacgtaggttctttagggtttacaaagcaccttcacgtacattatcccagccaccctggaagctggtgttttgctaatatctctgctttacccgcttagtgtgcaagctcatttgaggtagagatcttgaaaaacactgctgttgttcctctcacactggtgatgtgtttgggccacatggttgaataaaaatatctagtactttcccttctctgagtattgtaaaggatctgctctgatggtgtagttgggcgggttttaatgaataatgaatagccccagaacaagattttttcccctttttgaaaatttaaagaatgatcccatggcctagtattgtactctttttaatgttttcttttctttcttattttttgtttcttaagatggagtctcactctgtcatccaggctggagtgcagtggctcgatctccactcactgcaagcaccgcctctcgggttcgcgccattctcctgcctcagcctcctgagtagctgggactacaggcacccgccatcacgcccagctaatttttttgtatttttagtagagatggggtttcactgtattagccagtatggtctcgatgtcctgacctcgtgattcacccgctttggcctcccaaagtgctgggattacaggcgtgagccaccacgcccagccgcaatttgttttcaaatgaacactttgcatggagatgattcttggaacacagaccctcttttgccaccacagagactcacctgagtgggtggggggaatgacatatatatacacatacatacacataggtatatatatatatatttaaatgagatggagcagtgacttaattttcaggaaacaacttctagagttatttgtgccacaagtgagcagagactcaatttttatgaacatgaacctgacataagaccaagctacttggcacaaatatcctcgccttcttccatgagctcacctgttctgcagagatgttgtcttggcaggctgcaagggcagtgcctaagcacagggatgggtgcttaatgctggcctgttgagggagtgtccgttactcttgtaacttcaggcctcagttactcatgtgtcacatggacttttggcctgtcataatctcaggtttccttcagatcttattaatcttttcaaagtagttagaaaattattaattttattaaatgtaattagattttttttctttttctagcttgccttctttcattttattaataaacccatctttggggaattaaatgtagttattaaattaactacatgaaatagataacttttattcaggataaaacagcgtatagagattaatatcacagtcatctgtgggtccaatgtgaagaagttccaactactattttctcagatttgctcagatcactttaaaataaaagacgtaaagtataagtgatgaaatcgaagtctgttgttgtctcatcggaaaatccatgatcccttctgaccctttaacatagtcagtgtcctaaacttggcatgtcaccttccaaatggttttgatatatctatgtatgtatcttcctaagattgtttactattattattttctatttaagtgtgcatactcttatgtgttcctcttgttctaccacttgctagtttttcccctgtgttttgctttgtaaatatatttgcattgacatatttcaagagctggttcattcattggaaccattttacagtattccattggataggccaatcttattaatccttagctttaatgtctttggtttttgttatttctatgtagcatctctgtaatcaagggaggccttgtgttctctcctaggagagaatctcagatgggccactgtagcagatagaggtactgtagcctgttgcccgctgagattgatattaaataatggaagaaagttataagatcaaaggcccagcagctctgatgtggtggaatgatgtgcagaaatgtcaataattaaatgtaatacataggccatgtcttagttcattttctgttgcttataagagacagcctgaaactaggtcatttataaagaaaaggaatttatttcttatagttatggagcctgaggagtccaaggtcaaagggctgtatctggtgagggccttcttgctgrtgagacctcttctgcatagtccccaagggatgcatggtgaaggggctgagagtactagctctcatctctcttctttttcttagaaagccaccgatttcactcccatgataatccattaacccattaatccattcatccttgaatrgattggtccattcatgagggcaaagctctcagaacccaattacctgttatagatcccacctctcaatactgccacattggagattaagtgccatatgasttttggagggaagaaacattcaaactataaggccagtttgggcaaaagatttgaggttaagattgtttttaaagaagtgccttttttatgactagcaggtacatcagatttaccacatgcatatcaactaacattgtaaagtgtgtgtgtgtctaatactagatttcttttttttttccttaaacccacatctaatccacaagtaarctttacctcatcaccaractttatccagaatcccctcatttctttctgtccccacctctactgcccttctctatagtctagttgagagatcagcacactggcctgctagccaaataaagctttattggaacacagccatgcctattaatttatttatgattgatggctagtttgcactacaaaggcagagttgagtagttgcaacagagtccacctggcctcaaagcctataatatttactatctggctctttatagaaaaagtttgctaaccttaatctggtttaatgcagctctctcccaattggttttattctccaaacagaaaacagtggcttttctaaaacgtgaatttgatcttctcacttccctgtttaaaactgagtgaatgaagtctaaactctgtatttgccttaccagcacctgcattatctggtccctgctggcattttcatgctcctctgtcaccatactcccttgttcgtgcacgtgccaacccctttcctrccccagagccttggaacatgctggcctctcagcctgctgtgctttgcctcagttccttcacaggtatacctcttttctgtctccagatttctgcacagatgtcatttcttyaaaggtgaccactcagtctaaaattggcctgcacagctcatcatgtgtctttcttttctttttcttttttctttctttttttttttttttttttgagatggagtctcactgtgtcrcccagsctggagtccartggtgcattctcgwttcactgcaacctctgcctcctgcgttcaagctgttctcctgtctcagcctcctgagtacctgggattaaaggtgcgtgccaccacgcccagctaatttttgtatttttagtagagacaaggtttcaccatgtgggccatgctggtcttgaactcctgacctcaggtgatccatctgccttggcttccgmaagtgctggggttackggtgtgagccactgcacccggcctcatcatgtgtgtctttcttttccctcatagcatttgctgctctgtaattacactcttcattaatgtgttcatgtctttcttccctgcctctcctcctagggcaaaagcttgctgaccacaaagaacttgtctgtgctgattactgctagatcttggatgtcaaacacagtgaccacattatggatgcagtggaaaattgttaaatgaatgaacaaagtataggtctgccagtttccttggtaggagttaaatgccagtatatgtttatattaccttaatttgttttctttatctataaataaatcttgcctacttctgtttgcagggtaaaattaaggtgattttcttctacaacatgattgagctagcatactctccaggagggaacagacaggcattctgaaaggatgttyggtatttttagagccttttatacatttgtttctgctgttgtgctaatatgctaatgtttatcaaggttgtatttttttccctcccttttctttcttgctgctggcagagcagcattatagagttatgcagcaaactctcctttgggcatttgtcattactacaaagtgttttacatttctttgctccttaaaatatatgctgcttttctgctgaacctaggataaaaagaacaaggcagtatctttgcgaatcttaattctttcgagttagggaaaccgatccagcaacctctctttcacaccttcccattttcccagtgaacctcatattcggtacagctctgtaccttcctgcagtgaaatctataaaccagagcctcctgcttcttttgccccagttgacttcaaggctcagggcccatggttgtrcactgggagatratacaccagcactgcctagttaaagggcacaggctcctcagtcagacatacctgtatttgaaatatggctttgcctccaaccagctgtgtcaccctgagcaggcacttagttactctgaaccttcttttgcttatctgtaaaatgagcttctgctggtatcttcctttaattggagaatctcacgaggtaatgctttccaagtggaataacacagtttctggaatttcatgggactcagaaatgttcactagtatttgatttggatcagcaacgtaagactttgccaaggcaccccaagaagaatgaattctaaaatagcaacctgctgtgatccagtttctggataatctgaaagctcaactgtcaattcttttttggaagtacagatgattttattattattattttaaactgatgctgcttgctttactgctagaggccttagataagacatgtggcactatcagagatgcgttgycaatggaacaraaatggtctcggacgctggtctgatcctagtctgatgtcctgtgaagaataactcaagtgttgtttctcttgatgcgggaactttaaagtacttttcttctctagcyatccactctaattaagttttacatcccttcaacgctggcttttcaggtaccatatcgtcattattattattaccaatttgtcagctgctttatttgttcatactttaaaatggaaaacagtaattttaggtcaggaatggcagtatagtttttgtctgtggtggttccaagtagtttttaattgacacaggatttacagactgactaaaaagagaaaaagtcagatgtgataatagaaagctcatgggttttttttaggcagggggacctggattcaaatcgtgactctctcttaatcagctgagtggccttagacaagctacttaaccaacctgtctcaccttcagacttcttctgtgagatggggataacctagttcaaatgagatgaaaagtaaatttacttatagtaagtagcacattttttctttttgagacagagttttgttctgtygccaggctggagtgcaatggcgagatctcggctcactgcaacctccgcctctggggttcaagcaattttcctgtccccgcctccctgtagctgggactacaggcacgcaccaccacacccagctaatttttgtattcttagtagagacgggctttcaccatgttggccaggatggtctcaatctcttgaccttgtgatctacccaccttggcctcccaaaatgcttgtattacaggtgtgagccactgcgcctggccctaagtagcacattttaagatgctttctgaatgtgagatttttctagttcttccttttgcaaattactgttctttttctgtgattgttgagtgattcaagtatagaaattccatgattagagtttaaaaatatctctacaaatgtatttaaaacaatgagcagggctcagtgggcactattaaaacaaaattatttatatgatcacctactatttttatcttaatgattgccaggtatctacttgttacacctttcctcctcttttatatttctggattaaataataatagctaactttttttgagtacttgtcatgggcactgttccagtttatttgcatatattaactcatttaatctttacaacagcctttgaagatgggcctgttagtatcctctattttataaatgaggaagtgaaactcatgtcagctgccatttctgccatccatagggtaggtaggatctctctgtaccccttctagagtttaagaactcagccacagggggctaattaattggttaattcattttcttacagtgtgcaaaacagggagaacccaagtggagagtggtgaagagtattgcagtgctaaacaaaagtgacgttctgttttcaaaggtgacttccaatgaagactactctttagcctgaacatggagggaaaaagaacagtgtcagtacccacagtcctattcttccttctacatctgacattattatttttttcctttccataggcttaggcttctaatcccgatgrttacttttcttacctatttctgtagcatgttttcatgctgaaagagaagttgacgtgctgttgtcatcgtattaaggcctaagcagaacagcattattggtattattatttttcctctcacaaacaggattccacttaatctcttttaccggatggcacagttaaagtgccttcttcatcagagcctgttttaaacaagcaggccttttattttatgacacttatattgagacacattgagttatatctgtcttttcatttgcaccaacacatttatttgaggcctcatatttcctaggtaacgtgactaaggtagatttatcggtgctaatttgcatacagaacaacattggcaaaactaaaatataacaaacacatactaacttttgacttgccacagcccaccaagcatctgccttcattgccatgcctgtaatgagagggaaatatattttcctctgagtttaaatctaattccttgtttgtattccactgtcgtcactgctgttgagagctcgaagtgaggtttaagagcctcttcatatctaacagcaggagtttatattagaggtggtagttctgtataacagaaaatgcggcttttgctcacccacctcgatttcataccacatttgaagaaccctgctacatttaagtaaggggcaagccctttgttttgcacaaaagttaatagagacttaaggctacaccattgtgttaaagcctggcttttatttctttttctcaatgttgcttttaagtagattgatatttatggcacaaataataaatgaatttatttaaaaattcattattaaaaaawtttttttaaattatagattaggttgaaatttcttggtctgcccttcccaagtttactggcaatagcttggtgaacatcatctggaccttttcctatacatttacttatgcatgtatctgtccttagaagrtacacattattgcttcatgtgtgaacatgtgtgtctaatatatgttcttctgctgtatgtattgttctgcagcttgctggtttcttttagtcttgtgccttgtagaataatyagtgctaccatgttcagacttaataggctagattagtcaatgctgttatcatgagttattcctaagatctcagtggttaacacgtcaaacgtttatttctcagtcatgcacatgtgggtcaggtgacatcccccatgttgtaactcttataatccagcctaatctcacctgtgattccaccatctccacatgtggcttccaggtccttgtagccaacaaatagggctctggagggttgcacatggtctcttaaaagttttggcatactagctacaagagaactgagaaatgtaggggtacacatggttacttggtgatactgtgttgccayagataatgttaaatagttcacacagtcagaatatattatagtttgttttgccagtcttctatttgatgggcatttggatcatttccaatcgtatccttttgttatgtacaattctccagagaagatccttgcatgtatctctggtacatgttttgctaggatagatacccaggaagtagactttccaggtcagagaatgggggtgctttagttttcataaacactgtcaaattgttttggaaggtggttgcactagtgttctgttgtaaggatagtatctgagaaagtgcatttcacctgaccttcaacaacaatagcatcagatctcgtgtgtgtgtgtgtgtgtgtgtgtgtgtgtttgtgtttgtgtttgtgttcagtggcatcttcattccttttggcaaaatggcttcttccgttttgtttgagtttctattttcttgattactagtaagtcctgggctctttctaatactgctttatgctgccttcccaagtgagcagtactagtgtgcaaagtcgagctgaagaaggctggagcaagtgcagagccagtgggtagacgattttccctttcaggggtgtcgagctcagggacatttcttttgatattctctgttgattcccccacctccccaccccaggtgctatttcagttgtttctacacctctaattttaaaaccatggggcgaaggatgatttcttgggcatgtcatttttttttttctgtgtagctgtctggttttgtgcttggagtttttatgtcagtttttgcccacttagccattgtcttgttatcttctggttctctttgtcccctgcctcatttttcattctttttcttctgcttctgctcccttgttcccataggcccttaaatctttatgtgttgcttttcttttaagttgtatttttccccttcccctccaagcttagaaatgtttgctctatcaaagaaacgcaggaaggaagggaatgatggcaaggatattgtacaagtccaaagggaacaaaacctaggtgcccacctaccccagctagtttaagaatgtgatgctgttcctatcwcggtcactttgccaaaatccatgtgaaggaaggaaaaaagctgggaattagtccagctttcatcaggcctctggcttactatatgatccctaggcaagacactttccctcatyaggcctccaggttcctgactgtaaactgaggtgattggaccccagtggtccctttatatcttgaaaccccagtatttgaaasatgtgactaactgggaaacttctccagtatagggtcccaaagacctttttaaaagtggatcactgccattccccttcaccttcagcctgtgaagcactgtgtcagtaagggccagtcaggaagacmgggattttgtgaggtcatttaatagaatttaacaaagggccggaaagattgtaaggcacacaggcttgggaggcaacacagagwtggatggacaacagcaggaatcttccgtgagccataggagaggaaggaaatggtgttggccgagtctagggctagctgttacaagcagaagtcacagcaggggagatagcrggagctggaatgtggaagagagggctgtctggagagacctggagcttcagaggagatgctgttacacccacaaagaggacaacaaagcctggtgtcttccccctactgttcagtctctgaacagagtctcaaatttaggcagaagagcctgtggaatggtcctgagggcaggctggcaaatgactggcagaaacaatcaaaaggcactggggcagatgatctttatactccattccattccttgcattctagaattcatggattatctgagagattcttcatgtctcctgcagcaaagatgttatttttagggtcataacaggyagctcttcctaggagttgaaataaacttctaccattctagcatcttaggacaacacctattcacrtctccacctccctccctcccaaagcctggagtagttacattttaccttacacgagctctgtcagcatttcgtgaaagtcctattcctggtagacttttgacgaaagggacactattttacttgtctcttatctcagtctctatcaccacagagcctctgggaccagaatacaaacacagggaaccaatagtgttacccagytgatccagaagttttactgtttcagagtaacttgtgatcttgggcaagttcagcccgtttcctaatttgtaacatggctttaytggtcagtaaagccaattgggcaaaaaggttgtgcratagtaacaaataacccccagaatttcagtggctaagaatccacaaaggtgtattttttactacacatttacgtaaagtcacttggtatatgtccatccttattctggtccctggctgatagatcagctaccatcttgaatgttgccattccccatatctagagagggcaaacttcgatggggtaggagggatggcaattaaacgttggcctgaatgtgtcacacaacatatgtactcacaacttactggctggaactagttaattgatatgatactgtgatataataaaaaaaatacatatttggtctttacccctggttcctggcacacagttcctaagacccttgggatatctgaagtgatgagtgtcttttctaccctaatgagatgactagtggttggagtccactaggtagcttcaggattgtgactggttactagaaagcccatagcataattagagggttgggactttcggttccatcctcccagtctctggggaagagagcgggactaaaagttgagttaatcgccaatggctaatgaggtaacaatcatgcctatgtaataaaataataaaatcttaagaggacaaggtttggagagtgtccagattgccaaatatgtggcggtatctgcaaggtggtacccccagagagggcatggaagctccatsggcataccttgttatgtacacctcttccatctggctgttcaccagtgtcttttgtcatatcctttataaataactggtaaatgtcagcagtggtttttgtgagctctgttagccatcttataaaattagttaaacccgaggaggaggtcttgggaactcccaattgataactggttggtcagaagcacaggtaaaataacctggggcttgtgcctggcatctcaagtgggtatagtcctgtgggactgagcctctaacctgggggatctggtgctaactctaggtagtagatacggcatcgcctaacttcagctgaagtaaggaagtgcctagaaggaagaagaccgaggatatttcttgatttgcactaatgacagctacagagagagataataattcttgacatttcctgattgttttaaccatgaaacatgaatatttaatataatgcctagctcataagtgctcaattaatagtagatggaactattattgttattattattcagcagtttatattacatttccagcgtactttctaccatccatttgcatagcagatttcttctcaccctttttttacaactgagaatgcagaagtaaacataaattatacttctgtagatgtatcacaatttttttttkttttttgagactgagtctcactctggcacccaagctggagtgcagtggcacaatcatagctsactgcagcctcagccttccaggctcaagttgtcctccagcctcagccacccaattagctggtactgtgggcatgcactaccacatccagctaatgttttcactttctgtagaggcagggtctcactatgttgcccaggctagtcttgaactactgggctcaagcaatcctcctgcctccgcctctcaagatgttgggattacaggtgtgaaccactgcgcctgcccacacccagctacaaattcttaataagtggagttgtcttgaagttttagagccagtcagggccctagttttccaagttttggattgacaaaaataggtgattattctgtaaaagaattcctttgtggagtgatagccgggtgtcatcagtggatttggaactgtgctcattgtcctggttttcaatttaagagcaacagacttcaagctggctttcatttgagtcagtgtggaaacagtcaatatatgttacatgtctgtgaagctggcctctggatcaattgcaattagtttccagcagattgcattaacatatctaaaattaatatggcsagtgttctgatgaaaaggaattgaccacaaccacattgtggctgtttttagtctccctcaaatgctcttttcaaactatattttttctttctttggttaatggctttaaattgttatgtcaacgtagacataatctattgattgttcctatttgccttttaagagtggtcctagataatagcacacagctaatgtttaatgttttctttcactaaggggctttttcgctaaatgccttaaactcgtatttttctttgtatgttatataacacgctattaagactataaagcctttgagtatgttcatttacagaattttgtgtttttcaaattactaatgtttcatcaagacttaaaaagtaagattaagaaataatgtgtagttaaaaaataatatacrgtaaatgatgtgagcattgcttgtctgacaatttatttttatcccagtattatttatttctaaagaagaagtataggcaacttcaatattaaaagcaaaaccaaaccatcattaccagcagctacaaggayrgaacagagagctatctttaggcttgatcatgttgaaatttgaattttttaccagcatgtatacattatattatgtttatttcacrtcttaaggactaacttgtacttttttatttttagaggtggccagtttctgggaatgaaaaattgtccatatcaggagacaaaaggcagagttgattcatttggccatcyaagtggcatttttygggtgtctttcatatgtcaagcactgtcaccttcttcacagagatacagagaagtttaaggcacactttctaccctttagtggaacacagtctagtagtgggggtatagagctttgaatcaccctatttcaaaagagctccatgaatacatcatagcttggggataccagaagaaaatgacattttaaggacacagtagatgtcccaaaaggtaatggctccatgtgatgaagccctgtgggcctcacttttatgatctgtgtgacactgccttggacatccaccaaagccgtggacagaagccagtagggattgtatcagatgatgtccatgtactaccagtcttgtgatccagttgtgtgattgatttttttggtttgtgcattaactgtattgtcatccttcctcttgtgagtaatgtttcctttgcatatgactcatggatggaaaggagtttacattaagtgtattcatttttcctggttttttttttttttccttcttttaaaaatggggcttacrgatttggtagggaatactgttgatattattggataaaatgtaaggaatttatttgttcatgttattgtgtcctttgactgtgtccttttaacacagataaacacgtagtgcatattggaaaaccacttctacttgaaacttaagcaaatttcctttaatacacaagttgcagtttaggaactagtttaattaatagtcagtctttcaggttattgcactcaaccttggtggatgaaagagataatctcgttaaacacacaatggccctacccagactctgttaaaaactatggtaaagaaatgaattagtctgtggcccagtgacttcagagtgtttaaacaaatttcctgaaaaaccttacaatgattaacagtctatatacagttattaaaataatgctatgctctttatttatttggggtgagaaggggggagccatatccatgtaatagagtccttaacagtttttaaaataacttattttgaaatacttgtagactcaaaggaagttgcaaaaatagtatagcagccccatgtactcttcatccagcttcccctaatgctgacacctcatgtagttgtggtacaatatcaaaagcaagacattgatatttgtgtattactgttaactagatcacagagctcactcagctttcagsatttttaaaaaacctgcattcatttgtgtgtgtgtagttgtccttaacagtttttgttaaaaaataattaggcatgaatttaagtgggtttttttttcttttgcttctctcaactctgggttgcagattgccagtcaacagtacctctaagactggccatgtaggttgacttttatttttcttgctattaatgaatgytcttacctytctccttcaatttctgtaggcagttcaattaacctccagaagatggctgaacctgcaggaataccagagcaagaaactgatgtctgacaacggagtgagagttcaaagattctttgtagcagacactgcaaatgaagctctcgaggctgctaagagactaagtaagctgattcataatgggtgaaatacacttgcccaaatcagtgaattcacaggtagtggyttcccactagttaattttttttgttgtggattaaactgacagggacagatacaggggagagcttagaactgcaaaagcaaraaagtccagattgcctcatgtacatgtgtgtaagtgtgcaggaatcacatggtgactgcagcrtgaagggaggggtctgctttcagagctttgtccctgtgagtcttcagtcctgctgacctgggaggagatgtggaatcacaggacagccttcagtgtgatggcctgggtgtaggagaatagagcctttcttccctggcacacctagaggtttcctctagactgggccctgcctgacccatgctgcatgagattcacaggcacctctgtgtcctcagttccgccaggatcactcactggaggcacttggcctaagtgtcaaaaaccttagaacaggctcagtggggtggctcatgcctataatctcagtactttgagaggctgaggagggaggatcacttgagtccaggagtttgagaccagcctgggcaacatagcagaacccgtttctacaaaaactaaaaaaattagcctagtatggtggtgtatgcctgtagtcctagctactctggaggctttggcaggaggatcacttgagcccasgagtttgagattgcagtgggctatgatcactctaacatactctagcctgggcgccagagtgagaccttctctctcttaaaaaaaaaaaaaaaattagaacaacaaacaacttccctttcttttcagtatcccttagggagggtgtatcctcagaaattcttacagtatgagcattagggtgttttcatcccagctctttttgaaatgaagaatagtacaacagtggagcatcgttcaataatgtgtgcagggagtggatggaagccttcaacaatatttgataacacaaaaaggaaattgtgatccatgttaactaataaaggaaatgataactgcaatttaaaaaagcaaaaaacatcaatttaggaaaactttattcttttrcctgagatagcagcacatgggatgttgcttcatggtaatttttcagagattttagtcactatttcacccacttctgtcagctgtgggttagtggctgggagaaacatggctgaagggcttgagaagcctttgcagggtgagtcagttgtcgacatccttctttaagtcccttagaacatggggagagcgccctctgagtgactggaggagaccaaagacaagggcatgactttaaagtcaagctaactttgcttcagtgttttgccttccctttaccagctttgtaattctgcagaagtaccttctccgtccttgcctcagtttctttaggtcaaagctaatagtacttatttcccaatgctattgcgagtctttaggagtgtattagtctattctcatgctactaataaagacatacctgagactgggtgatttataaaggaaagagatttagtggactcacagttmcgcatggctggggagacctcacaatcatagtggaagacaaaggaagagcaaagggatgtcttacatggtggcagacgagaacttgtgcaggggaactcccatttataaaaccattagatctcgtgaggcttactcactaccattagaacagtatggggaaaactgccccaatgattcaattatctccccctggccccacccttgacatgtggagattattacaattcaaggtgagatttgggtggggacagccaaaccatatcaaagggagattgttgtgtggtagaacatctagctcattttcctacttacagatccagatattagggatcaggtcctgctgtctgcctttcagtgagcatccccrcctgtggcatacagactttgtaggtgtcggtctggattgccactgtctagtaggagtataatgtgagccacgtcagtattttaaagttttctaacagtcacattaaaaaaaygaaaaaaagggtgaaattaatgttaataatatattctgtttactccaatatatctaaaacaacatcatttcaacatgtaattaatataaaaagttatcaacaggatattttgtgttcatttttttgtcccaatcttcagaaacctggttggaatgctacacttccagcacatctcatttcagactagtcwcatttcaggtgctcaagagactsatgtggctagtggctaccatctaggacagtgcacatttggacactagaaggatttgyatgtgcatccttcagccttgggaatgcagttatttcccactaaaaataaagarttgtgcgtctgctactcagtcttgtccaggtatcagtagcamaggttgagagtttaggatagaagcactctccatatttcaatattctaattttctatgctcttttaagaataagtcgcaggtacttcagctagtaattgttgttctttgaactttttaaagttctaccagatgctaatacaccagaccctttctatgttatgtcagttgaaatgtatatgcattctcttctggaacaaatatttatcgagggtcaaccatgtactaggcactgtggacacagctgtgcaagacaggcaagccctttttcttcatagaatttatgttctagaaagaaattaatttgtgactttcagatgttaaatgtagaaattgaagtgacttatattttaataaatgaaaattggtttcatttttaaaagctatcaagattggtttttactgtgaaaaaatcccagtaaaataagatctaaacctggatgagagctcctcagtgaactttgataatagactcagtaaaggttagtactgtattccagccttttcataagaaaggatcatttttgttttatactcttgtggtttggggattgggaagtgagagcaaagaaatgtaaagttcaagttggtctttgatcttcatttccccattattttcttaaatacagtgaagcactagcattgcaggtataactaagttttttaaagagaattctggaggccagctgattactcccctcacccctcttaggcataacacctaatctctttgagatattcctggagatatgcacttagtgagctaattgacttcttagttatggttttatgaacatttatttagccgttgtattgtggttggggattgtrtaccatgctttttacttgtatttattttttacttcttttagagacagggtctcactctgtcacccagtctggagtgcagtggtgtaatcatagttcagtgcaatctcgaactcctgggctcgagtgatcctcccwcctcagccttcagagtagstaggactacaggcacacaccaccacacctggctaatttttgtgtctttattttttgtagagatggggtctctctgtgttgcccagtttggcctcaagtgatcttcctgcctcagcctctcaaagtgctgagattacaaccgagagccattgcacctggctgtatcatgcttttaatagaatttctgctctggaggaatgagcaatgttgcattgacgtgttgggctgggacaagggagggaaaaaaagagacaataaagcaatttgaagtaaaagaaaattagttcttcaggtatgctctcaagaaatacaarctggataaagggttgagaatgataaaaggattgacaaaatcaagctggataaaggaatggagaatgatgcwtggttgtgtgtgtgtgcttataggagtgtgtgagtgtgtgtgcacgcaggtttcaccagtgcatatctatgatgctccttaaggtggtatggccaacagagggcctccctgtgattctgtctagagctaaacaggaatttggaaaattcaagctccttatttggtgaatgaatgagtaatccttcccgaactcagtgagtagttttggtagaaggaaggtctcctctgatttctgttgttgaatagttttgatctaaggggaaatttatagcattagaagaggatrtggaaccaattctagttggttaaaagtgaaattagttgatcataaatataaaaattgtgtgcacatcactgagattacctggagagagcaaagcaagaagaatctggcaaaacttcagagtatttacattcttgtcaccacaagattgacagaaccaagagcacgattraagttttagcaaatagatttgaggttaagattaaaactggattatgcacacatcttcctgattgtcctgaaaaaatgggatcttcaccttgtaattatgataccatcatgggagaaaattgcctagaatgatwatgtgtctaacactgagaaagtkctatataagattttattgctatcagcatcatcattgttgtcagtggcagcaaattccaggaggttcactactgktgtgattctaactcacagagagaccagagacatcgtaataactatcctgttaatcatgtgttaggagagttcatattttaattagaaagatttgtaaataattgaaagatatttgcttaccttcctactttattcatattttgatgtgttttgaaatgacattttataaaatattttgaaaataaatgtgacattaatcatatctgtgatttccagggtgacttctatgcggattgtctcgcagatctctttctttgtgcctgaagctgcattcctagttgtctgttgaccacttgttcatgagtgtctttggcacacctgacctaaatggaacttgtcatctcttggttgcttcaaaccttctcttcttcttctcgccaccctacttacccagctgaaatagctctgcatcattaatgtctctcatgtctactatattcagttggtcgccaaattcagtcattgtttatgtcattttacaagcaaggaaacaggcaagataaagttaaaaaacatgccgagattgtagagctaaatgacaaagatgatgggattttaatccagtcagattagattaaatctcccctagcattttccttttgctaacttgatgatgatatttttgggagatttttatgtgtgggtcagcattttaaacatggaaaatgcatattaataaaattagaagattggattaaaactagatgtggcaggttttaaggtgcwatatatagaaactgcaatctgcagatattttcttaatgattcatttgcttttatctctgagcaaatagaaccttttgctgtgtagttatggaaagcttgttaatttgaacatttgtttaaaatgggtaatrcatacattttgtttctgaaacactgttcataatggtaagatattgagtgagatcctcattttcttgcatagaaaatggatttatgtctgagagagcaaatttgtttgaattaagtttttaatgtgtggataatattcattgctgctgccatttatcggagccaccttttataatcacgctttaaaggaggagttgtttacgttgcatacaattttcttaggaggcttataagtacatactttttttctcttatggattaaattaatgaatacagtcaacagatcattacagaatacctactgtgtgaatgactgatcttcatgttaccttttcagttctctttgaaagtgagtgaaggattgtgtctctcatataactggaaatacctgtcttaaaaaagtatttgtatataaacttagatgaaacatatctaggatcactatctttcagtttttagaatctctacaatttattaattattccacacatgttgacatgagactcttaccatttgattaagcaagaaaattgcgtttcaaaagctcagttttattttttgttgggaaagaaaattgaactatgaatggagaaattaatcttctctggcctaatgacatgcatcctaaaatggagataaggagcttttattgaacttggctagcttttgattgctttcagctataacatgtttccattcgtcaatatgataacttgttcttttggtattatgtaatcacatcctaaagcctggtgaattacttaacaccattaaggaattgtatttgatgtaaaaaaagaactgttgtgcattgactactgattgatatgtactattaatcccatagtcaattaaatacattgcaagcctccttgattgttgtggctttgtcctatgacatgtggttaggatcttgcaaraagatcttaatatcctttttrttgagatgacggtcatttttgtcttataatgacagacaaggataacattgatttttgtgaagtaagttttccttttaccaacatatcagctgcccattattttgactttggagtcaataatataaagctgctcctagggtaatggcatatgtggtccatgagaggttgaagcggtatctgctttctaggaataacagtggtgtcctcaccagacagatggttcctgtggtgtgatttgattgtgtgcctgcctgctgttggcctctttggttccttcccattttttaagtctgattgtcctgccttcttggtgattatgtgagcctcccaatttctttttcgtaatttagttcatgcttatttgagctagagttaatttctgttgcttgctgctaagaacctggtctcatgcagatagagtgcttctcataggtcctcagaggcagtaggtgctcacgaataaatattgttattcagaaaatgttcacttgctcatgctcgcttgcaaatgctccttaaaggagcacctgaatttaaattaatggttttccctaactgtatttataaagaggatatcccattcaacaagttgtagcttttaatgacattttctattgtatgtatttttgcaaagagatcccccttttataaaatgttcttttttcttcttcctaagtctgcaaatataaatggtcttctctggtcatctccttagaatttctctgtgctagaatatcttttccctaagtgtcttgtggtattcactgaataccactctgcaggagacctgcagagtgaagggcgagatcaaggcgggttgtgggcaggcaggctttatgggagtgtacatgtagcttcctttcagttttctcagaaacaaatgagaacagtactttgaaactcaatgccttaacttcaattttaacagcctactaaagcaaggattaattcttcttacacttttaccaataaaaataatagtggtggtgtttaagctttgggcctttaccatgtgcctggtattgtgctgagcatttcataaatattatctcctggaatcttcatctaaaccaaagggaaagactttcctttaaggactggtactgagtgtcaccagatctcttcatgcccatgattgtgtatccatggtaactaacataattttactttctgtctttttggtgtgtcattaatgcagttatgtattatcttgtttttatttttatttttttaatttttaattttttaattttttgagacacttttgctctgtcgccccggctggagttggggggtgcgatcttagctcactgcaatctctgcctcccaggttcaggcggttctcatgacttagcctcctgagtatctgggattacaggcgtgcaccaccatgcccagctaatttttatatttttaatagacacggggtttcgccatgttggccaggatggtctcgaactcctggcctcgagtgatcttcccactttgacctcccaaattgctggcctttgggaggccaagttgggaagattataggcctggcygacttgtttttttaaagctacctcattgagaatgggcaaagaagttatgttggcatgtggtctcattttccaggactttcccgtgaaatattttaccctgggggcctttgaytcaccccattgtaaagtttggcagttttgaaagttcagagggtactttatgggctataaatgcagaaaaacagaaaaactttacctagggtaaatgacataggacctcactgctgtgatcgctctgtctgggtggattgccccttttaaagaaatcttaaacataattagacaaatcttttctgattatcaaaggaacatgctcattattttgatattggaaaatacagaaaattacaaaaaagtaaaaaataagtaaaaaatatcttctaatctcattacttggaggaagcctgtgctaatattaacatattttctttcatttttgttttgcacacatgcattcagcaatattaatttctgtgtacatatgtatatgacatcattgagagagaatgagcttgtttataaatttggtgaggtactaagtacagttttgtttataatttttgttttaaaattctatattataaaatgaacattgtctaaatattaaatttttttccaaaatattattttaaggttttatgataatctctagattgactgtgttatttcctcttgtggttatttttggattgtttttctctgtattggcatattaggtagtgctagcttctgaagcacatgagctgccccattctcagtagcctggtgcaagaagaagttatttcctattcacatacaaatctagcatgatgttcttggtctgccacaggaacccaggctccttttgtttttcactctgctgtcttccacacatggctcccaaagatgacctggaaagtatgcccattccagccactcaaaaggcaaaaaaaccatggaggattgcatgtagaaatttgcatggactgtgtcatttcagctaaaagtaattgcaagatctcaaccaacttcaagggtggctgggaaatacagtttcaatccatgcttaggaaaaagaagaaatgggtttggtgatcatgtagtggtctcttctgaaagtagtgtttagaatcttgaaaatctttgtctctttgcttcaaggcttagaagaaacacaggctatacagtcagaacagagctcccatcccagccctactttgactgattaccctaaaccacaatttacttgactataaaataggggataataatacatacttcaaggaatgattgagatggcaacaaagataaacgaaacacatttcacacaaatgaggcactcaccaagttctctttctttttttcttctttttttggattgaactgagccagtgttttgagccgtcatgaaagaaatacaaaacaactattaaaacatcaacagcagataaaaataaaaattttcaatacttttgcaataacacccaagtgtgaagctatgtttttttatacaacttgtcagataacttgataatgaatatataatgacttgtgtactgttggttgatattttctaagtagatgaagatgtaagtcaaaagttgcataatttttaaagaaaatgagcgtcatactttctttacattgcaacagaataaatattacatatggaattatgcttttaagatgctacactattccccaaggtggttgtaacaggcattggcaatgtttaacagatgttcataaatagtactaaggctgtacttgagttttctaggttacggacaaaaaagtcaggaaatgaattgagaaggtttaaaagagttgtgttacttgatctaccttaggatgaaaattgggtaagtaaacaagctatctcagctgtgtaattttttttctttcattcaacatcgaacaagctaagagatttgggagtctatttctctcaaattaaatgtgagccaagtattagagttttttttttttttgtcttcaggcttttatttgagcaaatataccagtcacttcagcatggggcagaggaaacagatgggaygtggataacagggggaaaataacagtgctaaaggtatttgatrtgcaaaaatcaaattgttcccagaatcttcaggtgctagatgcagcactgaaaaacaactttacataaatatatattttctttataaatgatctgtccattagcatcataaacatgagaaaacctggatcccgttgagacactcttgctcagaatttcttactactgttccttgtttagtggattcagttttaactcactgtggcatacacagtcagctgtgcatgacgcagtcacaatttacctttcgctcattgtcctctckttatgcctgttacccagtgtgtggccacatcagtttccttcctgccttcgtccaaattctttctttcatagtgcaccttctaatatggtgaggatgactctggagttcgccttgaattcaaatcttgcatttgctccacgatagcttcacaaccctaggcaagttacttagcctctagaatcctcagtttcctcatctgtaaaatgggcttagtaataatgattcctaggagagccaggagagtgaaatgagatcatgctgtgtataaggtttagcagagttgtataccctaaagtttccaataatgggtagttaggatcattatcattgtcacgatctcccagtttttgtggctcatcttatcacctcttcagtgatgtctttgagaaggcactgtggtagtatttaagaaggtgggctctggaagagactgccttagtttgaagcatagtcccatcctttttagctgtgctgtaacttctcgaaggctccatttcctcatctgtaaaatgtgggatgtcagtagtgtctactcatgggtttggtgggaggaatgatctaggccttaacagtstctggctcataggaaacatcagtagatgatgtgctttttgctgttacggtaaatagtgtgttccacatcacagcatacactgggtgatgcaggggttgtaatttaacctgttgcctctgtacccagaaagaggaaacayattccttacaacatagttgtgaggtgacctttcacacgatacttttcatatacaaaataaagtataggtgtttctgtaaatctggacaggtttcaagattcatctggcatttaagcttagaatttctgtctcttcggtgtaggtgatmatccctattggtttgcctgggacagacttggatacatctgttattccagaactattattaactgcaaatcccttttactctcaaagttgtctccatttaaagaataaagtttttggttacctgaataagattaaggatgactctttgatagcagctgtctttaacaggaagcctgttttgtaggaaagacagtgagagttttggccgggcgtggtggctcacacctgtaatcctagcactttgggaggccgaggtgggcgtgttgcctgagttcaggagttcgagaacagcctgggcaacacagtgaaaccccgtctctactaaaatacaaaaaaattagctgggcatggcggcatgcgcctgtagtcccagctactcaggaggctgaggcaggaaaattgctggaacccaggaggcagaggttgcagtgagctgagattgtgccactgcactccaccctgggcaacagaacaagactccgtctccaaaaaaaaaggaaaaggaaatgagagttttttgttgttgttgtttgtttgtttgttttttgagatggagtctcactctgttgcccaggctggaatgcaggggcacgatcttggctgactgcaacctctgcctcccaggttcaagcgattctcctccctcagcctccggggtagctgggactacaggcacccgccaccgtgcctggctaatttttgtatttttcgtagagatggagttttaccatattggccaggctggtctcgaactcctgaccttgtgatccacccgccttggcctcccaaagtgctgggaccacagacgtgagccactgcacccggccaaagatgagagctttaaatattattccatcaattcttgcagcttttaaatgaaggatgaacaagagaagaaagggccttccagacagtttgggatgactactgggagtggggtacagaaatagatagggaggacgaggctggatttgttccagggctaaaactttcccattcatctttgcattcctggtacctggactgtagtgtgaattccataagtgattactgaatggaagagttaataagagaacaaagacatccaggaaccctccatctaggctaaaagttgccaagcaggacttctggtgtatacatacccagtgactttctctaatgtcattgggtcatgattgtaagctttgtttaagggagaaggtaaaactaaggaagcagcagccctgtgggcaatggtgggaagttgggaaattaagaagggacacatcaactcggtgtctttgcctgttgccagccttatgtccagggttctcttcaggctgatcctcctgtctgatgccacagaacagccttagttgaaatgtggggatggttaggtctggtattaccaggaatgaatctccttagacaaagacagcttcaccttctgtgggttctctctgatccctggcaggtcatgttaacaaaagtccctggtccatagtggctttttgttctgtttacattgatgagctctactttcagttataggatctttggatatgtgctcatttcagtttaaaggtgtcccaaatatgcttatctcagtgccatttttgtcactgcctcccctacttctggaaaaaacatcagtattgctcagtattagacagtagctctccatccttgccagtgttgtgtgtgttataagtgaggggactataaggaaaccatgagagggctcaaaaccccctgtgatttaagtaacctcttttcaatgggacgttaattcatttaacagttattgagtacctgaaataatcaggtactgaggttggttgggcacaaggatgactacaaatagttggtgcttccaagacgttcactgcttggtagagagacagatgtgtaaactcatagggatacaggagtagtgaaggtgtgcccagatgtcatggcacgcagggaaaagggatgcctattccactgtaaatgctgggtggtcagggaagccttcttggaagaggcaaaaactactttccctttctgactcattattaaatataatacatttaacaaacagagtttttttctgacccagaatagaaaccttgtccttaactttctttctttctcctggctctcatgaaaattatctttcaaaatgattggcaggaagttggcaattctagctttaaacagagaagtaataactgtgatcatcttactgtttgtatgtaaagctagttacttgtgttgaggggaagagagaggtgttttccgatggaagtgtagaaggctgctttctgagatagatcctatagacaacccgtcaagggatactactttaaataaaccaaaccactccttgccttttaggtcaggaaacttgtgggtacccacccagagttcatcaaactaaggaggttggatgttcatcaaccaagcctgtgagaatgatgtatacaccagaatgccaatggcacatttacaaaatggaatgattttctcatgactagaatgttcagatctgccatcctgatgtcttaggagacacattcatcttgttttacctttatgcaattcttttccttttcaagacaaagagcacatttcaacaaaaccttagactttcatttacttatgctctcatcaaatattgatctggtgtgtgtgctaggtggtagaaaatacaatggctgaaatgttttgaaaactcagtgtatctgtaataaacactgttaagtgtttatcctgctttatctcactgaatcctcatgtgcccttcctgagatatgccattgtcctaatccatagtttataaaataatcatctaagaggcccaggcacaatggagcttctcagagtgatagagaaacagtcagtggcctttgcttcyaagcccaaagtccagggaccagggcctccagcgtccagagccatgttcatgaggttgcttaccttcgcttaggacgcagagccatctcttcacaccctctttctcccaaaggtcaattcaaaactccctatactgggcagactcccaccctggcactcctttcctgcttgaggcctggctgacgttctgtgtcttcccttcttggggtgattttattagtcaaaactctcagragccctggtgcctcctcacctctgtctttaatactgcaagcagccccctttagctgaacaaggaactggtctgttgtgtttcacattacacaggtattctcaatatagaaacacacctactttcaygattcactgccttttaacttcacagtgtttggagtttaaaggggtcttttgtgaacatcgaagtccctgaagaagtgaatagctaaaattttccacatgaccagtagtatggaagtataactaatgatagagaatgatactttcattgcttccgtttttactcctgtcactaaaggcttgtaatttcataccacaccaaacaaatttttatttgttcagcttcctttgacttaagcaaagtagtttttttggtggggagggggtatcgttattggagtctgatcttgaggtattatttcatttggaaagactgatacaactaaaaatctggtgtaattctttctggttttaaaaaagttatgtccagctaactcttaaaaaatcaaaccccttttgaacttttaatttaaaacaatatcaatrattgctaaaagtcatctatagctttactatcttactgattttcactttctgttttcaataataaaaatcttttacccatcacaccagaaggtaccaggctaagggattttctgagcttttgggtaccattcaattggtatccactaacatatgcagaaaatagtttgaatatttgagcttggtgaggatgcagagtataagcaaacaaattagcaaataattgacagattgtgagaaatactgtgacagaaatacacagatttcatgttataggatagtcaaggaaggcttctctgaggaggtgatttttaagctgacctgtgaggatgaacacgagccagtcatgagaactgggatgaaagtgtttcaagcacaggtgacaggagaggcygagatcctgaactagaaacagctttatcaatttgataaacagaaaggggatcggtgagaatgaagtttagaaaaggatagtatggtgaggtctggcaaatgggttggagcccagatcatataaggctttgtgctcagctaagtatatttgattttattctaagtgaaatgggaagctaccaaaagatttggatgaaatccatgtcagttaggtattgcctcaacaacgctaggtaacaaaccatccccaaactcagggagtcatttgttcttgctcaagtgtctgcatattagtgggttgaggtggccctctctgggcttggctgcaaactgcaggttgggtccaggcctgtaccacgtgcctctcatcctcctcggacttgtgggctaggtgtgggtatagttttcacaaggaagtggctggaatgcaagagagcaagcccaactgcaagtatgtttcaagctccttgttgcatcacatctgctaatatcccattgttggaatccaaagacaaggggtcagggcctctagtgggaagaactgcatagtcacttggaaaatggcatggatccagggagagatgaggaattggggctagtgatttctgcaatgacctgatcttatctatcttataaaaagttcaccatagtcgggggtgaccaactgctcttgattgctcaaaaatgaggagttccctgaacatgggactttcagtgctaaagctgagaaagcctaaggcaaaccaggatgagtcggtcaccctgtggactgtcctgtggtaaatrgattaatggggctgcaggagaagtgagaaagagatcagctgtcattatggtcttccaagtgagagaagatggtggtgtgaatgagaggtttacacgggagatgtggtggagctgatgtctttgagatgtgttttggatggacagctcgggacttgttgatgtttgggatggggtagttgaagaaaggcattggggatgtgttagaccgattgaatatgctatttgctggatatacaattgaatgtgttatatgtgttagaccaattgaatatgcaaatattctatagggtaggataacaacttttagttgttaggcattggggatgtgttagaccaattaaatatgctatttgctggatacrcaattgaatgtgctatatgtgttagaccaattgaatatgcaaatatcctatagggtagaataacaacttttagttattattgcgagaatataataacaagccactatttgcaaatacattatatattatagacatgtaatgtggtatctatctttaaaaccatgttaaagaaatcgatggaataaatgtggaggttgacgtatatccacctggacctatagtaatgtacacaaattgtatcagaagaatggttgtcactaacaaaggtcattttcctaatagccttcattggctacctaggctcaccatagtggtttgcttctatagtaagcaaggaagcmatggacattgggaaatgagtgtattttcttcattttgatttgtcaaggcctaacccatcaggatttacagtttataattacattgtgggtttttctatacagtatcgtgaggtgacagtgtacctggtgtggtagaaacaatatttgaataggatttagaaggtctggatttgagctgtggctttgatattcagtttttttttttttttttttttttttttttggaggatgtgagagttacatatgcttacgattagatattaccaatgtcttttcccacttgttgagttgatgtcttgaataacaaggaggacctattccccagactatttggggatgctggttgaattaatattgaattaacacctgttcatatgtggggaatgccactgaatacttttgtaatcttgaataacttgctcggcatatttggtctctgtttctttctctatgaactgggaatagcaattcagggacattgtgaagagatatcatatgagagattgtatwtgaagttgctccataaggtcttatcaataagatcttcttccttctctgctaggatagtgagtttccaggcctggattcacattagctttatttgtgttgtttgtttttccttgcacccttgaatgtgataatgatgaacacagatttgttgaagggctggctgatcaagtgtcaagttcctggcagttcttcactctgtgccttacactctgaaccatttggctgcctctataaagccagaccttctgggttctaaatacttttcttctaattttcccacatgagatcttgggcaagcttcttaactttcctgtgtcttaagtttccccatctatgaaaggaactaatcatatttcttgaatcagattgttgctgagtcctcattaaattaatagcgataactcagatcagtgtatggaaatcaatcaatacaaaagacaataaatgttaactcctttattattattgctgttattatttacaggtaggtttcctgctgcatttatttgatttgtagacttgagagacaaggtagaactatttaattacatagaaaattggaaagttctgatatgatgaactctaaaggggaatgtgatatagatttctattatttagttttaggcagtttatgatttttccacagtgactagtgtactccatgtgatagatctaacgtattgttgtattagtccgtttttatgctgctgatgaagacatacccgagactgggaagaaaaaaagatttaattggacttacagttccacatggctggggaggtctcagaaacatggctggaggtgaaaggcacttcttacatggtggcagcaagagaaaaatgaggaagaagcaaaagcagaaccccctgataaacccatcagatcttgtgagacttattcactataatgagaatagcaggggaaagactggcccccatgattcaattacctctcctgggtccctcccacaacacgtgaaaattctgggaaatacaattcaaggtgagatttggatgggggcacagcaaaaccatatcagttgtgaaaaggggttttgactttttcaatctcagtccattgaaaactcattctgttttcccttgccctgcagagtctgtttcatctactgctataccctaacccacctgccagctcattttgcatttctctttgtttgtcctagcttccttgtatgcgctgtttgtgctcttgatttattaaatctctgagaccatcctttctctggaatggtaggaaaggcttctagacagacagccagagagatctaaaacagccccaggggtatatttcttgttcagttcattccagcaaccgattagagatcaataaatgcacagcattagtgtatattatgtacttttcctggaaaacatgtcagtattcaatagactaaataggagatgagatattttttagttggcacctctctacaactgtaaataattagaaaaggtttttttttaatttttactttagaaatttttgttaaagaactctctctctcttaatgtccaaagtcttagacagttggacatcttttccttctggaaagatgtgaaactttgtagaatggagaagaaatgtaaagagtacttaacactaaaagaaaaggcggtgaaaagccaaaccctgttgtgttagtctgttcttatgttgttttaaagaaatagctgaggctgggtaatttatacagaaaagaggtttaattggctcatggttctgcaggctgtacaagaggcatggtatcagcatctgctcggcttctgggaaggcctcgaggaacttaatatcatggcagaaggcaaagcaggagtaggcatgtcacatggtgagagagggagcacgagtgggaggtgggaggtgccatagtcttttaaacaccagatctcacatgaactcagagtgagaactcactcacgtctgcaaggagggcatcaagccattcatgagggatcttcccccatgacccaaacacctcccaccagctcccacctccaacattgggaattacagttcaacatgagatttggaggggacagacaccaaaaccatatcacctgtctagttcaaaagtttctcaaaagccacagttgccttggaattggtgatggaaattatcatcattctcacttgctggaatacacagggaggtatgtgggaaagaacataatagaaatwttttaaaattatgttttttatttgtatgtattgttcttcacataatataaggtgttgacaggacaggaattatttctctttctgaaatgaggaaacagactcagtgaactgaggtacttgatcaagttctcagagtagcagttaggccccatccctaacatttataggaccagagrcagaaggacaaatagaggcccatacaccatatgttcaaaatataaaatttcataaatgcatatataaatcaaggtaatgctgtatcaagtagactaaagtatatcccaaattgaataaaatgtcttgccctgacaaacataccttcagagtgacctgtaaggcctggcttccattttgcattcccggactttgtggagtttagtgcaggaacatgtagcacagggattagggattacctccccctagcctgtggttcctctttccgcccccagcttcactgtgcgttgtgaggtgcctcatgagtatgtgtgttcaggtccatccacctctcctgcacacagccaccccttgagcataggagtataattagaggacagcagatgcttcccttggaaggccccatcttgaaaagaggcccacaatgggccatttcggtagacttctggggaatgtgcatggcaggggatatataggctctggacaatcccttaggccttgaggacttatcacctcattccatggttaagtctaattatgaggccagtagtggggtatccaagatacaagttggattccattggattgtttggccacttcaatcacattattagtcagtttaatgaaaagcagtttgttccttcatttagcaggtattatgtacaggtacttggtgctggagatataactggagtaaggcatctcttgggagcggcttcgaattctagtgagagaagacagaaaaccatgtaaagacttacaatataatgttctcaagttagcaatgctatgaataatataaaagagggtagtgagatagtgatggaaaaataagggtgggaccaagggtcggagaagtcttccctgtggaaatgacattgtgatgcaagatgtgaatgctcaacagctgcaagaagatctaagggaagggcattccaagtgggtggatcacataggtgatggccaggtacttggtgacttcaagggacagaaagatgatcatggaggcatggcatcagggagtggaaggagatggggttagagggatgggcagggtcttagaggtcaccagagccttgtagaccctgtaaggggcttggattttgttccagtgaaatccactggatattttaaacaagggattgttaggaaaacttctgatcaaattcagtacttaacagttaacccaaagtagcctgtccaaattgtaatcattttgccaatattaaatgaatccccctgctgtacataccccatctcttagagtagttgaatgtcaccaatatattttgtagacattttgaagacttaaacattggtgctcctggcaagtaatgtgaaaaagtggtcatatatttagctatcaagtttcatgtcttttgctaaaaatgtagaaccaagagagctctgagcataaatacaggcatgctcttggtgttgggtatttcataactattcttaggtgccaaatgtcttcatcttcatgcaatttatagtaatgtaagtaatgtgttggagactaacaartcaaaatctcatttcggatgtgtgacactaatgttgtgttgacttattgtttcatgtgttagatttctgataaaattactaaaacaccttcttgaaaggagtaacaggaagaaacagttggggtgtcagatattcagctgtgtgtactttcttatggataggagtttactgattaattcttgattgcattaaatagcatattagagtacctcaatttaggagcatttagcaacttaaaattttttgatagcaaaggasttacaagtagcatgatacttgttaagagaaaacaaagaccaattttagttcttatttattataatgattttcattttactattaaagatgtttcttcaacagtaaccagatgtgtaacatagaagcagctgcatgatattttcatttttatgcataatattggaaatcttagacaaggttcattgtctgttatggaaaatgaaatgatcttttcccagtctgaacatctgtgtaaaacagaatgctagcatcttctcctgtctctaagtgaccatctgtttttatgggatttgacaggtaatttattaattttaagtggtttgttttagggaaattttggcaaatgtgcatgtaacaaagtagtaggaaaatattataaagctctggatttttttagggcctgtttaaaggtctggtagaagctttaagagtcttttttcctttttccttatgtgttttgaaatggataaaaatatttgtcaatgaatgatgccatagggactggattataggctttggtgacacatttgacagtcgttctggttttggctaatttagaaatattaactgtacaattaaaaaacttattttttttctttcagtacaawctcatgttatttttgtggtcttaatataaaaattaaacacaaaaaataagtggtaagttgctttttaaactctgtcctcctccattccagctgtcactgcactttcctagggtccttctggcatcttctcaaatcttggaagaaatgccagctctttttcaacattcatttgtcacttttaaggtttcactgaattagccaggctgaatgcagaacgaaaagaaatgccacggttattatgctgactgcagacgcaatatgggaattctgtatgataggccctcactcatgtcttaatactttatttattccaatgtgcttagcaagccagcttggccttgtttgtctccaggtagatcagacggctagaaacagtcctacctattttcatttgggaagcttaaatatttttaagatgagtgataatgccaggcaaacagagccgagtgtcaccagttctgtctcagcctctcagtcaccgagggaagctaggagacgtaatcatttttagctcagttccccattctgtaaaatgagttttatgacattttcttccctagttcactggaatagcattagaaaaatgaatggatgtggtgactgtttattggatgacatttgctgaatgtggctttttggtgttcaagactggatacattaataacagttttaattgttatctataacatggctgtctgatagtgatgatgatgatgaggaggagcaggaggaggayagtcgtggtggtgatgggtgaacagtaacagtaaatgggaggcagcttagggtactgactaagcccataggagtcagactatcttggttgagatccctttcatgtcaattactacttgtgtgaccttgaacaagttacttaaatctctgaacatagtaaatgtcacatttggaattggaacctccacctgtcccagcctgtgttcctaaccaccatactgtgctgctttaagccaaaagcaacgaactttggtctagagcatttcaaaaggtcatccaacagaacatataaaaatagaaraagccagcaacatccttaatcttctttatttagaatacttactytacttacttttaaaaaataccccataggatcatgaacatcagaccaattgggaagggtagattaattgactgcctaaggactgaaattggcacattagactctgctacaaaacttacctgtttctgatctctcgaaatcaatgaatctcattattattcatagctcttcctttaaaaaaaatgaaacacatcatttgcaaaaagaaaattttgtcccatgcagtctaggttgttccaggagcttactgagaaactacaacagccctctgaggttaactggtactattcactgaactctcaagtttctgccttgtgaatctggtggtgggaaatttggctgtagtaaagaaggagcctcacttgatctctgcggaaatcattgagaattacaagtaggatgcttcatccttgtttaaaaaatagaagtaattgtttcttttggaagtagcatgctatttatttaactgcacaagtagttctgataaagtgggtgtgatttttttggctggttgatgtcagcattattttacaaatgtggaggaaaatctatcagggaaaataattgaaataaagcaggagtctttgtgggtttgttttttttttttttttttttttttttgaaatggagtcttgctcttttgcccaggctggagtgcagtggcatgatctcggctcactgctacctccacctcctgggttcgagcgattctcctgcctcagcctcccaagtagctggaattacaggcacccaccacatggatgcccggctaattttttgtacttttagtagagatggggttttgccatgtcagccaggctggwcttgaacttctgacctcaagtgatctgcccgcctcagcctcccaaagttctgggattacagatatgagccactgcgcccagcctaaagcagtactcttggtggacaagggaacwtgagtggtagctgggagaagcatcagcatgatggtgatatgtacattcctggtgtagtcagctcttacattctagtggcttattggcatccagtggcagctggagacagatgatggaatatccgtgttctgaagaatgtcctttgcctgctctctaagcatcataatacttaacttgtaccagtatttacagtgccatcatttttcattatatgttcccttatcccattggagcacaaagggagcagagaggagcactgagtgtccgcttcatgttctttccatggtcaagaccatgtgttttcacaactaatttaagagagagttggagccaaagcaactttaacctaattcgaaggactggattggtgggatcaattggaaagttcctgaggcaggaatgttcctggaggtatcaggtgattagagaaagagagcaagcaagctgtgggacatgaggtgaaattggagcatggagaataacctgtagggctctgtatgcaactagaggggtgctggcttttgcaatggttttatttattgatttatttttaattttctgacaagcgaattaagttatatattgtatatcataaaattcacccatttcaagtatatccttcaatggacaaaatgtactgtatccataggatatggtttggctgtgtccctacctaaatctcatcttgaattttagttcccataatcctcatgtgtcttggggagggacccggtgggaggtaatttaatcatgggggcagttaccctcatgctgttcttgtgatagtgagtgagttcgcatgagatctgatggttttataaggggctcttcctgctttgcccggcacttccccttcctgccactgtgtaaagaaagatgtgtttgcttcttcttctaccatgattgtaagtttcctgaggcctccccagccatgtggaactgtgagttaattaaacctctttcctttgtaaattactcagtctcaggcagttctttatagcagcagttaccagagagtattcaattatatggactaatacaccacacaatgraatactctttggcaacacaaagaacaaactattaatacattcaacaacatgaatgaacctcaaaaacatggtatcatgatattaagtgaaagaagtttagttccatgatgtttagtaaatttaccaagttatataaccatcactgtagtccagttttaaaacatttcatcctccaataagattccttatgccctttactgttaatcccattactcctgccagccccagcaaccattaatctgcattgtgtccctatagatttgtcttttctttaaatggaatgctacagcatgtggtctcttgtgtcgagcttccttcacttagtatcatatttttgaggttacttcatattgttgaatgtattaatagtttgttctttgtgttaccgaagagtattccattgtatagatacagcacattttgtccatttaccaattggtagatatttatgttgatttgaatttttggctatcacgattaatgctgctatgaacacttatgtccaagtctttatgtggaatgtatttttatttctcttgggtgctgtgatagacagaattctggccccaagacttttacccctagttttgtgcccttgaatatgtggtattacatggcaaaaaggactttgcagatgtagttgaggttactatgcagttgaccttaagatcaggagattatcctggattaactagatggacccagtatgatcacataagcccttaaaagcacaagaggaagtagaggaagtcagaagagaagtttagagaggtatagcagaaatcaaagacatttgaagcctgagaaggatttgatgtaccattgttggcttcaagatgagggccttgtgtcaaggaactggatacctcagtcttgtagctgcaaggaactgaattctgccactaactagtaaggtgggaagaagtctctaagctgcaaataagaatcatagttccagccagtagcttgattttagcttggtgagactctaaacagaaaatccagttacatcctgccagacttctgacctgcaaacactgtgagacaataaatgagcattgttttaagcctttacatttgtaataatctgycacgacagcaaaagtaaactaaaacaggtagatccccagcagtgaaattgctagatcttatggtaaattaagactttgagaaactgcagtggttttgagctcaaggtgacatgatattttaaaaggatcctttcgctgagccgaaattggcctgtagggagccaagagcagaagcaggagaccagtgaggaggcaggcaagcrgggaggatggtggctctccctagggtggctcttccaagttggaatttggacagggcaatggatgacagaggcatctgcagcaggtttggccctctgctggaagtggcatggccrgagatggtgtggcaggaggtggtatcccagagccttggtgattgaacataccaaggccactggtgagtctcagtgggaggctgaggcatcagaggagagggaggtatgtcatggactcagtggtaaaagaaagacagtgtaaggtattttcccttttgtcactgcatacaagtaactgccattcactaccctgrgacagttgagttactggagggaggtgatggaagtttgatggaagaaaacaaacatcaaaatgaatagactgagagttgccttatgggagaattatcgtgtgatgtaataaaaggtgttttttttggkgggggaggggaatgtcattccaccaaaatgaatggtttagatgtgtggtgtagtcagtcagaatggctactagtaaaaagtcaaaaatagcagatgctggcaagattttggagagaggggaacacttatacactgctggtgggaatgtagattagttcagcctttgtggaaaacagtttggcgatttctcaaagaacttaaaacagaactacctttcaaccagcaatcccatgattgggtatatacccaaaggaatgtaaatcattctgccatgaagacacatgcacatatatgttcattgtagcgctattcactatagcaaagacatggaatcaacttaggtgcccatcactggtagaccggataaagaaaatgtggtacatatatagcatggaatactatgccaccataaaaaagagcaagaacatgtctcttgtagcaacatgcatggagctggaagccgttatcctaagcaaactatcctaaggaacagaaaaccaaatactgcatgttctcacttataagtgggagctaaacattgagtacatatggacacaaagaagagaacaacagacactgaggcctacttgaaaatggagggtaggaggagggtgaagattggaaaactacctatcaggtactatgcttattacctaggtgacaaaaaatctatataacaaacccctgagacatgaaatttacctgtataacaaaactgtacatgtacccctgaatgttaaataagttttttttaaagaaatatggtatattaatatgccatgcacatggcaaaatttctctggtacttattaagtgttaagtacaaaactttcaaaggatctagcttggtttaacctgagaactaaacagagttcctaatttggcttcttaatttgggtattgtaagttaatatttagtgctctgactttttgggagctaatttacaactcttactgatttaccatttctgcacattaaatgcatgtctggtgattaactgtattgttagaagtcatccttacctgactgaatcctataagttgccttaaataccaccgggtctttctataattattctttcctcccgtaggtactttagtgctcacatctccttagcctaatactccaagaagtgtctctgactttccatactcgagttaggcgtcattttgagatgctgccactgcactttatacatcatgcattcttttgtctttgttttcttttcatctgtctccctaacttgattttgagcttgaaaagttcaaggctcacttttcaccatcacagctttggtgcaaagaacttgcaacaggaaagtgctcagtaaatactgattgaattaaagcaaagaattgcagccatcacttcattgcatgccctcctcttctaaaaaatactgaatgtttaatctcttagagaaagattaagtgtccagagaaagtcacttctcattgacagaccttccagtccttttgacaaacaaatatggcagaagacagccccattatgttgaccatagacatgtgtgtgacacatctgcttaccaagtcttattttcagtattaacaaatagctgggtactacgtacttttgatcttgtgccttcttaatttatctgcatttttggactttactcttgagaaaaagaccaccatgggaatgactaaagaaagtgctaaccagcgttggtgacatgcgcagtaactccctttgcatcagcacacagagatacatgtgtgagaaatatctttattagaaaagtgactggatatccaagtgttaaaagattaagtattcttcagaagaagttagcaccatttaccttacaaggtaccagagagggaggatccttgatttcaggaacacaaacacaattcttaatagatacaggtggtcatattttcggaaggtatttcccaggcttcctgttcatatacccatttaggatgattgcatgttttccccctattataaacagctctaaacaatttcccacaaacagctcaatttaatttgacatttattgggttacacttgacatttccaagtgcaataggaatttttttttctccctgacaactcacttgtgaaattatgattgacggtctataatattcaactcaactgtgttcaaaactgaccaatgattttggaagatgaaacagcttcaaattttatgacccataggtaacgttcgcaccctggaagtagagataatagttaatcaagggacaatctctgccgtttgcctgttgtctcaggcttcatttctggactcagctttggccagcttccatacatctctcccagtgccccgaggaggcacttagcaaatgttgggtgaaagaataaaggtagccactttgaagatgtatctttcattatatttatctttttagcactcttttcctcaatttaatcaaaaaaagcttattgaaaaatttttcaaaaaataaaatatgaagaagaacaggtaaaattttcccacccagatgtaatcacttttgtcagtttgtggtgtgaccttccagacttacatatgaatgtgtaagtgcatacacacagccacgaaacatggctgtatctgtctgtgttatgaatgaaatatatatatcatggcaacaggtactggtgtgggcttctcctatgttgcttatctgaatatgctagaaaaaaaagaggagggatttttacgttgtattctttattccatgaagtttgatttttaaaaatgtattaggatatagttgtatagtagtaacataattaagaaataaagatggataaaaccataaaacataaatatattgagatttgctacagtatattctaatttgatggtttctcatttatttttatttttttctttttgttgactcacctccttgatttttaagtcttgtggagttgtactgactgacatctgtgacttaaatatttaataatgtgtctttctgtttatgtatctcagaataataggtaccattttaccttgtaactcaatgtcatgtgttttcctataaacaaggtaagttaatttttttaaacatactaactttatttcaaaggataacatcgyagtatctttgatatctgacgtggactttattttccattaccctgttcaagtttaaaaaatttgattttttctaacaccaccctgatttgtttgaaagcttttaggtgctacactgaaggacgttagtgcccagcttggaatatcactgtgctcctagaacagactttccaatcaggtagaaagagaagccaggacagagagacccctctgcaagtttcttggtttgtaatttagtggcagtaagcttattaacatcygttcgaattttacccctgattttatattgcacgtagtctgagtaataagatttttaaaaaatgatgggcaataaaacttgtagttctgaagggcagggtgttagcctatgattactgtgttagtctcatccaacttcgagtttcatctcagaaaaacaaagctctatgagcacttggcattaattaaattatgtgtagagaacttatttctacttaaattaatgccacttgacattctaaattcttctactcttaatcttgtaattgccttatcttgccatgatttataaattgtgaatatgagccctttaacttactggaaactcaattgtaaaatgatctattaatgaggaaggaaaatttttatttaagggtgaaataattttattttcagctttattttaattataaattctgatattgcacataacatactgaaattcctaattcctttctttctgaggaaattttrgggttgcaagatagaaattttagcctttggaaaacagtawaaaatcctagaaaatattctgtatgtgttccaattgatgccaggccaggtgttcctggatcttcttagagagcggcaacactggtgccaggtcaccccaacctcccttggcctctccgtgttgctctcctgcctgggaaccctytttctcctctgaggcccaggttcagtcccatcagaccctctgggtctcaggctgttcccgctaatgtttgactgactttgaccagtgagagaagggagtcagaaaaagcctgcagataaattccttgccttgtctttcttcctcatctccacccttcttccttcagggatgattcccagacacagtggttcgtatggcctctctagagacacccatctcccataaccaagcttccggaaagctgtgatctccggttcagccgtggtcacctaggcaacatcccattttgcattcctttccttcctccctggcctcattgccctgtcccctctctttctggcttccctgagattctactctcacataagatttggcatacacatttttcacatgcttttgctttctaggtaagtcaatctaagacattttgaaaacataaattctcataattattttgtctaagtacttattggaaaattagttccagcaggcaccagcttactcttgattagttgccactatttctttacctcttggatatagaataggctttaaaatcatatatatgtatatatatgattttatatatataaaattttatatatataaaatttttttatatatgatatatgtaaaattttttatatatgaaatatatataaaatatataatacatattactctgtgttccttatattattgagtttatgctatttattcattgtgtaacttataaatcaatcatcttaaccaaaagtagatgtgattttgaagtgttaggagttaaaaatgttgaccaaatcagagataaaagcccagaaagaaaggaagatacaaaataaacccctggtcttccccccttacttcacctgctctcaccaagcactctgcaactgatgatgctttttgaaattcagatttgacaccttctcttcttcctattgctcttaagatcttgagagggtatccttcctgatcttggcctttaggtctttgggcaaatggaactataaktccattgttcagtaaaattgaatgagaaagtgcatataaaatatgtagcatgatggctggtagtgtggatgcccctttacagtaggggtgtacctggctgcataccactttctgaggctctgaagagttccttgccttctttcttgccattcctgcccttatttgaggaaaaggatccagggaagacagaggctctggtagagattcttttggctgccagatttttgccctgagcaaaatgtgttaggtctccacaggttgaaatgccaccagattttaagaactctataatatgaaaagtcttttatttagcatttagtagctgtgaaaatttaatgtttacatcagctctcctcctgtgtcatttccatgtatgtcttcttttacttagtgcaattcgttttttttctctctmgctcatgattctacttaaacttatgaaccaagctctgctctgagtcctaattattttgtagtagagaatattccttaaaagtccttttatcttatttgtaacttcagtataagcacttaactttttttttgttttttgagacagtctgtctctgtcaccaaggctgaagtgcagtggcaggatctcagctcactgcaacctccaactcctgggttcaagcttttctcctgcctcagcctcccgactgggagtactggcatgtgccaccatgcttgtctaatttttttgtactttttagtagagatgagattttgccatgttggccagtgatctgctcacctcagcctcccaaaatgctgggattacaggtgtgagccactgcacctggccagcacttcacttttgagtgtcctagttggacttaattctttccttagaccatctacctgggtcgatcaatcagtagagttctttaaactcaggtggttaatccattttgggctttttgtaaaaaaaaataaaataaaaattaaatgactgatattgacaagtgaagtttatttgaagcatttggttatcaattcttagtgaggattagaagtgttcaagctctgaatcaggtgaacctgtagtattttctgtcttctcaacttacatgcttttcgcctccaacccagtttgagatatttttatttagttggcagagtgagagtaactctcaactgaaattcacaaaaatcaacagttgggaaaaatgtggcactcagtaagtttcttcgagaaggtttctatttccttaagatgatctccatcttacatagcagagcagttgtctcaagcggagggtgttcttgacatttccctaaactgttgcagctcttcaagattgctctggaaatttaaatatatttatctcaattcatctattttctatttaaagaggagaatgtttcaacacacttgtgaatgggaaatacttctgaaaactctgttcaattctgaatcaagaaaatttcctaagtctaccttttttttttcctgttaaaacttggaccaattgtttactggcccacatgaaatacttctgtgatttgctttatacaaatcctaccatggcatactgtgtctctctcttcagagagtcgctaggttataaaggaacaatatccctgcaaactcaatgagcctgtctttcagacaagtcttgatctgggatttcttgagamctgtgttgacctgtgttatctgtttgctactctgttgattggagtatttcttagttattattctcatggcaatagtcatgtccacagaaactctgctgtggaaatagcaaggagacccatcttttccaatatattcattcagctgcagttayatggaaattcaagataaaaaggactcagctgtcagtgaaagaggattcccagtcaaggcccctgcatggaggtacctatatttcacgtgacaagaatggcctgatgataagtgcctagtttctctgtttcagtcctttaggaatccagagaacagctgccccyagaatccactagaattccactagattcatgttatatcacccattttcttcaaatctgtctaaatgagatggactttttttattcttaggttcagtagcaatagcataattgtaataatttcccaagaacacatgcttcctaccaggataattctcataggtgtccttgttggctagctttcttttttaataagttattcttaaaacaactttatagaaatgcagtttatgtatcattaatttacccatttcaagtgtataattcagtgatttttagtaacttcattgagttccacaaccatcaccataaattacttttggaacattttcaccctcccataagatccctaatgcctgtttgatgttaattgccattctcacccccagccccaggcaacccctcattcactttcagtctctaagtttgccttttctggacattgcatataaatggaatcatatgatatgtggctctttgtatctggcttcrtagcatactgtttttgaggttcttctatgacttggcatatatcaagagttatttcttttgtaatgctgaatagtattttattatgtggataatctgttcaccagttggtggacatttagattgtttgcactttgaggctattattaataatactgctgtgaatattcatgtaagtctttgtgaacaaatgttttcatttctcttgaatagatacctaggattggaattattggatgatattagctctatggttaactttttgagaaactgccaaactttttccaaagtagctacaccattttacagtcccmttatcaatgcatgaaagtttctatttctttatatcctcactaacttttgttgttttctgtctctttaattttaactactgtagtaggtagagagtgatatttcactgtggttttaatttaycttttctaactgactaatgcagttgaatatcttttcatgaacttactgaccattcatctaaattctttggtaaattatctggccatatagtttgcccattttttgattgaggtttgtcttattgaattgtaggagttattcataaattctggagaaaagtcctttattagatatgtattttgcaaatactttttcccagtgtgttgcttgtcatttcatgtttctagtagtgccatttgaagtctataagttgaattttaacaaagtccaacttactaatttttttctgttttggagaatgcttttgatgttgtatctaaatttttttttacctgagtcacatctcgaagatttttctactgtatgttcttgtaaaagtttattattttagcttttacatttaagtctgtgaatctatttggagtcatttttgtgcatggtatgyggtgagagtctaagttaaaattgtgctattgtctctaccattttttgaacagaggatacattccccaataattgccttggcacctttgccaaaaatcaattgactataaatgtaagaatttatttctggcctctcgattctgttccattgatttatgtatctatctttataccatgtggtcattagaaaagtagttccccaaagacgtccatgtcgtaagccctggaacctgtgaatatgttatttatgtggcagaagggactttgtagatgtcttaacaagtataaacgtttagatgagagattatcctggattactagggggacccaatctaatcacaagtccttaaaggcagaaaacctttccattttaggtcagagatgagagatgaaaggaggaggaggtatttgagcatgacaggggcttgacctgtggttactggctttgaaaatggtggaagggggccactagccaaggaatgtatgtgtcctccagtagctgagaactgtcagcaaggaaacagggatcttagtactacaagcccaggaactgaattctgttaatcacctgaatgagcaatgacacagatgctacatagtgcctccaggaaaaaatgtagccctgctgttgttgcaggacttttccttagttcagctaaagatggggctctttgtcccacagccacaaaaattcaggctcgcagacaatttgaatggtgagtaagacagggttttattgggtgaaaaagaaaaaaaaagggggaaacaaggattctcaccaggccaagtccctgatagagcgcttcccaccaggccgtttgaatcccaggtttcacacaggaaaaggaggggccaggctgctttctgctggaaagatcctgaacttctcgaggctgtaccccagtgggcagactgggtggagtttctccagggaccccctcccatgtggctgtctcactaataccttgattttagcctggtgagaccagtgttgagtttctgacctacagaattgtaagataatacattgtgttaagctactaaatttgtggtaatttctaatggaagcaatcaaatgtaatatatgtcagaaacatggtgacgtgattactgttaactttattagaaagtttgaaatttgaaagtgaaaatttttcaatattcttttccttttcaaattcgttttggcaattctaggtgttttgcatttctgtatacattttaggatctgcttgtcaatttctgaaagtaaacctgctggtgttttgattagagttcatgttgatcctgtacatcaattgtgggagtatggccatcttcacaatattgaatcttccagtctgtgaacatggaatagctctccatttatttagatctttatttcagcaatattttgtggttttcaagcgtatgtctttcatttcttttgttaaatttatttctaagtattttatttttgatgctactgtgaatggcattactttaataatttcatttttagattattcattgcttgtatgttgaaatacarttgatctttgtatcttttattttrtatcctgtgaccttccttttcttgtttattcatgcaaattgtgtttaaaattgattccttaacattttctctatacagaactatgtcttctgtgaataggccatgttatgtctttttgtttttttccagtgtgaatgcctttttttttccttccttgcctgcttgcagtggctcaacctctastaccatgttgagtagaatcggtaagaggcgacttccttaccttgccttytatcttaggggagtagcattaattctctcccagtaagtatgatatttgtcatattcctggctgttttaacctgtagtctgtggtgtggtgttgcaaaatgcagagtagcttcctgctagtaagaatctaacctgttcttactgctctgggttaaatcattcattaacactgagagagtacatttttttactgtgcagggtatagctgcaagccaagttcttttgttgaacaattgtgtcctgcatatatgtttgtaagaacactgatattttaatgttgttgaagctcaagcagaaattagtagtactgctatttataggctaaagaactatttaattattcatttattccttcttgtatttgttcctccacttggtcttgtattttttcatccatttggccatctgtatctcttttcttacatttatccaagaatgatgaattaacatatacagtgtgctaggtgttgtgataggttggggatctgagggaaaagttactcctgtttcttggggaattcactttagatgtaggattgtaggagacacagacacaaagggaataaattaaacctttttagttctcagatataatatgcatagatagrcatttgacctgaataatgtctgatgtggggcaatttgtaatttcctggaagatgatcataaaggaaggagctgcctacctggcagttgcatttcacaggtggttgtattaggtggactacaatctcctttctggattgcttgattgtttcctttgtcattgcctcttatggtaactctcatatgtgatataaactttgtttctctgaagaaaatggacacacaaggaagccacccataagtggtgataatggaaggaaagagcaacatgtggtcttggtaagagaagacaaattttgcatagaaagaaacatttaatttgttagtagcccacatttatgagatccaggagtcctacatctgttctaaaccaaagaaaaagtgatttgtgaccttttaccagtaatctagtcagtgcaaatattttttataaaatgttttacattgtacaaggaaaattaaatgatatagggtgaacatttagccagtgtttactgtggtctaaatagtttgctaacttgttctaatatatggtcttatttcttctgtaaataattctgtggaatacatgctattttagtttcatttacaaatgagatagttgagggccaagggtttggatatttgcctgacattaaacagaagtgwtttatgtggaattggcatttggacactggcccttagaattcagggtgctattgtctcactactccaagagttgttgtctcagacctggggttcatccggtaaatgtcaacagtctaatgcagggtttcttaaacctgatgatgtagacattttaggtcagataattctttgctgtgagggctgtcctgtgcattgtaggatggttagcagcatccctggcctccatcccctagggtggaggtggagtactaggtgccagtagcatcccccagttgtaaccaccagaactgtgtccagacattgccaaatgttctcttctgtggggggcaaaatttcctcaggtttagaatcactgtaattaccaggtaaattaggattacatcctgtggtatactgagaaggaaggaaattatgattaactctgtttagggtagatacaagaaatgttgctgagatagtgacatctgaggtttcatccctacatggaattatccaaactgcaaaattagagggcccagtctccaagactgtctttacttttcacactgactgcaagtgtgaggtttccccaaaacaccctcagtttcaacagtttgctaaaaggacccacaaaactcactgagtgctcatgattactattacattacagggaaaagatatgaaatcagatcagtcaaagaaagaggagacaactaagttggagtttaggaggattctgtacaccaggtttctgtgtcctctccatatggagtcaggatgcattaccctcctgtcgttaatgtgtaactgtatgtacagagtattgccagccagggaagctcacccgagcctcagtgtccagagtttttattgagagcttcactatataggcatgatcaattgcctgattgcccatgtggttgatttcagcctctgtgttccccactgtaaaacacatgattgatctttctgtcatgcccagcccctaacctaagactattggctgtagctggccccaccttaattgttctttcccaagactaacatattcccatagggatgacatgggttgcctcctagaagttgaggacaaaagccagaccaccctttgggcaaggccagattttctactacacagtccctgacaaaaggaacaaatgtgcatttgtagatgaagtagtgtggtacgttgccacaggactggcaattcagggagaatgtaaatggcaggcatattagtcagctagggctgccataacaaaatgctacccactgggtggtttaaataacagaagtttatttttcatagttctgaaagctagaagtccaagatcaaggtattgattccattctgaggcctttcttcttgacttgcagatgattacctccttgctgtgtcctcttacggcctttcttctgggcactcctgtccctgatgtctctcccacttcttataaggacatcatcatcgtattggattaggtcccttcctaatggctttattttaaattaatctcctctttaaagaccctgtctctaaatatggttacactctgaggtactgggggttgagaattcaatacrtgaatttagggaggtttacaaacagcccatagcattctgccttctgcatgccccctcccatccctgatttgtttcctcttgcatgtaaaatacattcaccctatcccaacagcccccaaaatcttaacccatctagcatcagctctaagttgaaaatctcatctaaatcagccatggatgagactctaggtgtgatacatcttgaagcagaattcttctcaagctgtgaatttgtgaaaccagacaagttatctgcttcccaaataggcgaacaggcatacaataaacattctagtcctaaagggacaaattagaaggaagaaaggaatcctggggcccaagcaagtccaaaacctagcaggacaaagtccattgtattttaaggcttgagaataattctctttgtttccatgatgctctgcctctgggcccactgaggccaaagtccagccttctgggtccacttgggcagcagccatgccccggtggctctgagtgatagccccgcccctaagagtccaggtgagagtaaatatgatcagatctgtgtataagaaaaagaaatattgaatcctacttgatcaatcttcatttgcttggaggttacagtctacttggggagacaggcatctgggcaaatagttgtaacaaactaagaaatagtaaactctatgagtgctagaaagattatgtcctaagaatttagcatttttaatctggaatatcctcagggatattttgagatttttgttggccatgtatcttgcaggaaattactgagttaatgaatcatgaaatgagagaattaatgcattagctttggtaagcttgataatttcaggattccagttaggataggggtggggatcataactgaaaagctcarcggtacaatcatcgttcctaaatatgtttctaatacagtttcaactataacaatcttaactctgacttaggaattgaaaactgaaaaagtggaaactccatatagctctaaatttgttcttagagctttcactctttattttattttattttattttttttgagacggagtctcgctctgtcgcccaggctggagtgcagtggcgcgatctcggctcactgcaagctccgcctcccgggttcacgccattctcctgcctcagcctccccagtagctgggactacaggcgcccgctaccacgcccggctaattttttgtatttttagtagagatggggcttcaccgtgttagccaggatggtctcgatctcctgacctcgtgatccgcccgcctcggcctcccaaagtgctgggattacaggcgtgagccaccgcgcccggctcactctttattttttaaaagcttgctgctctaggaagaatgagggaaggtaattttaatgatttgaagtttgtgttcagaaaatacttatgctttcttttaaaaagatgccacttaagttttctttaagaccaggatggaaaacattcattttctcacgttttctctctcatttatctctttctgtgttgctgtggaatctcagacttacataggatcaaagaatcatattactttttagtcttttatttatttttatcccttccttactttgctactttaaaatctattcratgctttcccttcagtgttgtagccagctgggtgtctccacttggcccaaaaccatgcccctcagtctgtttcatttgatggatcattttggattctccttattctcttgtcttttgtgtcacatgaatacccttttcttcagtacatttaagcccaacgatgaatgtttcttaaattgtaaccagttcagtgactctaataccacagttcttttgctgtcctggtctctctcacacacacaacagaagtcactgaagactggtcaccacgatgcccttgttcttacattttggtggaatttaatttgtgcagccattcttaagagagctgatcagtgcgtatctttttcttttgctgaggcggctaacagcgttgtcatcatcatcttttctccctctctgtctgtttttagagtcaagtacaattgaattaactttgtaaaatgatagcttcagaaaacattttcacaagaataaaaagacagattttctttgtatataaataaagaagacagtttatgctgggaaatgaatcttttaataaaacattgtccctcttccactttggctcaactggggaaaaatcaattttagggtcttcgaatgtgaaaaaagaacaaaaggaaatgaagtttttctgtataagtgggaataaagaaggacttgaatatagtggttgccaaaaaagttttcagattaccattttcctttagtctttaaattcctgacataggaggctgggcaaggtagcttatgcctataatcccagcactttgggaaactgaggtggcaggatcgcttgaggccaggagtttgagaccagcctggacaaaacgttaaaacgaaaaaaactagccaggtgtggtggtgtgcacctgtagccccagctactagggaggctgagacaggaggactgattgagtccaggagtttgaggctgcagtgagccatgattacatcactgtactctatcctgggtgacagagccataccctgtcacttaaaaaaaaaaaaatcctgatataggaagtatagttctgccatattaaaatgcagcattactttatatttaaaagtatttttaagtttccattgatatttttcctcctcccaccttttttttttcttttgagacaggctcttactctgtcacccaggttgagtgcagtggcgcgatcttggcgcactacaacttctgcctcccaggctcaagcaatcctcccagcttagccttccgagtagctgggaccacaggcacacaccaccatgggcagctaatttttttgtgttttggtagggatgggttttgccatgttgccaggctagtcttgaattcctgagctcaagtgatgcacctgccttggcctcccaaagtgctgggattacaggcgtgtgccaccatgcccagtctttcttgccttttaaaggaggttagacatactgcaattatgaggcataaaaacataggatggaaggaatctataattataaaggaaactattaatctttaatgtcctaggtaattgtatcttttaaatttcttaaaagtgtaatttattcaccacagagagaaacatagtggttcatctttacttctggtatatgcgtttttcatgaataagatataatttaaaattgtaagaaaagtgaatcattggaagatagtagaggaattgttactttgcaaaatccaccataaagccggttaagaaattatgttttttactttagaagaaaagcatgcattattttcagaatttttataaataatacatgatcatagttgaaaaagttgaaactcctttaagttatttttctgtgtggagatacatatgtatatgtgactattttcatatagatttatttcacaaaattttgattatactttatacagttgtattcagctttttttaacattaacatggtatatgagattttttccatattttaaaatatcccccccaaatgtaattctaatgattatactaaagtctctcatttgatgaattaaaacgtacttaaccattttcttcctgtaaagtttttaggatgattttaccactgcaaatttgcaacctgagaagtaaaaatataactttgtgaggtcaaagacagactagaatgttcaccgtattcggaaaatcagtaagatcacagaaaggctcatcagctgcctgatgcttgagtagctcactcaagtgcttgtcgttgaatgcaaaatcttgtcttaagtggacaggtgtgtgaatccttccaccgctatactctccttgcctgattgagtcaaggttgttactgtggtccctggaacagagtgtgcctcagtaaatcaaatataacaaaaggaaggaatgattttcagataggatagacagctaagatgaacaagacttttagaacatttccaatttgagcagtgaatctgccttgtggaagctcaaaatgtactttaagtgacagctgccgtgtagtgttcaattcaccctttttcaccaatgcatttagtagaccattgtggagaggctccaaggtgctaggcgctagtgagagtgctagggatacgttgtgaatgagacattgttcctgcacctgaggagctcacaggttatggaggatgacaaattactcttgtacaatatgataaacatcacagtggaaatttggataaattattgtggcaaccagagagtttacaaactttagctagagagtcagaaatgcttctcaggggcagtggcatatctcatgctgttggcaatgaagggtatttgtttatatgccaatgttacacagtttgtacttaagccagtggccaatgaaataggttagtttttaattttttaaaagtatggcatatttgtattttaatagctaatattgggttatacagttggggtaagactgaaataataaaataactacttttcacatagatatttccaaggcaccctgtagtgctacagtacattgatttaaaagaagactatattgtatttagtagagtttttattactaactctatataaatcaggaactatatagagtatatgtgactaaatcaaatagtttatgaaattatttgtgtggaatgacctttctcccctagacataatcctagtgaaatcaaggaacctgttttatttgcttccttatactcagcacctagtgcagtgaccagcacgtagcacatatttaatgtgtttccmtgtcaaaatactatttaagttaagacttgattgagtctgttaggtaccagagtcactcactcattactttaatttcaaatgctacagtttgaaaacttaatgtatgcttggttgttaaaaaaaaaaaagcagtgggaagaatagaagttgtgttagaatacaaggtacattttattttcaccagaaaggaaaaatattgttstaagattataaatagcacgaaaggcttattttaattattttaaaaatatgatacctttccactgcagtacctggatttcaagctctgactcaggggtgtccagtcttttggcttccttggrccatagtggaagaagaattgtcttgggccacatataaaacacactaacaatagatagctcatgaactaaaaagaaaaaagtgcaaaaaaatctcataatgttttaagaaagttttcaaatttgtattgggccacatttaaagctgtcctgagctgcatgtggcctgtgggccacagattggacaagcttgctaactgttttgtatagaatctgaaacacagatgattaagacagggatgcatagtacctgcaggagaggattttatttagtaactcatgtccattttggtgaatgtagagtttatacctgtggcgttttgtttctaactagtttcactaatacagtttgccatgctgacatatttccttctctgttttggtagattactttgcaggttgctgaaagtctaagtcaaggtaaagtgtgaggtaaagatcagagtgagtactattaatagcgaggggaggggggaaagctagtgagccctgtagatcagctcaacaaagtgtatatgctggaatccagtactttggagataatcttccaagtggaatgcagtccaaaaaatggacactattacttcctgtgctggcagccgctctgtttacagaaggaaagagtatgttcgattggtcaaattacattgctgttgcagatacacttgatttttctagtaggaaaaattataatattcttaatgtttttctctttttatccctctccctctattctttcacagatatcacttaattggcaaaagagagcttcagggacaactagtacttcttttctttttcttttttctttttttttttttttttttgagacagagtctcactctgttgtccaggctggagtgcagcagcgagatctccgctcactgcaagctcgcctctcgggttcacgccattctcctgcctcagcctcctgagtagctgggactacgggcacctgccatcactcccagctaattttttttgtatttttagtaaagacggggtttcaccgtgttaaccaggatggtctcgatctcctgaccttgtgatctgcccgccttggcctcccaaagtgctgggattacagacatgagccaccgcgcccggccaactagtagtacttcttttctagcatatgctaaagttcagttgcaggctccttaagaagttaagtgagccccattcagcctaaaagggagcatattgtacattgtgttctgtactttgccattttttcactgaacaatattttagaggtcagtgtatagggaacagcttcattcttttcaaacgcttcatggtgttctagtttatggacgtatcatatttacttacacatcctcackgtctcatttttctcactattcctgttaaaggctaaatgtgttattctgagctagttgaggacttgaaacttagggaatgaggaacaatagagcattttacacatgacgggccttgttcaaagtcagaacaagaggcttggaactccttaagagaccatactgtttttcactgttcacagcagttagaatcccaaaactaattttctaatatagcgatttctggctctggttttgggagtacccaaggtattttccagtcagattctgtggtattgggacattttcagagaatacattaaaaaatgtatgtattatatattatgtatatatgtattatatattaaaattataaataaactataatagaaataattaaaataataaatagaatgtaaatcgtacacattataattcctaagctatatcaaacatataattactttattaatttaatcattaaaatgaaaaatgtgtaaattatatagttttccattttagaaattacggtattaaaagatatagataattttttatatgtgtacatacatacacagttcactaaggtttgcaagactttttagccttaataaggataatactaatagcagtaatagtagggactaccacctactgagcatttaactatgtgccagatgttgtattraggcaatttataaaaatcaagtcatttaaattcttcagtgtcattatgaggtgaccagagtggttgtcttcttacagacaaggaaattagtgttgaaaaagtgtatgcaacttgccatacacttgaccattaaccatcgtgctgcatctttattacataaaattgggggaatgttttgccaaataaaatctaaattggaggccgggcgcagtggctcacgcctgtgatcccagcactttgggaggctgcggcaggtggatcatttgaggccaggagttcgagaccagcctggccaacatggcgaaaccctgtctctactaaaaatacaaaatttagctgggcatggtggcctgtgcctgtaatcccagctacttgggaagctgaggcaggagaatcacttgaacctgggaagtggaggttgcaatgagccgagatggcactgctgcactccagccttggtgacagagcaagactctgtctcaaaaaaaaaaacaaacaaaaaaactgaattggagaacttgggcttttagggtatatttaaagtgcaaacatgaaggaatgccactatgactgaagattacacaaggaagagtttacagtgagaatgtttgtgctctactggactctaccctaagggaaggggggatgaatggtcaattgatgtctttaagtatttacagtagtcgttcatcctctcactgacctgttcccatttcccccatcaaaaatgcagaagggagtaggggcaggggtgtaggaagaggggccaaaaccttgctggaaaccaaaggcttcatggataagtgactgataagtagaggaggaaccttttcaaatgatgtattgagcttttaaaaccctacagtgtaatagcaaactagcaatacacaagatttatttgtaagaactctgcatrtaagtgtgtgtcatgtgtgcatttgtctgccttttgaactggtatgtacaggaataaagaatcctaggatactcatgataatgacagctatttaatttcctttgaattttgattatgcaccactgaaaagtgaaactgcaagaatttctttagtcatttttatggaagggatgggaatagagtaggggggcaaaaagaaagacaaaccaagagggaatggttgattgaatgttgaagggggacttgtttggcctaacatatttttctaaatatttatttttgctggaatatgaagatacacttaatcttccagctcattttttgttggaayggttatttagcaaagcaagtagggggctgctgttgctaagctttttgttattattttgccacacaagaggatattttttaaatagttgttgggaactttaagacttgctgagcaggaaatgccacatgtaaggatgtcttaatgttggcagtgtttttaatgcaagaaagcaaaagatgttaaagacccacttcattttcttggtgctcatctgtgtccaccagcatgagagtaaataaatgtggtatttaatgttcattaaccctttactacaaaaagataataggcacagtgcttgctacagtagttctgaccagtgcagtttgtaggagtcactaaaacaaggtgcaagcagcccctgggaataagataaagctaatataatactaaatgactgagaggattgtgttgttcttaccttaaggaagaaaatgttagccatcaaagaggatttttttgtgttcttttagcatctygtggagtcagaagcctagcattctagatgagcaaagtacacaattgcgttagtattaacttgctgagtttgtgtttgttatgctggttttatattcattttgtgagtgtgggtgaggagggaaggaaaaaaatggagttgggaggggagcttatctgttttaattgatcactgacacctaaggcatctcaaggctaggcagaaactyccacgtcttgctgtttcctaacctgaaggagggggagagtttgtggttccagggatatgaaaaggaagacctggtgtgatgttctgtgtgtgaaggagttacttggaggaggcactagaaaagcagatgaggttctcccacactcccaaaggctgagtttactcctggggttgggggcatagtgaagagaaccatttaggtatcctacacttacctagacaccaagacttgtacattgtacctcaccggctttgtgtattaataattgaacccccaccacaatgctgtgaggaggctttacttaccttcctggttgagagaggacatctagcttagagacatctcttgcatagctagtggttggcagactcagggcttgaacccagatctcacgttctttacctaacatggctatatttatttcctagggctgccatagcaaagtagcacaaactgggtgacctgaacaacagaaattgattgtttcatggttctggaggttagaagtccctgctcaaggtggtggcagggttggcccttctgaggctgtgaagcagagtctcccaaatttctcattttttaaaagatactattgtattggattatggcctaccctaatgatgccattttagctaactgcatcttcaacaactcaatctccaaataagatcacattctcagtttctggggattaggacttcaacaactgaattttcagaggtcctgagacacagttcaactcctaacatggacttagagtttttcttccttgtagccattatatagatatattttaaagatttaattttttagagaagttttaggttcataacaaaattgagaggaaggtacagagttcccatatacccctcccccgacaactgcacagcctcccccaataccaacatcccccaccagcatggtacattcattacgattgatgaacctacattgacacatcatcagkccaagttcataatttacattagggtttactcttggtgttgtacattctatgggtttggacaaatgtctaattatatatatttgtccttatagcattatacagagtagttttattgccctgaaaattctctgtgaaaaattctctgccattataatttttattggtaaaaattttgatgtcagtttcacaaagtttcacctctgataattttatttttttctttacagtaaacatatagatggtagtctggctctgtcctcaccaatatytcatcttgcattgaaatccgaattggagtcccctccctgtatggagggaggaatttggtgggaggtgattggatcatggcggtggtttcccctatgctgttctcatgatggtgagtgagttctcacaagatctgatggttttaaagtgtggcacttccttgtgctatctctctctcctgctaccttgtgaagaaggtatttgcttctccttcaccttctgccatgattgtaagtttcctgagacctccccagccatgcggaacagtgagtcagttaaacctctttcctttataaattacccagtctcaggtagtatmtttatarcattgtgaaaacagactaatacaggtagttttcttactcgttcatactacaatcgaaaaagacctctgacctcttactctaccttctcatggttccttctgccacccttgtgcacgtatgttagctgtagaagggatttgtcataaaataaaaaataatgagatttagtcatgttttcagcaacgtagttaaggtattctttagagtaaatctattaatacattgtgatattatttgctcccacataaaaacttgatagttttaagagttgaaacctatatgaaagactaataaaatcaaggatttttattttttgtcacactgcttatcttgaatagggtcttgatatgtttcattttttattttttaacctcccagctgatgattttaataaaatagggcccttgggaattaacaaaattataccatatggtaagggtaaaaggatcattgatctggttaacaaaccagcctgagtttccaggggagcgaccctttctccagccctcctcagccttggacagttacattattgcttaacaatcatcatctgcttttagtggaactgcttatttttctccttggcttgggcagattgccccagtgtttcagatactgccttttggaaacggatcagtaggaaatttctattaccggaaatcatctgtttctgaaggagacaaactattcttttcaactcaactcactcttgtgaaacagaaagcccagcactttctcacagctgctctaagacagtccagcagggtaagaacagtgaggaatcaaatgtactacaagccaggtgggaccatagtccaccacggccaagcaagaaactggaatatccatgccacaaatgtggaaagtggggcatcttctttctagagagctaccgaggctgttcaaatttcaattttctctgtggcatgtaaaccgtatttttttttttttttttggkgtcaaagaatagaaaattagttttaattgtttcttatgaggcaccatatggctactctataattttggcttyccatggagctgcatgtgcatatggaaaatgaaattaattggaaatcacaccctgaaatctattattaagttaatatagctaacagcttgtggggtgtcctcacactcagcatgatgtaattgcacataataataagtaactataaactcatataggagacaagccggaataaacagaggtcaaagggacaggctttggaagggaagagcattaataatggatggtgcagcaaacgtttcagttcctcaccattcacaaacccagggtagagggaagcagtttaatcatattcaaatgaattaatcagcagtcttgtgaatttcacagccaasggactgattgttattttgcaaactagtgttctgcaagcctaaggtcactcttggtagaatcagtgacagtgatttttcagrggtgcccaaacttgcctgtgcatcaaaaccctctgtggaactcttagaaacactgaactctgaatctaattcctgggattttgattcattygctttggatttctcaattattaagatgcactacaagtgattctgatgccgctcagccatggaccatggaaaccactgatttcagtgatatatcatacagctctatatatttaaatgataaagactacagctagtttgtgttcagtttccctaatgtggttcctaaccttataacagaataaagtaagttcaaataaaaacatgaggtctgcaacttcatttggtaagcccagaaatagtgaacaaataatttgatgtcatctgtgctttttatgaaatttgttagtttatgggtctgtctccttgggctcagtgagggcactggctgttttattcaccttggtggtcaggacgtggtaggaattcaataaatgtttatggaatataaattkgaatatgaaaaggagcaaaaaggttattctcttcattagaaacatcagaacgatctctgttcatctcaaattgatgctaagagccatgttaygtctatgtaatatgtgatattagtatttcttaaaatgtcacctgagtattgtagaggtagagttgcatgcatttgatactaggaaggagattcttcctatcctttattcctcttccagtgagggagaagtctgcaaacattaagttatacttaaaagaaacatgtctagaattctagttgggagattcattgaccagacttttggaataaacactagtcatcatgctagcgacaggtggtcttgtgcatggtagaaaggcagtccaagcctatgtctctgaaacctgctctcatttctgttttctactttacgatttatgttatctcatactccccatgttgcctgttctccagtttttttacttgtgttatttccattcttctattcctgctcaatttctgcctcagggcagaattgtgtccaacagctcttaaatgcagcgcagaaactgtgatgttaaaaacatcttgttatccggccccaaaacatgctgtccttggtaactcttactggtttgtacataaagcaggttgggatctcattgatgggctagtgggaaggagataatggtgttatagcaaaaaactgcagcagagacaatgggaagaaggtctgtgactttagagctgaacaaagccaagaaatatatgcagatacagtaggatgttttgtggcttgaccagcagacaccactagctgtctctcagggctcccgctcttcctgaataatagagccttgatattttaaaaatttaattctctattttgaaataaattcaagcttagggaaaaattccaagtacaatatagacatctcccatatcattttcatcctgattcctcaaccgttagcatttgagaggaagctacaaacgtgatactgcatttctgctaaacattgtgggtatgtatttcctaaatagtgaaaacactctcctacaccatcagcattcagccctccaagtcaggaaacagtgttgatgcactgctgccccccaggacacaaagcccactgaaaggtcaccagctatcccagtggcgattgtccttcttttctgacccaggatttcagtcaggaacacatgtcacatttagttatcatgtctattggatctcttctactctggaacatttctttgatctttccctgtctttctagtctttgatagttttaaaaaaaagtcaggtctttttctgtttagaacgtctctcaacctggatccatccagtgtctccacatggccagaatcaggtcccccactcggggaaaatgccatagaaatgatagtcaagtgtttatatatgtcccatcagaaggcacatggcctgtcccactctgttcacattggtacatgccaggtttctccaccttagatttgacatttttcctttgtaagtgatttgaattttgtggggagatgttctgagattatgccaatatcatggtccttgtctaccttccacccaccagtcttggctttcatggggttgtcaattggtattctcatttccatcatttgctggttggtattttagtataaggaagagcctgttcttctaccttatttatatcatcaaagacttacgaattcttgttttattcagtggattgtctttcatttctaagcctttttgacatggcttcatcatttctttaaccacttccttactttatggcacaagatatctcaatgtcaacttatcccttttttgtcccagccctggtatcagccatttctctaagaaaccctggttgtttttgggaaagattgtatttagaaactaagatctgggcacttgtttgtgatcattactgttgaggcattactgcttttaggccatctcaggaggtagtatgtgtgtatagacatacacaaacacacatatatgtatatgtaagtatacacacaaatatatatgagtataaaatatacacattcattttaccctccctatgtacatttacatacataaacatgcatctgcaaccatttatttgtctacctgtgttaccaaaaatattgggtttatattgatacttccaatttcattcctaaatctcarggttctttctagcctcctacctttccatatttggaagttcctccaacagcaagaaacttgctctcatcctctatatattatttccttaatttactgttattaatcagtgtgatcagtttcccagctgttctgtctcttctgcccacaacccccgtgctctccaacatcttcagttttggggtgctgtcagatatgctactaccgtgtctttgtgaggaagctccccaacatccctcagtgcctgggtacttgatctccagtatgcatgctgccagtatcttcacaacacttcttctacccctcagcacttgtcctcacgtactaggggacctgtcactttttcactgaatatatggctacctggaataaattatttcccaacctcccttgtaactagttgtgggcgtgtgattttattatggctactggtagccagtatgaccatgaagtggaagccatatgttgacgaactgtgatcattatgaaattgcaactccagccctataactcaccttgggacttcatgtgagagaaacagaaacttctctctcttatgtaaagttttcaacgtattattttaattttttggtcccttaacagccaaaccgaattataactaatattgccccttctagacaagaaggaaatgaaaataattctgaattcagtcaggcagtaaagaaattcataaaggagtgtagcaccaaatttattgaggttacagtgaggggtttgaatttaaatctccctaaatcaagtgacacaatttatagaagtttgtaagaattacagctgagtgtaaagaattctattgcatgacatcaaggttctcaggcaattagaaagcaactgaaattcctaacaacaacaacaacactccaacaaaacaacattcacatggttaagtaaatgtaatagctttagccttacagagggtagctgacttctctctgccaaaatcagacagaatttggtaaaaacatgtagtagcacatcctgagggaaccccgggatgccatctttgagatcactctgtatggggcttcccatttgtcttggcaactggtaaagatagctccaacctggctatcaagagcatgcaaaaaatcacacctaccccgaccgagagggctaccccagctccttagagttgtgaccttgtctatgacatgggattcaaaagtatttagttactggttatgttacttttaacccaaggaaggtttagaatttagtaaacatgataaaatttctgaaacccatgataattaatgcttatcaattattagtaatctgcgtacattttttagttgatgtgtttctactgtttaagataactcggaatattaaagtaactgacaaagtagatattgattctactttctatgtttagttgagtagttaccattactcttgtaatttttatgttgaaagataaagtttttgacaaagattataaacaatattgcaatgcttttaaagtatatggaatcttttattttaatttgttagggagttactggtgcaatttaatacttagtagattttgctttccaggtcagaaattgaagtactttaagaaaagaaaatgggtataatgagtttgtaaatgcagtttaaaatgtttaagaaaaattaaaaattaaattaaatttgtaaatgatactgattacttaagggagtttagtgtatctaacttgaattatttaagtccaaaagcccccttgaaagtgaattacattttaaacttataattttcagcttataagtagaatgataagatttgcaagttgaactcaaaggctacaaaaaagatgaagttttaaacatttgtcactttattaaagcaaatatttaactgaagaccacamgtggaccctttgtggcaaagccaccatggacaaagggaacaattccctgctgcagtggccatgatggaagatctgtggtggacaagagtgctgtcttcacaggggctggatgccacattggatgccaaagctaatttctagtgtcattgtctgggctaagatggcaagattagggattgtcagccttcagtacctgatctcgatgccctgggcagcaagataacattcatatccacttcttggttgggatgggagatgtcatagaaaaagcatgggctgtcttactgtctgttgaattctggtgtttttaacaattaattgatgacaataatttctaaattatgtgattaktgggtggattagaagtaatacacatacaaagcattcagtatatttcttatcacctaacaggtgttcagacaacagttgcattttttaaagaaagatgatgagactgctgaaatagcttacaaatgatttggggccaaatcagataatttaaggtataaaacacacagtagtttacatttatcagtcacttgaaatgttgccagacattgtgcaaagtctttacatagattgcatccttgaattctcccaataamccatgagatatttattgttatactctgttttgcagatgaagaaactgaggtttatggaggttaagtgacttatccagttttacacagctaagtagaaagagttgaactggaatggcaatccacaaaatctaatgctagactactgaactcaaatccacgttctcgtattcctatgttatagacatccatgtctgcagtaacagtgttgcagagaagttaagaccagccagtattgcctttactttgcagaattgctctctgacttttgtacctcatcaattcagactactgtctttttttacatgcataataaaagtactacatgaatacaccaatagagtgggccttgttttattataatttggtatattaagtcacaaaaatgtttggttaaatagacagtaaaaggaattgtccttgaagccattaatacatgtgagatacgtgatgggcacagcctttcatatagcttgaaaggaaaggtttttgttttgctattattgggtcattgtgttttccccattttttcttttttctttttttttttttttttgagatggagttttgctctgttgcccaggctggagtgcaagtgttttctccattttaattgacagtcagtttccccagaagccatcatcaggagttctggtcatatttgatactgggtggcgtggcttcttgctgaccactgtcacatcatgttcccaccaacttcttatattcacctgagcttgaataggtgagagttgtgggtggcctcttagcaccatactaaggtggtgtggataaggtttcagctctggctggatcttgtgctctggagttgacagctgtgtgatattgggcaagtgactttatttcttaagtttcctcatgtagaggactgctgtgaagataaacgaggtgaggtttgtaatgtcctttgaatagctcctggtgcatagccagtggtgagtatgtggtctccttaagacacagaacaacagtcccaaccattatagtaacaataatggcaacatcagtaatggcactgaaggacagatagctgtgtatgctcactctgctccacaaaacgccagccaagcttcagtgtctggttgcttcccagctcattttccctccctcccaggctgccacagggctggatcagtccctgcatcgatgttgggggagggatgtgctgtgctgatataagcctcagcctgctaatgaggcccaaagttgagcagctccagacggaatcaagtgttgtgttctctgccagaaaatgtggtggatttccaaggccaccagcactagcggcagccatggatatcaaaagggagactatcgaaaagcaagacaagacacaggccttgggtcaaaacaaactatcaaaacataaataaaaacatggtgtgcatttgtagcaggcgaatcctatcaaggatccagaggtactcattttacacataaaagcattagtccatcagaaggtggcagggcagtactaaatgtctttagaatttgggcagcttttgaaggcatctaaccctttttaactttgtactgtctcatcaaccatctcatcaaccatgagcacattttacttatttctgaatacttgcaaaaaatacaagacgtgagtgttttatatattcttaacacttggcaaaagtcagtaatagattacttattacaaaaattattttgcccaataggcaacatatttatcattatcatctaccatttacttgatatgtataagtataagccagtatacaccaagtattgtgttaagtattttccatgcatttctgccgccgcccctgcccccaccccccgtttaatactcatagtaactcttaaacrtaagcacttttattatcagcttcattttgtagataagaaaatcaaggctctattcacttggccaaagccgctcagacccctagaaggggacaaagcgtgagttctaatccaaggccatctggcctgcagctcatgaacttatccactgcacctaattatctctggtaaggtatcttctttaggagaaatttaagacagatggtaaacttggtaagacagatgtacacagaaaggagacggtttggctgggtgtgatggctgacacctataaccccagcacttgggaggcttaagtccaggagtttgaggccagcctggaccacatggcaaaaccccatctctataaaaaacaaaaaaaatttccaggcatggtggtgtgcacttgtrttctcagctactcccagttacttgggaggctgagggaggatcacttgaacccgggagttcgaggctgcagtgagccatgatcatttcactgtaccccagcctgggtgatagagtgagaccctgtctcaaggaaaaaagaaaaaacaaaaaaaaggaagatgtgttaacaatcctgtttatagatcttagatgttggtgttgggggacacctcaagagagtgcatcacccctttctgcttcacgaaaggagtcaatgacttgagatgcagtaatgtggcctgagtctcacagagaccaatcatgttacccgcatggagcaggtcagctaattctggcaagtgcagatgtatgtgccccaggcccagggaagaatacggctggtgttcaatcagaggattagcagctgaattcagaagtgtcaattttgcccgttactttattttgagtcactcctcccatgaaatgaagaagtggtttaagcccagtagagctgaatggtgtctgtgtacacatctcaggcagctgatttaatctaatacgtaataagcttatttaaaaataactgtcattttccccatttgcagatacaatatacgttccttgtagcaaatttgcagtttaaaaaaaaaagaaaaaatttatccattacaacctttctctaccagtaatcagagttaatatcttggcatatttcattccagatttatcctcagttatagatttgtatatgtacatatatttagtggtatatattttgcactatgctaagcttttccccctcataacaatgtactgttactcctcttaccaggtcaaagaaacatcttttatttaaatttgaaaatagtttttctctcattataaatagtcattgtaaagaacgcagattataacaaaactataaagaaggaggtaaagatcaacccctattccctatagataaccactgttgatgtgggctttatattaatatcatttcagactttgtttagacatttgtgtctatattttctaaagtttgcaaaaagtaatgtactctagtttgtaccacagatatgttttggcttttatcttctaagtactttctggtggtttcctttcaaaaatcctgcaggcttatcaaaagtctggagtcccatgatgttaagcttcaggcaggtgacagtgacattgatagcgtagaaaagcttttggttaaagatagtcgttttcgtcacttcattgcttaagtatcagtcttaagctccaggtatcatcctggcttttctggaggttgcaagtatttccaggaaaattcaatcccttgttgaaaatggaagagccacacagaaatacttgggcaagcgtggtgcaaggaaacttgtggatgcagctatttttgataatttccactgagcttacacaacatcattactataaaaaacttatatataaataatgaattgtttctatttctaaagagttactatgttcatggcttaaaaaaaattcccatttgaactcagtattttgcatataattgactgtgactgatttaggagtgtttcaagcagtattctgatttggaagtggtaatgggggaagctgattccttttttatacgcctttggatagtctcatacctgttgggtgcctcttgtaggccaggcattggacattgcgctttgtgctaaggtgtataaattaaatattttgttatgcttagtctcagtaagtatttaggaagagacttgtgatccctattgtcaatattttcgctcatttgtcctaaggatactcttgtaatatgttctcagaaacaataatagatttattgatttgggaattgagtcatacaagtatatgcatttgttaaaacttattgattggtacacatgagatttgggtatttcactgaaattaaattttacctcttccccaaaggaactgtaccttatttggttcttaatgtttattataaattaatatttttaaactctaatatttttaaactctaataactgatatggatactgaagagtttaactgtactgatgcacggaacttactytgaattgcatgaaaaaataagatgggttgtgctggattgagagatgtgacaaagcacatgtacaaaatgtgaacagttgtagatctaggttatatgtggatatttactagtcatttgacatttctatgtgattggaaattttaataatagaacattggggaaaaatcagtaataaggctctatgtgaggaagttaaagcacagtctctcaaataatctttctggcttaaaaatctcaactctgtttcttcctagctgtatgactccaggaaactcccttaacttcaattgggtcatttgctaaatagaaatagtgaatacgctcagcacaaatcttatttttcagtaagctcctagcaaacactgtgattatgatttcatagagtaaaggaagtgatgattgtgaatgaatgaccgtatgctgagggcctgctatgtgcctggtactggtcattttcaggagaatgaggcgattttgttttgcatcatgctgtgtcgtccttcggtagaaactttcatactggaggcggtgtaaggggtgtgattagcaaaactggagagtggcttcattaggtttgacagaatctctccctggcttcatggatcccccttgctgtagcatctcctttgaactccaagggccttcagaggagaggtggcatctgctttgttagacttggtagcattcccaagtcagtgttaatttagttgattcgtgaaaattgttccctttgcataaggctaggacatcttcttttctggagttattctgtttttagctttttggacaggtatcctgggaaattcttctagggtagcaagatctgccccctccccacagtcaaatcatgtttatgcattatgacagactgttccacctcctgctgggaggcaatgagaaagggtcaggaacctggaasaggctgcagctggatttaagggcaccagtgcttgaggacgaaggagagtatttcaggtaattctatagatgtattgtttacttctggatgtccatgttgctgaaaactaaagtagaaaatagagyaaaacactatgtgttcagggagtatcttagttcattctggctgccgtaaggaaataccmgagactgggtggcctataaacaacagaaatttgtttctcatagctttaggggctgggaagtctaagaccaaggctgatgcagtgtctgaggcgagcctgctttctccttaacacatattgccttctagctgtgtcctcacgtggtagaagggatgagggaactctctggggtcccatttagaagggcactaatcccatgcaggaggtctctgcccccacctcccagtactatcacctgggggttaggatatcaacttatgaattttggggtacaagagacccaaacattcagaccatagcagagaatgkgggggtatagaaaaaacattagccatattagcaagctgtgtgtggataggaggaatagacttatatgctagctttccagctgtgatgatgcaatatgaatcttttttgtttgtttattttttgggatggagtctcactctgtaacccaggctggagtgcagtggtacaatctcagctcgctgcaacctctgcctccccggttccagcaattctcctgcctcagcctcccaagtagctgggattacaggcacctgccaccatgctcagctaattttgtttgtttgttttgagacagagtcttactctgtggcccaggctggagtgcagtggcacaatctcggctcgctgcaacctccacctccccggttccagctattcttctgcctcagtctcccgagtagctgggattataggcgtgtgctaccaygcccggctaatttttgtatttttagtagagacggggtttcaccatgttggccaggctggtctcgaactcctggcctcaagtgatccacctgccttggcctcccaaagtgctgggattacaggtgtgagccaccctgcccggcctgaaatatgaatcattagtgcaaatttcttgtaatgattggaatttcaaagggtatcctcctrtaggactgcttggttcatatgaaacaggacttgatttctgtgccacactaataccattggagaactacttaaaagctgccaaattttatttcagttttaccagatatggatgctagctcttaagtattttcctgtgctgtcttgggtggtataattccaaactcaagtcaaaaaattttgtattcttttactccaagaagtaaaatttataccagcttgttaattccctcatttcccatttataacacttggcctgacttcccccagtatgaattctagctcaagccaggcattgaaaaataagatgcagaaagtgccagaagagatttgaatgctcacatataatcagaaatgtcgttttgaaaacagtccaagaaagtaggttcaggttttatggcttctgtggttaggtgtagcacattgataatgagtgttccaattcacagggatttaagtggatacattcttatttgggagtggttctgtgggagagtgtaatggagggtagaatttgaagtaaatgtggatctctctggctgctggaactgaaattagttatctgagatatagtcaaacatgcaaattaaataacttggaagtattgcagggaagcaggtgggaaaaggaagaatgaaaaggagagaggaaaggagggaggagggagaaaggaagaaagcatgaggcagggaaggagagaaggaggaaaycaaagaaagtggcataaagagaaaaggaaatagctatttctcaggccttcacaacccttgaaagccaaatataaactcttccaagttcattgatactgctcagtttcatcctccaggatgtaatctaaagtcccctctgtgtttaacattcgagcaatagacttagatttcaaaaacaatgaatgcatcaagacaggcaataaaagagcaagacattgcaatttaaaactcagtgcaatttgaaagcagcataacagttatgctggacctcagtagatgtgtgtatcatgggaaagtggttctgagatctttcatctctcttggggtaggtcattcctggcttctgcttaactccagcatgtcattgaccactttacaaactttaaaattgaagacaaatgcctcctggattcctttttatggcaacaacatcaagctgttgtctggaattctgtatctctagcatttggaattatagcagatttaaagtatggaatatgtgtttctttgcaggatgggaggaggggagcgtatactttattattgttgctactaaataatgcttagtatgaatctcactgaccccttgaggaacttttataggagagttagcttacctggctgggggctgttttatctgagarttagcttacctggttgggagctgttttgagactgscatgataaaattattagagctcttaaaagtatttggggtaaaatatctaaatttaacaaagatgatcaatgtattttctatttatatgctgttcttgaacatagggaaataaactttaatctgtagaagttttctgaatatctgaaatagcaaatttgaatgatttatagtgcaggatcctggcatgatttgctgctttatttgaagtggtgctatagtgatttctagtttaaacagcaaaccatgaaagccaaacagaaataaatagaaaagcaaagtagcctttttttagttgtttttcactccatgtccttgctctccagtcccatcttcctagaagtctcacagctcttcctcatgacgttggccaagtactcttctctttatagctgtattggtccattctcacactgcttccctgagactagtaatttataaaggaaagaggtttaattgactcacagttccgcgtggctggggaggcctcaggaaacttacaatcatggtggaaggcgaaggggaagcaagcactttcttcacaagctgggaggagagaaagagagtgaagtggggagtgccacttttaaaccatcatatcttgtaagaacttacccactatcatgagaacagcatggaggaaatcatccccatgatccaatcacctcccactaggtccctcccttcacaacaggggattacaatttgagatgacatttgggtggggacacagagccaaaccatatcaatagttcttccgtcytttttccttctcagctttacttgacaccatttccccttcctaatttgcttcttaatgcttattataaattaaaaattttcagtaatttgtttgtgtctrtttcttccagtcaattttaagtttacaaaaggcaatgaccatgacatttaaaaaaattttttgaattcccatagaataagtaagtgctcactaatattttaaaagggcaaaacattttcctgccactcccagttttcttgcgtgactctttaggaggtcatgttataaggtattcagccatgtgtccttaagatatcttctagaggcttcctcaaatataaacaccccgaccccatgtggtaaaatggtaaaggctgatacagaaatgagtatttaaatattcaagacaaactactatgaataactgcccacatttaattcacagcttttaaactctttttatttttctgacacataattgcaaaataattaagtcaacatagaaaagatataatgttgtacccataatactactccctagccacttaaggtaacctcagttaatagtttggttgttgctcatttatttatttgtttttgagacagggtctcactcttttgcccacactagagtgcagtgacataatcayggctcactgcagccgcaacctcctgggctcaagggatcctcccacctcagcytcctgagtagcttggactacaggtatgccactatgccaggctaatttttgtactttttgtagagacagggtttcaccatgttgcccaggcttgtctcgaactcctgggctcaagcaacccacctgtctcagcctcccaaatcaacccacctgcctcggcctcacaaagtggcttacaggcatgagccaccacacccaaccttggttatttagattttattacgactatgtaactgtttacaggtgtattttttaaaaaatgctagtcattaaggtcagcttaaagcttagtttgtgcatgggcattttctgacatttacacttaaaaatatacttaatttatccagtagtcattccggagcaggttgttgaatttccatgtagttgtgtgattttgagtgagtttcttactcctgagttctaatttgattgcactgtggtctgagacactgttatgatttccattcttttgcatttgctgaggaatgttttacttccaattatgtggtcagttttggaataagtacaatgtggtggtgagaagaatgtatattctgttgattgggggtggagagttctgtagatgtctattaggtctgcttggtccaaagctgagttcaagtcctgaatatccttgttaattttctgtctcattgacctaatattgacagtgggatgttaaagtctcccactattattgtgtgggagtccaagtgtctttgtaggtctctaagcatttgctttatgaatctgggtgctcttgttttgggtgcatatatattgaggatggttagctcttcttgttgcattggtccctttatcattatgtaatgcccttctttgtctcttttgatctttgttagtttaaagtctgttttaccccagactaggattacaacccctgcttttgtttgctttccatttgcttggtaaatattcctccatccctttattttgagcctatttgcacgtgagacgggtctcctgaatacagcacactgatgggtcttgactctttatccagtgtgccagcctgtgtcttttaattggggcatttacctcatttacatttaaggttaatattgttttgtgtgaatttgatcctgttgttatgatgctagctggttattttgcccgttagttgatgcagtttcttcatagtgttgatggtctttacaatttggtatgtttttgcagtggctgttccgggtttttgctttccatatttagtgcttccttcaggagctcttgtaaggcaggcctggtggtaacaaaatctctcagcatttacttctctgtaaaggattttatttctccttcgtttatgaaacttagtttggctggatatgaaattctgggttgaaaattcttttctttaagaatgttgagggccgggcatggtggctcacgcctgtaatcccagcactttgggaggctgaggtgggtggatcacctgaggttgggagtttgagaccaacctgacctacatggagaaaccccgtctctactaaaaaatacaaaattagccaggtgtggtggtgcatgcctgtaatcccagctcagctacttgggaggctgaggcaggagaactgcttgaacccaggaggaggaggttgcagcgagccaagattgtaccattgcactccagcctgggcaacaagagcaaaactccgtctcaaaaaaaaaaaaagaaaaagaatgttgaatattggcctctctgttctagcttacagggtttctgcagagagatccactgttagtctgatgggcttctctttgtgggtaacccgacttttctctctggctgcccttaacattttttccttcatttcaaccttggtgaatctgacaattatgtgtcttggggttgctcttctcaaggagtatctttgtggtgttctctgtatttcttgaatttgaattttggcctgccttgctaggttggggaagtattcctggataacatcctgaagagtgttttccaacttggttccattctccctgtcagtttcaggtacaccaatcaaacgtaggtttggtctttttacgtagtcccatattttttggaggctttgtttgttgcttttcactcttttttctgtaatcttcattgagttgatcttcaatctctgatatcctttcttccacttgatcgatctagctattgatacttgtgtatccttcagctccattaggtcatttatgttcttctcaaaactggttattctagttagcaattcatctaaccttttctcaaggttcttagcttctttgcactgggttataacgtgcttctttagttcagaggagtttgttaatacccaccttctgaaacctacttctgtcaattcatcaaactcattcttcatccagtttttttcccttggtggcaaggagttgtgatcctttgaaggaaaagaggtgttctggtttttggaattttcagcctttttgtactggttcttccttatcttcgtggatttatctaactttggtctttgatgttggtcacctttggatgggatttctgagtggatgtccctgttgttgatgtttatactattcctttctgtttgttagtttttcttctaacagtcagtcccctctgctacagtctacatttctgctggaatttgctggcggtccactacagaacctgtttgcctgagtatcactagtggaggatgcagaacagcaaagactgctgtgtgttccttcctctggaagctttgtcccagaggggcaccccccagatgccagccggagctctcctgtatgaggtgtctgtcgacccctgctggaggtgtctcccagtaagggggcacagggatcagggacccactagaggaggcagtctgtcccttagcacagctccagcagtgtgctgggagatccactgctctattcagagccgggaggcaggaacttttaagtttgctgaagctgtgcccacagccgccccttctggcaggtgctctatcccagggagatgggagtttgatctataagtccctgactggggctgctgccttgctttcagagatgccctgcccagagaggaggaatctagacaggcagtctggctacagtgactttgccacgctgcggtgggctctgcccagtcagaacttccaagcagctttgtttatactactaggggaaaaccacctactcaagcctcagtaatggcagatgcccctcctcccaccaagcaccccaggtggacttcagactgatgtgctggcggtgtgaatttcaagccagtggataaataagttctttgaaaccaatgagaacaaagacacaacgtaccagaatttctgggacacagctaaggcagtgagtgtttagagagaaatttatagcactaaatgcccacaggagaaagcaagaaagagctaaaatcgacaccctaacatcacaattaaaagaactagagaagcaacagcaaacaaattcaaaagcaagcagaagacaagaaataactaagatcagagcagaactgaaggagatggagacacgaaaagcccttaaaaaaatcaatgaatccgggagctgttttttttgaaaaggctaacaaaatagatagtctgctagccagactaataaaaaaagagagaagaatcaaatagacacaataaaaaatgataaaggggatatcaccactgatcccacagaaatacaaactaaagtcagagaatactataaacacctctgtgcaaataaactagaaagtctggaagaaatggatgaattcctggtcacatacaccttcccatgactaaaccaggaagaacttgaatccctgaatataccaataacaagttctgaaattgaggcagtaattaatagcctaccaaccaaaaaaagcctaggacaagatggattcacagctgacttctgccgtaggtacaaagaggagctggtaccattccttctgaaactattccaaacaatagaaaaggagggactcgtccctaactcattttatgatgccagcatcatcctgataccaaaacctggcagagacacaacaaaaaaagaaaatttcaggccaacatccctgatgaacatcgatgctaaaatcctcaataaaatactggcaaaccgaattcagcagcacaacaaaaagcttatccaccacgatgaagtaggcttcatccctgggatgccaagctggttcaacatacacaaatcaattaacataatccatcacataaacagaaccaaagacaaaaaccacatgattatctcaatagatgcagaaaaggcctttgataaaaatcaacaccggttcgtgctaaaaactctcaataaactaggtattgatggaacatatctcaaaataataagatctgtttatgaaaaacccacagccaatatcatattgaatgggcaaaagcaggaagcatttcctttgaaaattggcacaagacaaggatgccctctctcaccactcctattcaacatagtattagaagatgtggccaggacaatcaggcaagggaaggaaataaaaggtattcaaataggaagagaggaagtcagattgtctctgtttgcagatgacatgattgtatatttagaaaaccccatcgtctctgcccaaaattcccttaagctgataaggaacttcagcgaagtctcaggatacaaagtcaatgtgcaaaaatcacaagcattcctatacaccattaatagacaaacaaagagccaaatcatgagtgaactcacattcacaattgctacaaagggaataaaatacctagatatacaactacaaggtttgtgaaggacctcttcaaggaggactacaaaccactgctcaaggaaataagagaggatacaaacaaatggaaaaacattccatgcttatggataggaagaatcaatattgtgaaaatggccatactgcccaaagtaatttatagattgaatgctatccccatgaagctaccattgactttcttcagagaattagtaaaaactactttaactttcatatggaaccaggaaagggcccctaaaacaaagacaatcctaagcaaaaagaacaaagctgaaggcatcactctacctgacttcaaactgcactacaaggctacaggaaccaaaacagcatggtactggtacgaaaacagagatatagaccaacagaggcctccgaaataacaccacacatctacaaccatctgatttttgacaaacctgacaaatacaaacaatggggaaagaattccctcttcctaaagggtgttgggaaaattggtaagccatatgcagaaaactgaaactggacyccttccttacgccttacacaaaaattaactcaagatggagtaaagacttaaacataagacctaaaacgatcaaaaccctacaagaaagcctaggcaataccattcaggacataggcatgggcagagacttcatgactaaaacgccaaagcaatagcaacaaaagccaaaattgaaaaatgggctctaattaaactaaagagcttctgtacagcaaaagaaactaccatccgagtgaacaggcagcctacagagtgggagaacattttttgcagtctatccatctgacaaagggctaatatccagaatctgcaaggaacttaaacaaatttacaagaaagaagaaaacaaacccatcaaaaagtgggtgaaggatatgaacagacacttctcaaaagaagatgtttatgtggccaacaarcatgaaaaaaagcttatyatcactggtctttagagaaatgcaaatcaaaaccacaatgagatatcatctcacgccagttagaatggcaaccattaaaaagtcaggaaataatagatgctggagaggatgtggagaaatasgaacacttctacactgttgatgggagtgtaaattagttcaaccattgtagaagagagtgtggcgattcctcaaggatctagaactagaaattgccatttgaccaagcaatcccattactgggcgtatacccaaaggattataaatcattctactatatagacacatgcacacrtatgtttatttcggcactgtgcacaatagcaaagacttggaaccaacccaaatgcccatcagtgataggctgaataaagaaaatgtggcacatataaattatggaatactatgcagccataaaaaaggatgagttcatgtccttttcagggacatggatgaagctggaaacaatcattctcagcaaagtaacacaggaacagtaaaccacacagtgcatgtactcactcataagtgggagttgagcaatgagaacacatggacacagggaggggaacatcacacactggggcctgtcggtgggttgggggtaggggagggtctgagaggggaacggatttaaataacagaaaattaggagaaatatctaaggtagatgactggttgatgggtgcagcaaaccaccattgctcatgtatacctatgtaacaaaccagcaggctctgcatatatatcccagaacctaaagtataattttaaaaagtatacttaattattgttaatgactgtacatatggtgttttattgtttcattatttggatacataaaatttattttcccaatagtgtccaaatgttggtggacatttggattatttctagttttttcactattataactacattgcaatgaaaatctttrgttctcttgtcaattttcatggaagtaggattgcgctatcaaaggattttctgtgagccctaagcagatggccctcctaattgccttcaaagattccaggtactttttaactgttgtgcatttttcagctgtatgaaataagttgcccagcctgaatccttgatttgtactgggctcaggagtctgtgagagggagtttgatttcagtctgcattggctgtctggagaatgagttcctmtaaagagcagaacaggttggagaggtgaagggttcctgatggatgatgtgtctaaatgagaagaagacgactgggcagcagggcttggtgatttgcaggcacagaggtctcaggtttagtgtgaaaactggcaggagtatggtccagagaccataggcagtgaatgatggcagtgaacagacagcagggcaaagattctggacagtagttgtgattgcctgtgagggcgcctatcaccaatggaggagggtctgagagaggaacagatttaaataacagaaaataaggaaaatacaagatttctattcaagaaggtagatgatctctgaaattagtaatattgctgtaaaagtgaaacgaacatctttaaatataggtgcagccagacagtgtatatattgcatacattttaaatttcatggtcattccaattggctctgaaaatgaaaccttcatgagtttatgttccaccagcaggatatgagtgtgtgcacaccaagagctgttctggctgttgccaccttttgttcttcccttcctcatcactggttatggtcgacgagagaatccccttaatgtcaagtagccttcaataatatgcaactaaaggagaggtggattctcaagcaactcagaaacgtttcagagctgttcattttcaacccgcaacacttgtgggctctgctgtcagatgttatagctatcaggtgtgatgacttgtactgtgtcaccttgtttagctggaactrcgttttccagaatccccttccctgtgtagttttgggtttgagttgactaaaagaggagtttgcacagaatttgtgattactccctgcagttcattgtgattaggtagtgacagacagatgtggagatgttagcaagaggctccagccttttcttgctcttctctgcattgtgtscagctgtttgtcccaagtgctgatcctgctgagccatatggacccaggcccatcctgagatgcttggtgtcttagtctatttagtgttgctgtaaaagagtacctgaggatgggtaattcatttatttatttatttttaaatttaattttcttttaagttccaggtaatctattcataagggatcgtctcccgtgacccaagcacctcccattaggcctgtcctccaacactggaggtcagatttcaacgagagattttgtggggacaagcatccaaactgtagcacttggcagcaagtcccaagtccttttccccagctcctcctttgccatccacttctccatctggaggtgctgattcctctgcttggctggctggggactcytaggaccctccaacctcacttttagacgtgccttttctcagctyctcttgtaagtgtgcaagcttcgattcctataataaatcccttgtctataagtcatagtagttctgcctccttaattgaaccctggctgactcacatctttcgtttgaaaatcagggggagacatgatttttttatagctagttttccttaacttcctttaaatacatacacataatacagtagaaatacttttggctttcataaatgcttttcatcttccatgactgtttccagcacctcttgaaattacaagtgttacacaggtatttttactgtcaatgtatatcataataggattgctttgtcctgtaattaatcagtagagatttyttytggaagtttgttcttttgaagaaacttgtatttttytgaaaaactgtcatttyttcaagtggcttcatttgcaaaagatttgtttaatgtcctgtggtttcattcttacaatgttagaaattytttaattagttacaggtgttgaatgatgtcacatgggcattttttttttttttttttttttttttttttgccatcagtgttagggagttctgtcctaaggcttttttgtagaaatatatcttttaatataattgacacaatgtaagattggcttactagtattaaactacatgaaaagagcaagattgtatcttttactgagaatagtaagatgttacaactgaattgggtttttctagagataatttttatttacctttaaaaattttatcaccaacaaaatgtgtattaacggttatgaaagcagtaagtaagattagtgacaagatcagaggagtagcctaatttatattacagattttaatgtggcccataatatagtaataaatatacaatatttttaagcatatggcaaatatgaaaaaactgtgatttaataaactttaatttaggaatttttatagggactaaaattaaaattattccrtcgaaagcataaatacattttttgttaagatattatcatttttaaataatcaaactcttcaaaatggctttatcatgcccccacagtatccaaagaaaggattttttttcataatagggaatcatattcaaagggaagttttagatttaaaacttacatgaaagccttatcagtcaagaatttcttgatttgaaataatatctccctggataacttcctatttgtatcataaaatccttgtcctggagatggttctatttctgtcttgtacttatacttgaaagtggctgttttagacatacacgattcaaatctctgatgggcagcagtctactggagagccatgtatctccagtctcattcagtcaaatgatgtgaccaatggtgaaatggtttattctaatgtgctgtgtgtttgaaactctctgtcccaaatttgaaaagtccatgtcagacatgttgaaagctgaaataattatttcagtctcaaagatgccttttgacatatggagaattattacagtatcatcttattcccattgacccagttacaacttgaggaaatatgtgtcattctataggtgatatcatagtaatgattgaagattggtaactctctatttttatgtttgggttctgaagtcgtaacgcaaacatagaagtgagctcatttcctttgagaaattggcaccaaggcctctaacttatctctatataattgtatattctttattaaagttcatctttacacaataccttttgactcttctcttgccttccactttgccttctccttgccttctggtaataggtaaatctgaaattctgaaatacaatttaactttctcaattaggaattctatcaactctcagggaaggtgattgccatgctacatattacacgatgcagttgtgctgagaactggatattccaattttgctccagtcagtgaaccacagaaatcagtttctgcaagtccaatattattgactccaaatagatgatcattgtagtagtcatctcattgcagtatcagtgatacatttagcatttaggaaagtattatawtttagaaaagagcaatgctgaataaaaaccagctcagtaacacaaatagttgactcatcactgaactgtttttaaaaaatagttgaaaataacttacttttgtcaatatatttgattaacatttcagacatttactatgattcctattatggctctgaaatatgtcttgtgagcattactttgtgtaaatatgttttcagaaagccatctctaagaaaattaagtgaaccacattttacaaagcttgcttaattaaaaatgtgtattctatttagattatgcttttcttaatgatttgatttttttccctttagacctactgcttccaagaatgtttattatctagcatgtgactattggggatctataaaaattgctataaaactgcattataattagaataacacttgtggtaaagaatgaaaagaaaatatttgtaaaagcattgttawaattcagctgatagactaaaaaaagaccacagagtaaggttttgcttagactttttaaatcgctctaaatattgttctcttaagtgatactgtgtttgagagtcttacatatttataagtttgtcagatatgtcttacagtgttttctactaaaatatatgtaaattctaataaactggttcctattaaactgagtgaaaacctaaccatgagtactggttattttcagaaactcactaagaaaggaacaaaatttagtgaagacgttgcatacttaggctactgcgtataaaaatagcaattaagagcaaagactttggagttatccagacccaagttataccaactcagagtccaataatataattatcaatgtctaggttgttgtctacttctatataaaatctattttatgcctgtaatcctagcactttgggaggctgaggtgggcagattgcctgagctcaggagtttgagaccagctggagcaacatgggaaacctcatctctgctaaaaatacaaaaaattagctgggcatggtggcatgtgcctgtaaccccagctactcagaaggctgaggcaggagaaccgcttgaacccgggaggcagaggttgcagtgggccaagatcacaccactgcactccagcctgggtgacaaagtgagactctgtctaaaacaaaaaacaaaaataaaaccccaactcatattagagttaattttttcctctgtccttttagcttgtttttctaaaggatggttaagtcgtcttattcagacaaaaattgcatttcatatatgggatttttttttcttttctaataccgttcaggattggggcaagaggcaatgttaaataaaaacagaaatttgagttttgggagagatcagatctttaaataaatagaaacagtgacatttagtacatgtgaatcaatttggtaaatactgaatgaagagacgagttactgttgagtgggatttgtcatcttaattttcagcaccttgagtaaataagccttgaattaaattacttcatgagagtttttctcaagatgagaaaaacttgctttactttgggctgctgacttgctgacttactatattgatttagcacttgagatgtaatcagaagagatgattttagtgaactcatttttggcctggggtgtatgttgcagatgtgcgtaggttgttgtctttttctatttgtcctgatctctggtttcatagtctctgaactggttgcttgttctaccaacactgttttgcatggaatactttgactggaggtcaaatggcgacacgtttaattgacaacacttcattgaggatacaactctttctgtgtcttgatggttagtgactaaagctgatctaatcaagcctatgtagtgccaattaacaatgcccaattaggtattctctctggctttcaagttttgctgctggaaagctcagagaggaaagcatctcttcaggatgacaaggatatgaaaaatgataatggcaatggaatgccagttatgtaaagaatttgaagtgatcacaattaaaaatttgagtagacagcaaaaagtattttttccacttgatgtcttccaaagaaaaacaggaaatgtcttcctgtgtgccattttttcttaattgctgaaaattattataatgttgatagctatcatattttgactttaaaaaaatgtgccaggcactttactgtatttcatttattcttcacatcatccttacactgtagacttctttaatatgactactttacagaagggcatgctacttttacctttctgaatctcagttgtttcttctctacaaagaaagtgataggtagagttggagattttaaccaggtctgtttaactccaatatccttgctcttactactgttcttgcagtaagctaaatatgcaatgtattcattttacttggttgctttccttgtgagtttctgacaattaatttgtcttctactcagcttgatggaaaccagtttattataagacagggcttgaccaatgttgtgatggttcgtatccagggcagaaattattgccagagggtacacaggacagccttctaagaaaaaactgtgtttgcttctgagaagaaggtgggcttcagctttctgagtgtaagcaaatataggagacaagaagactaaccaatgaaggcagtgaaggagcctcaatggtgtgacatcagctggctgaatgccttctgtaaaatacttctgtagctccccattgccttgatgataaaaccttccacagctctttccgtttgaacctttacctgcttgcctgtgggtaacaatgatgatgacagtgacagtaatagctgaaataaccaaacttaatggagcgcttgttagttttttggtttagccatctctgtaatgattcctttcattctttacaatatacaaaggtaataaatgaactaactggtcgaggcaatagtttttaattaatcacaagttttcaggctctgggataaagcattcatgtgtgttcatttaatttttaaaacaacccttgtcatcatttcacagttgaataaaccgagtttcagagacattaagtaacttgcctaatgtcacacagctgggtgagggatgaaggccagattgaaacctgggtttgcagattctaaatctggtatactgaaccagaatactctcatggccttataggggatcagctgggttctgtgattttaaataaagatgactcacaaacagaggatatcagctgtggtctgcagttgtgtgctatttggtttattaaacatatttgatttggaggcagttttttgtttgttgttgttttgttttgttttggtggttggggaggggagctaccctgtttgctaaaggccccatttgtcactgggctacttcatgcacccaacttccctgcaagggaagatatttgtgttaataactctcgtctaaaaagtcaagattagagagttctttcattcgtggagtgtgatgagaaacaaagattccacaaccactttcccccaggatattttgttaccttgccaatgattttaaaatattgcttgcttttagttttaatccatttcctcctccctttcccaaccctatcartatatagaacaactgctcagaaaactgttggtttccaataatgcagttattaactatgacctttgtgtcttgtctttaaaccttcccccgcataatccagtcttccctttgacatctctgatggttagctcctcttactggccaactggtgcctctgccacatgggagtgccattacacagtaaaattaatacctccttccaggatttatttagcttcttctgacacactcaaaagagcaagggaacacatgtcttgctttcccttgggaaggtcaagtattagatgattaaactggtaggaagcatttgaatatcctcagtaaacaagctttgtatttaggctcatagatgtttttttgaagttcttcattgcatttattttcaaagttagtttgagagagcttttaccagttacttggaagttatgtgccrttattgctttccttattgcttaaaaaacaaaaaaagaatttaaaatcagctaccaactctggatttttctttttcagatgcaaaagaaattgttttaaaagcccagatcttagctggaggaagaggaaaaggtgtcttcaatagtggtttgaaaggaggtgttcatttaacaaaagagtaagtctggaggttgttattccttgtcttttggccaagcagttatggaagatcttgctcaagattgaaaggcacactgaggttggttgtggtggggtwggagcgggccaaagcaactagaagaaactgaaatcataggtagagggctctggcagtgccctagttttccttctgcccccacaaaatgatttttcttactaattggtgaaaacttgacagtccttctgtcctaaacaatcaatgattcatcataaatgttggaaatgataccacttccaactgaaatgctacttccataatgtcactcctctattcaaggacctgaagggactccccattaccagtggcatctggggtacctcccctctgatagtccaagccttcctttatttgagcctgtcttttcaacttcatctcctgcatctcctagcactgaacactttcctctcctccctgttcctgtcasacacctttttactatttactttgatctttaccctcttcctttccctctcattgttcaatatctccccagttttccactgtyggatcttcagtcaacccttatctgaatctggtgtgcatttcagcattctctctttactatgactgtaacttttttgggtgaagaggtcacaaagcatcttttgtttcatttattcattcatgaactcacttttattttgctctcagtgagcctctagtacagtgctaaacacgcagcacataagcagaaagactcatggattttgtgagggtgaaggtgaaccctttgcagtgtagacatgaggctctgtgtaaggactctcatttaaatgattttcaacaaacattcattttctgcttgttttctctttctcttagccctaatgttgtgggacagctgrctaaacagatgattgggtacaatctagcgacaaaacaaactccaaaagaaggtgtgaaagttaacaaggtaatatggatactttgggtcattttctatatatgtgttaaaaaatagaaaagaaaaccatccttcagtttttgacagaatctaatgaagtactgctctttggcagtgtgccattttattttttaaagctcatctaatctgtttagtaagtagtatgtcttggaggagaaataaaaagggctctatgatagtaatattrtttattatcattagcatttagcaaaaagtgggtgagggtgagtgaccgagcaatggctttccctctgagaacacagatgcattctatttagttgagaagcgcttgctgtgacagccttatactcagtgagggacattcgctgctcccacacagtggccctcaaccccaggcgtgtctgtcagaattacctattgtggttgtttttctaaatgccccattccttattttaggatgactgtaattttgagccatttttattgctgggggtatattgcattaggaaggtcagctgaagtacccaagtatgtatagcatgtggacacacacccctcatccacacatagaaaataaagcccagaggaaagtggcctgcctcagtcatgaaattgtgagtggtagagctgagaccagaacctaactctccctcctgccaatctacctttcaccatcccttttgtgtatccagacactagaactagctacctgggttgcagaatccagtgccaaataaaaaggcagggacccgtgttaaaatttcaagacagctatagctaaacattaaatccctttacaactacacagatcacatgtgtcagccctgaaaagcatccatggttagaagatcctgtcctaacagcgaattagggtcctgcattttggggtggcagctgtctgctctgttgacatagcrtcacagatcagtggtctctaccaatgcaccatgctgcaggacactgcagtggtgacatcctgtttttacttttcagggagagttttgtggaaaactcttaagttgttgtatttatcagtatttagttccattttcttttgttaatttttgtgggtacatagtaggtgtatatatttataaggtacatgagatgttttgatataggcatacaatgtgtaataatcccgttacagtcctttttcttgctatgtagcaatctatgatatggatgtacctaccacagtttgtttaaccatcatctgttgaaagacatctgggttggttcgtttttggctattacaaataaagccactctagacattcatgaacaggtttttggtataaatataaatcttcattttgggggataattgttgggttatgtggaagttgtataattagtttttttaagaaactgatgaatgttttccagcatggctgttccattttacattgccatcagcaatgtgtaagtggtcagggttctccacattctagcccgcatttggtggtggtggtattattttagccattcttatgggtgtgtagtgatatttcattgtgattttaatttgcatttccctaatggctaaagatgttgaacatcttttcatgtgcttatttgccatctgtagattgtggttggtgaattgtctgttcatggatgctatggtctgaatgctccctccaaaatgcatgttgaaatttaatccccattgtggtttgcattaagaggcagagccttttgggaagtgattagtcatgaaggctctgccctcatgaatggattagtgcaggcttgtccaacccacggcccacaggccacaggcatcccaggatggctttgaaagtggcccaagacaaatttgtaacctttctaaacattatgagattttttttgcaattttagtttcttagctcagctattgttagtgttagtgtattttatgtgcggcccaagacaatccttcttatgccattgtggcccagggaagccaaaatattggacatccctggtagtgctttataaaagggctgaagggaactagcttagacctgttttgcatttccactttctgccatgtgaggatgaagcaagaaaggccatatcactaaatggcggtgcactgatcttggacttcccagcctccagaactgtgaaacaatatatttttgtcctttataaatgaccaaatctcaggtattttgtaacagcagcatgaagagacaaagcaaatttcttttggccattttctaattagattatgtttttactattgagttttgagttattctaggtactagtccactgttggatatgtgctttgtaagtattatctgttacactatataacgtatatattcattttttcaacagggtcatttgcagggcaaaagtgtttaattttgatgaagtccaatacgtcaatatttcctttatggattatacctttttagtatcaggtctaagtcctctttacgttgccctacataataaaaattttctcatgtttttttctagatgttttatagttttatgttttatatttaggtttgtgatccattttgagttgacttttgaataagttgtgagacttaggtcaaggttattttttaaggggcaaaagggctatgatattcaattactcctgcaccattttttgaaaaggcttatcttttctccattgaattgcttttacatctttgtcaaaattcagctgggcatatttctttgggtctgttttggggttctctgttttgttccattgatctttgtggctgtcccgccaccaatatcacagagtcttaattactgtatttatataaattctgaaattgagtagaataactcttgtcactttattcttcttttccaaaacagttttacctgttctagttcctatacctttttatgtacaatctagaacaattttatctttacgaaaaaatcttgctaagattttgataggaatcttattaaacctgtatatgaatttggagggaattggttttttgttatgttaagccttgcaacccatgagtatgatatgtctctccttcttttaggtctcctttgatttatttcatcagcattgtattgttttcagcatatacgtttggtatatgttttgtcagtcttacacatacattgttctcttttaaagcaattacaagtggcattggattcttaatttcagtgtccaacatgctcattgttaattggtgttgatttctttttaaatgcttggtgaagttccctagtgaaaccatgtgagcctggagatttatttgtctgtgcctgttaatgtttttgggttgctggcttctctagcacccagcaccctgcctgagatttatgaggccaaagaaaacatagrgactcactaccatacgcttccttggacctcaagctccctagctagtctcccttcttctctataactttcagagtcaccttaagttttatgtatatatatgtccaaggcttttatttgtacttagcgggaagaatagggaaaaacatgtctactccatcttctcaaaagtakaagtccccagattatagaaccttttgattctaaatttatttcagaagctatttaaacacatacacacatttatacacatcagatatttgttttctaagtctgtgccaatgtgttatgtattcctggggctagtactagggcctgtgagacagtgctactcatcatgcggtccaggattcagtaccaatagtggttactgctctgtaatcaatttaaaattcgagaatgtacttttaatcttctctgttcatgggtgtgttacaaatagtttgtacgctagcactcatctcctgaccacaattccagtagcatgatatttttaaggaaacagattcagcagtagataggtcaaagaaagttaaaaagctttctatactggtggactccacaaagacgatgtgtcaacatattctttgtgtaactcacaggtgaagctcttttgaaatgtttctaatggagttgctcmgggatgagtgtttgtggattccatttagatttctctgtaacacttcctaatatactctgtcatcctcggtcatttggaaggcatgacgatgtcaacaaactggtctttgttgtataaaatttcttgaattatctcttgataattatcattttcctggtgacattttcttaaagagtcatgcattattcctgtgaagcaagagctgtttcagacagtagctgggcttcacaaatagaaatttggtggaatacagagcacgtctgtcaacatttttgaagattaagaataggactcttgaatgacacttatcctaaaaagttataattttgtgttgcctctaagaataactactgaaagtcattaagtattattctctaaactaactctgcattagaaaatgaacagtattatgccagtagacctgaaagcatataccaaacacactcctcattttgtattttgtgccaatcaaatttcttaaaacagctttctcttctagagaaagttttagaagaaatgattatcttaatttcttaaaatgtttgtattaatgttgatgcttagaaaggcagactttatgttatttctataaacgacaagttgttactgtattttataaggaaagaatagggctaagtatttttgcttcaaatattgtcctacccctcaatcagaaattctgaaagaatttacggtttcaagcaacctgaagactgggagaattaggcactgactgatggtttgaccttcattgttggtgagaacaaccaacttgaaatcagaatggttctgtgctaattcyaacaccatgtgctgagaaacagtttttatatacttatgaacttccatttctgataaatcaatatgaagacctatatattttatttttaactaatggtaaattcaacaaaagtttgaaaaagaggagttctatattcattccattatagctttttagatcattatatatttatcccatttcatgtgacctaaaacttaagtgtttttgtggtatctgagtagttaaaatctaatgctacttaatctgtaacttttttttgtggaacccatcactaaactacttgtaaaaaaagcaatgtggccgggtgcgttggctcacacttgtaatccgagcactttggaggcggaggtgggcgaatcacgaggtcaggagattgagaccatggtgaaaccccgtctctactaaaaatacaaaacaattaggccaggcacggtggctcatgcctgtaatcccagcactttgggaggccgaggcgggcggatcacgaggtcaggagattgagaccatctggctaacatggtgaaaccccgtctccactaaaaaatacaaaaaaattagccgggtgtggtggcgggcacctgtagtcccagctacttgggaggctgaggcaggagaatggcgtaaatctggtaggcagagcttgcagtgagccgagatcgcgccactgcactccagcctgggcgacagagcgagactctgtctcaacaaaaaaaaaaaaaaaaagaaagaaaagcaatgttagtgctttcattgttttcacatctattactgattatttatgggattgtttttatattctttaaacatccaagatatctttcactgttcttgttaggtgcgtaagttggaacaacctctctcaagcactttgacagtacttatcaacattttaaatattcacagtttaaaacctagacatttcacttttaggatacttatctacagggatactaaaagaaatgaacaaagatacatgtacaaaaatactcactaaagtagcattttaggaaaattgaagttcatgtaaatgtctgtcagcaggccaggcaccatgactcatgcctgtaatcccaacactttgggaatcttaggcgagtgtattgcttgagtccaggagtttgagatcagcctgggcaacatagcaagaccccatctctacaaaaaataaagcaaaaattaagtggctatggaggcacgtgcctgtagtttcagctactcaggagattcgtttgaacctgggaggtcaaggctgcagtgagccacgattgtgccattgcactccagcctgagagcaacacagcaagaccatctcaaaatgaataaacaaataaataaatagwtaaataaataaataaatgcaggaacatggttaaataaatattgtcatataaataccatgtaatcacaatgaagagagaagaccttagaaagatatttaagttgtagtattaagattttaaaaaagaggccaggcgtggtggcttacctctgtaatcccagcagtttggtaggctgaggcaggtagatacttgaagtcagcagttcaagaccagcctggccaacatggtgaatccccatctctactaaaaatacaaaaattagccaagcatggtggcaggcacctgtaagcccagctactcgggaggctgaagcatgagaattgcttgaacatgggaggcagaggttgcagggaggcagaggttgtagggagctgagatcgtgccactgcactacagcctcagtgacagagtgagactctgtcttttttwaaaaaaaaaaaagattaaaaaaaagaaaggcatcctgttgtatataatgtgcttccacatgtaggattattccattactgcaatgcttgcagatacatagaaaaggactagaatgtcagcagtggtttttcctggtggggctgttacatgaaattcaagtcctacagagcaaaaggacacctggctgaggcagtgagtccccactcacttgtggaattgaatgacattcttccatcccacttgtcccctgtctagtcatggccctggcaaatgaccacatattcccagaggaaggggtgcctttttctagttatcacggaggttcctggtaggctcgtatctgccctgactcctggggcccgagggtttatttgaggtagagctgtgcagcaggaagctgctttcactttctcatttatatatttttggtatcgtttgcattatttttgaacaagcaaatattctttttataaattaaaaggaagtataaaatgaagtaaaatatagtgatcgaagagacagaaatacacaaacatatgaagcatcagacatactgtaaaagaatccgtctgtggcaatcatgcttggttttccaccagtgaaatctgagaaaagtcagtgtagtaatatatatgtgtactgttaatatctcaaattaaaataacagccacttctctagggtatttcttaagtgacacagtttcttgaggaaggacaaaaaagaagattaaagtgggaaggttccttgaggcaaacgaaatacctgtcactcgaacaagttaatgggatcaaaattaaggaggtgaaaatgggcattgtgtgcaccatgagagcagaactctcaaagctctgcaaactcactccctgggctgtaagagcctgaaaatgaagccatttgattcgtgtagcaagtttgtatagatttccaagtagaaatcagcttaatgctgaattaatttgactttcccactaatgtggtaggtgatggttgctgaagccttggatatttccagagaaacctacctggcaattctgatggaccggtcctgcaatggccccgtgctggtgggcagcccccaggggggcgtcgacattgaagaggtggctgcttcaaacccggagctcatttttaaggtatgtttaaattccgggctacctgctattaattgattgttattgtagaagctgttaaatatttaatggggagtctaaggccaggagcactaaatctgtctctacaatttaaggtaagaagatgctgagccctttttctttctgggtatccagttgaaagttgggtggaatcaaggtattcagtgttcaaggactttttatctttgcttttcccacccttccttctttacttcttcctgccttttcttcctccctgattcctttccatccaatcttcctcaagaattaaccaatgggagaggactgctatattttcatttcttatggttaactctctttcatttaatattatatatgatccggaaattctctcctaggagatgaatgaattctcttttagcagatgtgaactagaaactgtcttgagttctctcagtactcttgatgtaaactagaatctttatgaagtctagattctatcagtttttttcaatccttgaaatcttgactcatttattgatattaagattagtttcaagtcagagatctgaggtcaaatttaatcagagcacaagtttctcaaagtctccaaacctcatttttaaatcagtaaaatgaacatggggtgatttctaccatgtgagattataaggattaaatgaggtgatgtgtataaagtgcttcttaacctacgtcagctatgaggagaaaaacataagttttcagaactaaaattgaagtttttaatctgggttcttggggtcaaaattacattacaattttccaccagaaacattcattatttcttttagaaaatgatttttttgtttccctttgagaaggggagattttatttcttaaatctctttgtctaaataatgtacaataaacacccacttagcatcctcaacaggttcttggaaactgcgacttgaatggaaacgatgtataaggaaaccaatgttaccatacataggctaattgatataaacaagagttaagttcctatagcatatttctgctcacagaacatcactcaactcctaaataaagaccagcacacttctaatgttacacattaaaataaataggagctatatatacgtttcagaaagatttcataaaaacaagtaagataattgtttatccagtttttccagcttagggtactctgatggctggagcacagggtgcaaggtaagagcccacccggatgggacannnnnnnnnnnnnnnnnnnnnnnnnnnnnnnnnnnnnnnnnnnnnnnnnnnnnnnnnnnnnnnnnnnnnnnnnnnnnnnnnnnnnnnnnnnnnnnnnnnnnnnnnnnnnnnnnnnnnnnnnnnnnnnnnnnnnnnnnnnnnnnnnnnnnnnnnnnnnnnnnnnnnnnnnnnnnnnnnnnnnnnnnnnnnnnnnnnnnnnnnnnnnnnnnnnnnnnnnnnnnnnnnnnnnnnnnnnnnnnnnnnnnnnnnnnnnnnnnnnnnnnnnnnnnnnnnnnnnnnnnnnnnnnnnnnnnnnnnnnnnnnnnnnnnnnnnnnnnnnnnnnnnnnnnnnnnnnnnnnnnnnnnnnnnnnnnnnnnnnnnnnnnnnnnnnnnnnnnnnnnnnnnnnnnnnnnnnnnnnnnnnnnnnnnnnnnnnnnnnnnnnnnnnnnnnnnnnnnnnnnnnnnnnnnnnnnnnnnnnnnnnnnntggccttggctgggaattgatttttttttttctcaaccttataacaaaacgaccttgaatgaagtaacgttatttgaagacctgctgtactcatactgcagtgattggttttaaaatattttcactaatattatataataagttaattaccttggaaactgaattgagactttatatgcagacttaccaacaacacctagctgttttcaaagttcacattatttaaagcaggccattccatttgttaagagaatgcatgaaataatgtatagtgacagtgctcggtgtctttgagacaatatcattttgtagagctaaggtaacagtaataattatcatcaatagagtgtttaaatcataaggtaatatttaacctatctatgacaggctttaaacttaactactagtaggcaggaaaaccttactttggaaaccttccaaaagatgtcaaaaaattaactgactaaatattcatcaatgccatctgtatagtaattaaaagtgaaaactggcatcagattttcttgtcagcatgccaccatgaagaattatatagtttttggaagggcttttttatagatggtctgctaattaaaacataccctacaggcatctgcggtagccctgctcagagatctctggatagatgccacactttaattactcatttgcaaataaatactaagcattttcttttgaggttgtaaatcttctcagttgactgtctgaattttgtttatttgatttatttttactaggagcaaattgacatttttgaaggaataaaggacagccaagctcagcggatggccgaaaatctaggcttcgttgggcctttgaaaagccaggtatataagccattgggggatggtgtgtctgacttgtttcagaaaacatttgggaacttgcttcattgcctctagtgtttgtgattaccaggaaacaggattatttattgttttataattttttcctccagctgtttatgatgaagaaaaatatttccctgatgttttaaaagaggatgtttatgatgtgtctttgaatgtgttttggtatgtgtgtgcatgtgtattgcatgtggacacatacacttcatgatagatggtaatctctattttttctgtagcattgctggtacttagccacctggcaggcatgtgatacagctcattcgaactttagtttcatcatctataaaatgggaatgatgacaactcccgagaggcttattgtggggattcagtagaataatgtgtaaaagtccttattgtactgctccataaaggtctgttcttaatggtattaatattaataatacatgttatttagctaattgctattctttcatagctaatgggcatttgaaatgaatattgrtggcataaacttgatattttattgagaacagcttaaaatatgccaattttgtaataatatcccttggcttcaaagaccaaaacattggcctcagagctgttgagggacagaatctgtcttagtatcgtcccctgctctgcctttgttccagcccatggcacctgattatgtgtctagtggggcaagcttcctagtcccacagctaaatcagataaacttacttgttccttcctctgttactcagagaggccaccttaatggccctagattgtgtgtatgtgtgcatgtgtgtatgttctctggcctggggctttatgaaaaggttacagagtatgtcctttaatttggttgggcagcactattcccataagacagtacatgatgcactcttttctttctgtcttgtctttttcttttgattgactctctctggaagtttaatggcaacagtaggcaagtcaaagagggataaaacagaataaggttttaaaaaatatatatgcttaaatgaagggaaaccacttacttgaaaatgaataaaggctcactttgaaagcaaaagattgaagatggtagaatggaacagggtcatctggaactaaacctcaggatgagagagaaagggccaggattcgatggacagttagaggaactaattgccatttctgagactagcaaagagatgccaggaaagtgatctgttgaaaggaagatcctggaagattcctgaatatgtgctacagtggttggtttcacctcctgagaatgaggataccagctacattagccattcatttgatgtttattaaggggcttctcctgtagcagtggtggtcaccaagagcccgttttccatacagccactgtggtctagctgcactgtcyggcagtcagctccagagttgcacagtgaccctgtctgcctcctccatatcactttggacatctgtatatttctcttatttatttgcagtcacctttgctagatcctaatctttaccacggcagggactttgtccatcctactcactgctgtgttgccagcagctggcaaagtgcttggcatctatttttattgcccaagaaacatttgtcatgtgcatgactaggtgaaacaacacttctaggtgtccactttgaagaagttcctagaggctcagcaataggtggcttttcatggcagataaataaatctggagtgggcaaaatctgctgaccacatatttaaaagctcaggaggtgaacataatagagagttctagagaagttaataacagtataatgtacatcacaagatactgccccctcactacatattatacgagaaaattaagagttatttacagctcttaaatggcttattcttgttttcctggtacctgaaacactctaggttttaaatgagttacctatggaaggaagaygaatatgtgagaactgagggataagtaagtggccatattgtcagtatacctttgaattaatttatcgaggaaaggaaataaaatgttttaatttgtttttttcttttttcactgctaactccatgaaaggctttaaatcttcattttctcagcagcttggaatgagcactgatagggtgctgctcagtctgctgtgccttggggaaaagagacaatgaaaaataaccattgttcctcaggggctcacagaccggtagatatctgcctgctggctgagaggatacaggaagagggacggataaaggaatgtgaaggagagagtgggggagggggcagcgggcagagggagagagaggttgatctcagctgtagacatgttggaagttgttcatctagggacacctgagtgtatttctacagtagaagggatatatggcttgggatcccagggaaagctgtgcattagagttgtaggcttgggaatctctgctttatggggcttgctcaagctgtggggattagtgaaatgctctagagggccagtgtacaatgagcagatgggacagtgtagaagggaaaacatttaaacaatcatcaatgatcttttcctaaggaaatagtatcttagaggtaccttaggttcaacgtgactttgaaagttaagttacttaattttcatctaggatgtggtttaggcatttggaggtacctcactcatggttgaatatcatataaaatgatagtcttataaaattattaatatctttcctgtgactcatgcctgttgtctctaaaatgtgatgaatattagacataacaaaaataaagatgatactttgctttacataaaaattaccagtgtttgttcccaaccaaagtctctttctgtgagaatttgttgaaaaacgttaagacataggaaagcttaatatagtagttcccccttatctgtggaggatacgtcccaagacttccagtggatgcctgaagcttacctactaccaaaccctatatatactctttttttctggatattctagatatttatacttaggataaattttgacttataaattaggtacagtaagatattaacaacagtatgaaatagaacaatagcaatatactgtaataaaagtgatgtgaatatggtctctttctcaaaatacctcattgtactgtactcacccttcttgcgatgatgtgagatgatgcaatgtctacatggtaagacgtggggtgagtgatgtgagcattgcgatgtagcattgggcttctcatgacctcctggcaatamttcgtgagggacatctactttggatgatcctggatcatcaaaccatgggtgtcaatggctggatgtcaggaacagatgatgtcaatggtcagggatcctggatagctgaaggtttttcaccacaaccttttagaagaacatcataattagaagtttgtctctttctttttaggtcatctaagtgtggctgtagaggttgtaatccgtcagtgactttagtgctgtgttccatccaaggatcttattccataattttgtcctttccatttaataacttggacctcagtagaccatgggtaactaaaaccacagaaagggaaactgaggataaagggtgactattgtatgactgaaacttacaagtttgtcaagtgtgtcttaattatcatctatactgttcatttctgaaaacatgagtgccacgaattgtcaacatgtgcctctaaggtttaggctgatgaaaagatcggatggtccaagtcagtgcaagatcactaacacctcttgaagtggtttgtacttctggctagatttgagaggcgtacgtgaatattgatgataatttctggaatgcaagaaaaatatttaaaattcttaacctgttgagatttttgtttgattaatagacgatttatttcagcaagaatacacatagtcatcattgccagacttaatatgagatgttaaatgtttgatccaattttccttcctggataagtttttctttcctattcctgtcagttttgaatacatcataccagaagaacaggtgcctaattccacacaaagctcccaagagtgagtttttaggggtgaaattaggatagacatttgctgatcttgcataggtccaacaaatcaaggcaggatcttcaatgagccgtcagcagttagggtcgttgtactgaagcaagtactgctgtttcagctgtgctcttatggccaaccgctcggcttgcgcctgctgggtttccagggatatgtcgtattccgctgggtagagggtcgagggtggagtggccaggcgcgatggagtatactttgggaatggcatcttggcgatgcagcgcacaactgtgcctgcacgattctgaggccattcctccttatgctccttttgagacatttttaaagatttttataaacttgtcagattttcatgtacgtatatttgattttacgaattttaatttttaaaaattacttaacagacaaaataacaattgatggcaaaagtgcagaaaaactttttgtacgcagtggttatgagctgagaaatagatggcagtagtaagcgactgactgcaagttgaccaggagaatgttttctttgacctgtgcttatttttaacttttgtagaaagtgggaatactaatctcaacttgccacatgccatgccattccctgttacacctggtcacacacattctgtctgcttagcccttataaccatttagtgaatagcctctggaataagacatcttacaagggtttgtcattgtgagatctacaagggagaaccagcttggtttggagatgtctccaagatcagattatgttttagtcttgctcaaaaaaattatggtctgcctttgtgcaacagtaaaaattaaaacagaaaatatccccaaaatgctgtgctaatgtataattacaatgggattaatgtgcagaaaatgcagccttgtactaagcaaaattggtgtaggcttaagaagttctgaaacaatttaagtgtgtatctgtggatgaatggataaacaaaatgtggtatatactataatggaactttactgaaccttgtaaaagaagattctgacacatgctgcagtatggatggggcttgaggacattatgctaagtgaaataagccagttacaaaaagacaaacactggatgattccacaggtatctagtgtatgtatatatatgcatatcttttattttatgtatgtatgtatatagagatctctaatatctctatatatctggtatctatatatatctatacgtattatctatatacatatatatggagatatatatggagagatatatatgtgcgtatatatagaggggggtgtgtgtgtgtgaaaatatatatatatatggagatggagagagaggcagagagagagatgctatctagaatagtcaaatttatagacacaaagtagaatgatgttgccagaggcagtgggaagagaagaacgggagtttgtttagcgatacagagtgtgagggaagatgaagaagttctaggaattggttgcacagcaatgtgaatgtaccaacttgaccctgcagaactgtgtagacaaaaatggttgagatatggtgaattttatgttttgtatattttatcacaattttttaaaaaggaagttttgaagtagctggattagattatacwtatatatatatatrtgtacccagaagttatttctattatgtagtccccacttagaactgaattaatctttaattcaacygatatttatcgagtgttgactctgcagaggttgtatcactacagtggatgccaaggtgcccaggatacataagatgcctgccccatgcaactcacattgcaaggtcacattgatgacctagaaaaccccctaaaatacaaaaaatattccgcaatgaagtatttgctggcttcgcactttaactcaaattttatttggattaaaaaaatggaagaaattataaagaatactagaaaaaataatgggagaatttttaaaaatactctcagaatgggactagccttttaaaagtctgacacaaagccagaagccatataagagtgacattattgtgaaatttccatgtggcaaaagtaacaaaagcatgttcaaaaggtaaatgttaaaggggctgagacaagaggattgcttgagaccaggaattcaagagcagcctgggtaacatagcgagacccccatctctagaaaaaattaaaataaaaaattagctcagcctagtggcatgtgcctgtagtccagctatttgaaaggctgaggtgggaggatcatctgagcccaggagttcaaggctgcagtgagccatgattatgccagtacgctccagtctaggtgacaaagcaacactctcttgtacacacacacacacccccccacacacgcacactcacactcttcctataaattaataagggaccaaaatctcaatagaaaaataggcaaaattcacacaaaaaaaataagatgtctcttaaactcatagaataatgcctaaactcattcataataaaataaattcaaattaaaactatatgtgagtgtactcgtctgttctcacgctgataataaagacatacccgtgactggataatttatgaaggaaagaggtttaatttacttacaattccacatggctggggaagcctcacaatcatggtggaagacgaaggaagagtgaagggacttcttacatggtggcaggcaagagagcttgtgcagaggaaccccccctttataaaaccaccagatctcgtgagacttactcactatcatgagaacagcatgggaaaatcccgtccccatgattcagttacctcccactgggtccctcctgcaacacgtgggaattattacaattcaaggtgagatttggatggggacacagagcccaaccataccagtgagataccctttttcacctaacacactgacaaagatacaaatggctaatgattgtgaattggaaaatagtgtctctgataattttcactttttaggagtggaaatcagggacagcttctatgaagaacaatttaggccgggcgcagtggctcatgcctgtaatcccagcacctttgggaggctgaggtgggcagattacgaggtcaggagattgagaccatcctggccaacgtggtgaaaacccgtctctactaaaatataaaaaattagccaggcttggtggcacacctgtagtcctagctactcgggaggctgaggcaggggaattgcttgaacccggcaggtggaggttgcagtgagctgagatcgcgccattgcactccaggctggcaacactgcaagtctcggtctcaaaaaaaaaaaaaaaaaaaagaacaatttaacagaaccttttgatgtttaaaatggctacattcctttttgcttcactctgggtaatttatcctacaaatgtttaatcacatgtatgttaaatatacagagataaataaggcagtgctgtaatgtcaacctattagaaacaatgcagttggtcattatttaagtgaaaggttaaaggaattatagcatatcaatacagtaagatattatttagtcaattaaaaagatatgattgatctacctgtgttgctgatgaagtgtctctaaaattctgttaagtaaagaggtattggaacaagtttgcttttttaagacagatgaaggaggaatgcgtactgtgttaggcatagactgtctctcatatgaaggctaaatttatgagttggctgccactgggggcctgtgtggttgagtggtacaatcagggaaaacccttaagttcttcgggaattttgtatcatatacatgtattatctacctatgcaaatatttaatattaaaaatatttaatcatactcattatgtgggttcgtttatatctactagccctcaaatttggatttaaaaatgtttgtaggtgtttataaaatacattaagatagcatgaattaaatctggagttcttcagtcaaatctggaaccacttgcaatatttacaccagtggggatttactttagggatgtgtttcataggcgctgcaagagctgagtactttaagagttgacagaaaggcaacctaaagcatatccaaccacatgctccaggaacaaaaatgaggcagtggtgttactggaccttgtatacagaagctagagccctggtgggcttctccagtgggagcaacagccagaggaggaggtgctgcccagatagaaagagaggagtggaagtaccctggctcttcccttcttcccacctccatctctcaccactgcttgccattggctgaccccagctggaaaccagctgacccaggaacctagaaaactcagcctgtaagagtcaccttctctgatatacagagtagagttggagaactgaaaacggatctgctgcaagtaatccgaggctggcacaatgagtgaaatgtggcagtgggaaaactttggcttggaaaatggagctgggaatgagactgatacctaattcttctccacgatccaccctcttgctctgtgcatcacatgctccttttgttattgccaggagctttccagggtaggggcatggctcattcatgctcttatttcaagcgccagctcacaagataccagcttgctgtgtcataggcagtggagaaatgttggttgaaaagaatgaatgaatgaatgagtgaatttcaagcagaggtgagaaaaatgaagtcagggcataacagggcaaccttggatattcttgccctttgtggttaatgcctttgggacaagctattttcagtttgaacttgtgctgttcagtaactacactattaagcactttcatcttcctgttttgcaacaattttcattagacactcagtaattgttgtttcacagattatgggttggattgatgaatataataactgttttatttcagcacaataaggaaaacctagtcattataaactctcaaaatcatgtttaccttttacttaaatggagcttgtttgtattaatgattgtaatttatattgcagcataactctgctaatagagacatgataatttacaaaaagattaacaacgttttaggccgtactgaaaatattttcttttcttgataatggtctcttctggtgtctagaggagagctgagcaattccttttaatgaatagcagtggaaattaaaataattatgcttttctgtttttcccttcagaaaacctaactgaaaataaagacataacttgctatttttaaggtttcattaatccagcaaaataaattttcttttactgctttggtgtaattctatttcacttgatcacatttaggctgcagatcaaattacgaagctgtataatctcttcctgaaaattgatgctactcaggtggaagtgaatccctttggtgaaactccagaaggacaaggtaaaaaaaaaaaagaattgagaaaacaaatgaatgtattataattatttatgcaaactataaattgcacaaaagactgtagcagcagctttgcataaatttctttcagtaatttaatttctgccatagtttgaaatgctcccatgatgcagttgaacatttcagcacttaggtttgtttgtagccaaatgccaagcctctaaggaagctrctgcttgttttacttaaaaacattcakgcttggtgtggtggctcatgcctgtaatcccagcactttgggaggacaaggcgggaggatcacttgaggccaagactttgagactagcctgggtaacatattgagaccctgtctctacaaaaataataataataataataaataataaaaggaaagaaacattcgttcacctctttctctccaccttatttttttaggcccatcactgctgctactaaggtaaagatttgtgtagaaatgggagccacacacttgggtgtaatgaaggcatatgcctttatggaactggaacttttcgaacgtctttagtttgcctaaatctgtatataatttcaccttgtgttctgggctggatttatatcaccttggtaaagccccaagtcccccccagttgaactctttcaccttacttggagagcagtttctgcttcaggcaggaggaggtggcatttttgtggtgaaggtttctcctatccatcaggtagttgtagagtataaataacttttatatatcagtacctaccaccactgcactgtttcttgcatacagcaaatattccataagttcttattaatttgatagcaaaagcttgtaaatgtgtgtgtggtaaggggtaaagtggagttctacacacaaattcacaagcttttgctgtcaaaacagtggaatggcaggtggataggatagggataccagactgtaagcaccatgaaccttttcttttttagtacatttcacctccggtgtcttgcatgttgtctagcttgttacagtcagtaaatagtaatttgcattgaattgttaactggggtgaatcattatgtgtaaacacatcaacttttggaccaagacggatgagacaatattttctccttagcacatttcagagattctgtagctagactcagagaaactacactatcatttccttcgaacccagagaggcctaagtataaattctgtatctgccatgttttggctacggatctgggcaagttatttagcctgcctaagtttcaggtcttttttttttttttcaatcttttcaatcaaataagtggtagaaatgatgtctagctcatagagtgttgtgaaaataagatgaaatcatatatgagtatgcatgcagtgtcagatacaaaataggctagtccctaacattcataaaatgaaattcctcttctcaggtagtctcagagtagcccaggaatagtatagatttcagacgagaacaagcaaagattttatgtttaggaagccattgaagataatatatttcatgatttatacagatgaccatccgatagaaatctgtgcttgctcatttataaacaagctacctttattcataaatattttttttaaagttgctatggctatcaaattgtgtgtattttataaagctaagaaaggaaggggaagaagctgtttcttgagcttatatgccagacactgtgataagcttatacctatattctttcatattgtttaccacaaccctgaaaaattaggagttgttatccccattttatagaggattgagaaaccattgtgactgtcccaggggctagtcagaagttacaaaagctgggatttgaacccatgtccctctgagtccagcgtgcatattgattctgatactccagactcaactgcagctacctgccttttctactttctcccatttaaactacttatttgctttcacgtacatgacctagaagtagtctccagtttggcagggaataccagtcagaattcatgttgacaattaaatccaagaaatgaaggagaaggtttaacaaaagttcttaaaggtcatatattgctttttcaactagtatacacaagcagcctggttgctttgcatgaagaaaaatggaaatgtagctgtagctatggagtgggataaaaatggctgcaatacattttttattcaaccctttgggaagcagtcacgagctgtgttctcgcttcagggaacaggggtatgggaaccttttcttagactgtgtttataaaacgtcatgagtctgaagtttgatttttaattattaagagaatggaagagtcttgagatttttttttaagggaatcatcataaaacattatatacagttcattaaaacataagtcttatgtgatatttttaagagcaaaattatctttagttattaatttgttcattgtaccataaaagttcagcaattgaattataatcacaattaaatgagtatgttggtttataactctaatgagcagtagtcaaattaaacccaattaggaaatggtgattaatgaccaaatgtacaaattgatcttcatcattatcacagtcccctcaagctatcttttatttagaagctgtaaaagcagtcatttatattttagcaatattgataatcttaatatttataatctgagtatttgttagttctgtttagatcagtagtagcagaacatttcacggtaaaatttccacattgaaactttgatttaataattattctttaaatttaaaagtttaaggagctcagcatcacattgtaccagctcttttttgttgttgttgtttctttttctttttctttttcttttttatttttgagacagggtctcactctgtcgccaaggctggagtgcagtggtacagcctcagctcactgcagcctccacctcccgagttcaagtgattctcctacgtcagcctcccgagtatctgggattacaggcgcccaccaccgcgcccagctaatttttgtatttttagtagagacggggtttcaccacgttggccaggctggtctcgaactcctgacctcaggtgatccacccacctcggcctcccaaagtgctgggattacaggtgtgatccattgtgcctggcctgtacccacctctttgtaggaaactttttttgaccttccattggtcagtgagtgctatttttaataattcaggttattgttcatatatttgtacaacaagtgatgccgtgttgagtgaagaacaagggccttgataacatctatgctgctaagtcacccatagggaatttttgacacggagaaagaactgcagtccaagagctcttttttcctatgtgattaataatctgattcaaaaaatataatttgacactactaactgcaatgtagtttagtgactcttagctaggattataatggttgctaatgacagaaagttatattagctttgtttttgttaaaaagttatattcctgtaacagggaagtctaaggtgtggactggcttaaggcctgaagagaatcagggatttgctggttctccagccctgcttgcctccaaattggcttctttctcagccaggctctcagaagctggcagcaaagatggctcccagtgctccataactctccctcagcagccccataaatcccttcaaatgattctcattgaccctgcttgggtcacatgtctatgcccatgccagccactgagcaagaatcatatggtataggagacatacagtttcttaatggaagaagggacactgagtcaaaacatgcctaccagaaagatgcaaccttattgaaacaaaaataaactgttacttagtcaatagaaattaatcgttattttccttgtttgtccaaatgcagtgccaattcatttcattaattctgcagccaagcaagaagcaatgttttatcattatttatttatttatctacctgcgcattcatgtattcattcattcattttgctagccactgtgaaatttcatgtcatatttcttctcaccttcagccagctctatctgtacacagactcctttttctgatgtctttaaagcaagttgtactccatgggaagggtgggcattttgtcccccagggaacatttttagtcatcacaacttggaggctatgctactggcgtggataatgctaaactacaacgcacaggatggtccctgttcacagagaacgacctcacccaatctgtccatagtctagagattaagaattcttgctttggggcatcttcatcagttggaagctgaaatycattcactgggccaaaggaatgagatccaatttgaagcagtgactatctggctaagattccgtgagaattaaagctgggtgatccacagttaactggcacatcaaattcctttctttcttcggattgatttccctaaataaccaccccgttgcttcttgttagcaagtgcccatgttgttggtgggtgtttctctgtttctgtctttatacacaagactctattttcaagaacattttcggttctctacctcccccaacccccctacccaccccatacctattttctcttttcacagccactaaaaaaaagttctaaaaagtatacaactctcagaacatcaatatttaatgggaagtgggactaatttgaaagtatcagcattttaaggccattttggcaaggcgtgtttcaatagtacattatggttatttatcacaaatcaaacgcagtacgttgcttgaagacagattatttttcaaactaattatgatagtcttatttcctgctgttttatgttccttttatgtgtaagtttcccctctgaaatgtattcttcttttgtttaattctgtgacacattcttctgttaaaattctagggtcagaggcctctaactgccagtcatgttttctatcgagattgttgaattagcagctcacagaatctcacgccactaaacaaaacaacaaaacaccctatgcatataagtaccacarctttctttgatattcgttcagaaggaaaatwcatttgtataatctatcaagcatgtaacaatgtgcttttgatggtgaaaattgttttataaatattaataggtatgtttctttcacccactttgtataaaaaatggcctttgttcaagatgaattttctttagaattgagtttcattaatgtgacgttgacaatcttaaggtccggaccaagctcagcacctctgaaaatgcattttgtattgtttgttgttttattaaatgagaaagctaagggtttaagcaggcaagtttattttatcgccctgctgttgacatagacatcaatccatttttaacacgtcaattcaagaagtgcatttagaagcgtcttacaggaggaaataagcatgtaagagtcagttagtattccaggattaatctactccttttgcgtagccacaggtttttatttattttctttgttattttactttttttttggttttcatgttaatggaatgcactttttctaagtttctccttcactataaaatatgacacctgtgtatctatcacttggttcacacaagtggatacaagtgtgagaactgtgacttagcagggattggcaaactttttctgtcaaggaccagttagtaaatatttgggggtttgcgggccatacagtctgtattgcaactactcacctctgcttttgtcttgggaaggcagccataggcaatatgaacgaggctatgttccaatctgttattcataaaaatagggctggcttgagggtcttagttgctaccctttgcttagatcttcatttggagctattctgtaccaatctttagccttggccttatgcacaggtgtgatgtgatttgagagtcaccaacagcctattttacccttatcttttagccaaaaatcttgttttctactatttatgatgcctraaatgccaactattaatattcttcctttgggaaaattcttattcattcagaagatggctttttattgaaaaccatgggtaacctgtacatatgtaaactatgggagacatttgcttagatttgctctaaacagaaatctcagattataaaggaacagataatttttattgttaggaagagaggagagttctgtagcctgggctacaataatgggaagctcttaagtataaaaaagcatgtgcatattagagggtggtgtggtcgtctaacaacctgctagtacccactgtctaggaagctaagcgctttgcatacaatctctcctgccaccaacacctagagtagaacatactctgatccccattgtatagacaaggctcgggtttaagagaggttaatgtgcttaaggatagctggctaggaagtgccaggagttgtcatttataccctgatatttttgatgccagtctatattaagtggtcaggttcaaggaaaatcatttagatggcacaacattgtagatagtaagataggaaagcactttgtttgtttggtactatgtataatagggaaaaacaaacatttttctcctaccaractctcaacacagaagaacacttcttggaccagatgtgtgagtttttccaacactgactaatctctgacactagctaggtatcctatgattcaattcaattcttttaccatctacctggaattagagtcagatcccataggttaaggggtcagtcttatcagactgactccactttggatgtcatttgtaagaccaagcctctggtacttctgatgaaccagctgtaaattgggggttcttaggactccctccttgtgccccatcatttactagaatggctctcagaacccagggaagcactttacttactactgctgatttattataaaggttattttattttttatcttatttttttataaaggatattttaaatgatacaaaggaatagccagatgaagaggtatatggggcagggtatgcatgaaggggtgacaagcttccctgtactccacaggtgagccaccctgtagcacctccctgtgtttggcaacctgtaagctctccagtcccctggagttgagaaatttttatggaggctttattacatagggatgatctgttattctttctggagcatggaggtggggctgaaatttccaagcttctaatcatagtttggtctttctggcgaccagccccatacagaagcctccaccaagacttaccttaatagaacaaaagactctcctatctcccagaaaatcccaagggattaggagctctgcatcaggaatcagggtcaaaggccaaatgttagaacacaagattctcctagcacccctattgcttaggaaatcacaagggttttagagctctatgctaggaattagggatgaagaccaaaataatatatttattataaatcacagtatcacagactacttttaaaatataaaacaggcgtaacaaatatgtgtctgaaagaatccctttacatccttaaagtttttcttcccttacccactaagtaaagactggggtcttgaaggtggcagttcaatttgaatcccctttcttaagtcctaagtcctctaaataaattacttcatatttaggtagtgtttttaacttcccaaaacacttagacatacatgcaatgatccaattaggttgtttagttttctctacaaattaacagtcggcacaggaccgttgtagatatacaccccttttatcccatagtcaccatcttgaagctctgggttaactgcaaagttctgtcaagattgttccctggagagaacgtcataccacagaaaaacatcctctgaaaatctagctttgcaggcatttagttgggattgccttttgaactttgaatacatacccattaattattctctctctgaagcagcttgtaactgtagtctttgtaaggagcaaaggtcagcttgaaactattttgatttacttgtttattgatctcaaccaagaattcctttatttgaaactcttcccttaggaagtcaatttgataaccttagcccattcattttgaaggtgtcagttataagtagtcttgccaatgagtaatggaggagctaaaattactaataaattaattagaatgcatttataaacctagtggaaagccatgtacgaagttgcttttttattgattattataccagtcattaactgctgagaaaattcccctgtagcaagcagagaacattggccaattcgtttggtaattgtaggattctgtcaataagctttcaatattttggaaagtaattactcattcactccaaccattcacaatgtgtggacaaagtggttgggcattttggggcaagactaaggatttaagcagacattaacttccatataagattctctcttgtcgctcagtgctactttaagtcatgtgcggtctatatatatacttataacaagtattcttagatgttaatatgctggtctacacagatttgtatcaaagtgcttgaatattgtggtagggaaacccttggagaaaaccctctacctggggtctctaacgccaagatgccatatacagccatgttttattttcataagaagcaagtataattaggagattatagccactgcttttcagtgagtgagaaatgttctgtggctgtttccctttcaagagtcaggtgcctgtcagcaatgctggaggagaataggtagtatctgtaaattattgttcaaagattcctggctatcaatatcccaagttaagtaaaagaacattggccaggtgcagtggctcacacctgtaatcccagcactttgggaggctgaggtgggcagatcacaaggtcaggagatcgagaccatcctggctaacacggtgaaaccccatctgtactaaaaatacaaaaaattacctgggcatggtggcacatgcctgtagtcccagctgcttgggagactgaggcaggagaatcgcttgaacctgggaggtggaggttatagtgagccgagattgcgccactgcactccagcctgggcagcagagtgagactctgtctccgaaataaataaataaataaataaataaacaaacaaacaaacattatgatgacatggcatcacagaacactaatttctacactaagagagataataaaaggggtcagatacccagataccaataatgccaccctctccactgcagtctctccctgattgtatgtataggagatctgtaaatcaaggaaagtgccctgtagtctgtctcctattatggaatgagttttgctgggtccaggagatttccaccagctccagaaactagagacaattgtgctaataatgcctggcatcctggctttgtgactgaccagtcttggtcttttcgtgtcttataacttgaatctgaagcaccataagatggtcctgcacgaatcaagggcatggcccttgttttaaggattgttattgccattttttccaattaaaaaaccaaggcccagagaagaactaggttattttatcaaggttacagagttagtaatgtatgctggaaattgctaaaagtatatattttaagtgctctcccacaccaaaaagaaaaaccaaaaactatatgagaagatggatgtgttaatttgcttcagtgtagtaatcatttcactgtgtttaattatttcactgtgttatatgtatatcaaaacatgatgttgtatgctttaaatacacagttgtccctcaatatatgcagggaatcggttccaggaatctcagatataccaaacttcgttcataytgcacaattcctgcagttggccttgcagaacccatgtatgtgaaaagtcgaccctctggggctttacatcttgagaataaaaatccagctataagtggaccctcacagttcaaacccatgttgttcaagactcaagtgtatacaatttttatttttaataaatgttacagagttagttaaggatcaaataaaaatcgagcgattctagtctggcattctttccactaaatacttttggaaatactagacaggatactgattcaataaaaatttcactttaccatatcaagaaaaggacaataggggacaaaataattaataatattgtctagtctctctttacatagaagagaaaggtgataattagtggttaaatactaaaaatatataataaaaataatgaatcaaagctgtatctatgaagctgtgccagtctgtaacttttaatggttgatggcaacttttggggttattctrttgaaatgagaacaacaggtagaaattactatgttctttactagaacgtaagtcccttgacaacagggaccaaaccctaaaatttaaaggtcaagaaagccaaagcagcytctcctgcctgtaacatgtgaaaaaaaatgacagtacttaactttcccttcgcttgtgcctaccagcctgaagaacttaatttatagatcctcaagagatattcaagtatgattgttttcttctttatttagttgtctgttttgatgccaagataaactttgatgacaacgcagaattccgacaaaaagacatatttgctatggacgacaaatcagagaatgagcccattgaaaatgaagctgccaaatatgatctaaaatacataggactagatgggaacattgcctgctttggtaagaagcagttatatcaaaagaatgctttgtggattcttatagaatttaggaaaccttgatttctgaaatgtcacttaccaagaagaagtaagcacataagtttttttgtagctgaaaagtcttaggaaagtatccaagtttcttctcaaagttgttttgattaatggtcactggtgtaaagcagaatttctcaactctggcactattgggagtttgggtgggataattctttactgtcctgtacatcataagatgtttagcatcctaacctctagatactactaacaacccccacttgtgaagacaaataaacccatgtaaatcaataaattaaaataaatgtcttcagacagttccaaatggctgtggtatgcaaaaatcaccccaactgagaaatattgacttaaaacatctcagttaaactttgcttagtaaaaaattagaacctttgctgctcaactcagtattaatatgcagaactcttctgaaatttaggtttaaaacaaaattcctttatcagaggaaatagaagaggacatacactttaatcacgttgctaaagtttcaggttctgtgataaccaaaggatgaaatgtttaatccattatgctagtttattaataaaacaattgattttatcacactcatctaaatttgtgaaaatggcttcttcagctgagataagaatgtctgtagaagcaatacagtttctattattgttcacagcttatagtgctcagatttatatgcttctgacttaattgcacaagactgtgtttctggtagaatcaattcattgtactggaaactgaggtcttaatcttaatggaattaaaataaaaatgatttgtagctcattaaaccagcaatatcattgtattcagaactgaagagacctcatccaagaggtggctgttcaatacaatagaaaatgacatccaattacaagtgataccaaaagctcttgctttgtattggagcaataactataatgtaccagatcactcacatcattctgatcctgataagctaatgcactctcaatatttgtaggcatttagaaaggggaaaggtatatgggtttaaaccaaattaaatacagattatttatagcctctgtaggaatgtgcatggtttgaccacatagcagcctcaaaatctatgatttacacatttcaaattgttttaagattctgtgtaaaccatttttattttagttactccaaatttaattagtcacagtcataggcttttctagggaattggagggtcagaaaaatgaaaggtactttaccttgtgagtttctgctgtgttctggagttttttttttctctctcaaggaaagtaatgttatataattaagcttaagaagcaaaataagtgcaattgatcaataaaacttagctctggaaaacaagacttttgatattaaaactctctacctactttcttaagaaaggctcctaagatgttggcacattttggttccagttttaacggttgggttgctggtgagcattgcttatattaatttgaaagaggaacaaggggataagaatattgtttttgtgcagtcatttgttcatttgtttctaagtttatccaggtaacattatgtaaacatgtatgactgtactaagtgtaaaaaagtataaaatcccactgaagttgggaagcctgtggttcaatcccacagatgccacattcaaaggaccatattctcagcaaacaaaacattgagaattccattctttactcctgtctcttaaagtatattaaaaagaatgtaattcataggtcctagcaacttccaatagcttgtttctctgcctcctgattctcttaagcttacactttgcagaacctaaaacttccttttttactactggcccaaatcggttacttacttaaacctttccttctttctgtttttcagattgatttaacttcccaatacatcctgttcctcattcctaagtcttttttgtttcattgtttgcatatacatgtcctgattctttatcctaaaagtctatgaactaatctggtttaatggaattccaaacaggatataaattggcctggcaatgacagagttctctcttggcaatatgggggagggaaaatgtttatggaccatttcatgttgctaaatgtagcctgtcttgtgtcccatttgcatttcacagtgaatggtgctgggctcgccatggctacttgtgatatcattttccttaatggtgggaagccagccaacttcttggatcttggaggtggtgtaaaggaagctcaagtatatcaagcattcarattgctcacagctgatcctaaggtaacctttctctttgtagggagattatatgccagttttaatttctcaccgtcaagagctcacttgttcttcctggtgagagttgataagtcaatatgtgtactctgcagccccagatgcaacttctatcttttttttttttttttgagacggagtcttactccgttgcccaggctggagtacagtggcgcgatcttggctcactgcaacctccgtctcctgggttcaagcgattcttcttcctcagcctcttgagtagctgggattacagtcacacgccacaacgcccagctaacttttgtatttttaatagagacagggtttctcatgttggccaggctggtctcaaactccctacctcgtggtctgcccgcctaggcctccaaaagtgctgaaattacaggcatgagccaccgcgcccagcccacaacttctgtcttatatcacattggaatacgtgatgatttaactcgttttgggtaaaaggcttgggatcttatttcagaggttgtgtgtacagtcctgagaggtggaaggaaataaaaaagatacagtgtgccagtcgaaacattggttggcatgaactttatttgggtaatttacacagaagtgactggtcctatgcttacatgatttagagggaagagtactatgattccttccataaagatgctgaaggtattaccatatattggaaaattttagggttatgggatcaaaaatcactgggaaataatggccccaccttcttttgtatgctttctaatttttatctctgaccattagtttgtaacatatgtactaagtagcaaataactgtacctggtttcatagttactattgctgcttcatgtgcatctttttaacttgagggtagctaactagaatgtagctaccacacccatgctaggggcagtgtgggcattcaattaatatttaatcagctagtttagtaaggaagttaaatatcagtatgctttgtttcacctgtagatactcagttgactataacatggtttaggtagatgcttgttatgtagaaagaccaaaatattttgaaagtctaatgtacacggttttcattcattcttttaacaggcctgtgaagtacgtatatgccacaacaatttgatataaaactttttctttaattttttgattatttttttttagagacagggtctcgttctgtcacccagaccggagtgctgtggtgttatcatagttcactgtagcctcaatctcctgggcccaaggtatcctcctcgcacagcctcttgagtagctaggactacaggtgcatgccaccatgcctggccaatttttttttattttttgtcttgctgtgttgctcaggctggtctcaaactcgtgacctcaagtgatcctcctacctcaggccctcagatcttggagattacaggcgtgagccatcacaattggcctaaacttttatttgagaatcattgtctcaatattgttagagtatctaatatattgagttggttactaaaatatctgaagatgtgggaaatctgaattgttrctaagagaatgataaatgaaaataataccagattttttaaaaaagaaatgtggtctgaactaaatatggaagcttcccattaataaatatactggcaatagcctgttttgttttgcatgcataaaattttgtcttatattggtagtacacttgtctgttttcctcatgacttacatagttggtggccttatgtttttgcttgtcttttcttctgactcacaaaacagacggcaaggtattattagcacttatcttcagttctccagtgccgttcaggaatagccaagttattgaagttcaaaggcagccagccataaggaaggtattcgcaaaaagaacaatgtttccacttacataagcactttgttttcattggttaggtagaaacacctatcagtggctctctaatcatgtattaattcacttattctttcttcctactgctttctaagggaagaatcattttcctcccagagattcccaaaccaattgaaatctgtaaataccgagacacacagctccttaagctgcttgaaccacacagtacccagaggacagacgattgtaataaaatactgaacttttagcgtctactgaaactctgtgcaaaggataatagagagccactgagagatgaaatctaccaggacaatcattggatttcgttgaaatagcttttcttagtggctcacctcaaattttaattttgtaaaacctgtaggatggggagggatagtggaaaaattactgtcagagccatttttcttttaaaaaaaccactctcttccaaaattttgactttatggaacattttcaaatgcttggattatttcaactttttttgagattaactgtcatcttgggtagataaaggtatgtgggagttattttatttttctcatgctatatcaggaaaatgaatgcacagctcatctcacagtactttttccaaatcttgaaatttcaaaaccagttaaaaaacatagaaatgtaatgagtattttcaatcctggcttcgtttcacaaaatttagagaacagaacctaaaaaatagtatagatgagttgatgtgattttgcaagcaaactggctgtagttttggcagtaattatttcgtgtccacctgcccaaaagtagaggttcctgagagcccaaagctaattatttcaaaggtgtcaattgtcttgttagatgtaaggattagttagttgaatacacagaaagtcaaaattacagaacaccagtttttgttaaacttttatcaactgatatttacaactgcttatttgcagtgtgtctaagataattctgtttagtaaacacgtcattcaataaaattattacaggttgacatatatttccactcatgatgtcagtcatagagctgaaaattttagttattttgcttgactgttaacccaaatgctgattttcacttggacctaacacaagtatctctacaactaatacgtttcttattattttatcatatatatgaaatgaagttcctctaccaagctgaataaaacaagagtctttttcaagataaactcacttactgaactgaattcatataaagtatatcattaaatattttataattctcttattttccagctgagcttgagatgagagaaaagtaatagagtttgttctgctggtggtcttcatcattttgatttaaagaattctaagcattagtattctttaaatcataaagagcaaaaatgtataaaataggaaatagaagtagggttttgtggttttctgttaagaatttaaagacatttaaaagaaaagcactatatagaatgttaaccttgggtttttgttttccaaattatactctggtttgtattttaattctgaacttagamttccaaaggtgtagcaaatgtaacatctggaatatgttgtgttcacttacacaaaacacctagtgttcacttacacgaaacatcttgtgaagtgaatacaaggaaaggacacttggcacgaatctctccatgaccccaactctgttggccaaagataagcaaatcttttgctctctggaggcctagttttgaaaagcaaaagtacacgattggcattagtaaaggcacctcattggatttgattgtacttcctggtttagatccaactttgaatcatattttctaagcccttgaaatatctaggaagaaatgtgctacctaagcaccaaagacaagttgaagaatggaagggactcttagtgggattcttatgccagactgcctgggttccagtcttgtctttaccagttactggttgtgggaccttgggcatgctatttaacttctgtgtgccttggtatcctcgtttataaagtggtaataatagcagtacttacctcagagggttgttttattacacatattgagacacacacgcacacttttcatttagagggaaaataatttcatatgacagtatcatttaaaaaatttaataaacttattaaagtataatctccatacagaacagtatacaaattttaagtatacagcttgatgaattattacaaagtgaacatatcatctaacctccagccagatcaagaaatagaacatggctggatgcggtggctcatgcctgtaatctcagcactttgggaggccgaagtgggcagaaggtcgggatttcaagagcagcctggccaaaatggtaaaaccccgtctctacttaaaatgcaaaaattagccaggcgtggttgcaggcacctataattccagctacttgggaggctgaggcaggagaattgcttgaacgcaggaggcggaggttgcagtgagccgagattgtgccattgcactccagcctgggagacaagagcgagacttcgtctgraaaaaaaaaaaaaaaaaaagtaaaagaaaaagaaataaaacataacagggatcctggaagcctcctcctcatgcagtccccatcattttcctaccctgctttctctccacaggtaatttcttttcttttctctcttttttttttttttttcttctgacttagcctcctgagtagctgggactaaaggcgtctgccaccatgcccggctaatttttgtatttttagtagagatgggtttaccttgttgcgcaggctggtctcaaactcctgatctcaaggggtcctcccgcctgggcctcccaaagtgcttgggttacaggcagtagccactgtgttcggccctcaaaggtaatttctaatatcacagatttgttttacctatttttaaacttaatatcactggaatcatgtactgtatactcttttgcatttgttatcttttactttacttttgctactggttagtcttttcaattttagtcattcaggtaagtatgaggcattatctcattatggcctttctgtcatgactaatgaggttgagcaccttttcatgtatttattagccatttgaatatactctgtaaacttgtattacctcatctatagacatgaaaataataccttaaagcattgttttaagtaccaacttgcaaacctttctaaagcatagtgaaaactttggctttttatattttctgagtgtttcattccattatcacttccaaaacttagatttagaataaatgcacatctcagaaatgggaggtgtctgatacaggttcagtgataatcagtgttacttcatgtgttgttttgaaattgatggaaggtgtaagtgactcagcttacaatgattctctactcagacaaccaaggaaacagttaataaagggaggattaaattcatgtttgaaagaagaacaaaatataatttgttataaatttgagaagaggccagctctttttgtgctctatggtatatgtttcagaaactttagaatgtgaagccagagaagtaaaactgcatgccatattttcagaatcaggtatatgcaaatgccttacgttttaatatattttaggattcacttgtgctgtctcatatttttaaattattgcacatttagagtttatttaagtacaaagaagaatatcctgttttctttcagatacatgcgtataactgaggcacagagctgtttaaacttaaactgaggtgccgtaaaattgtcaggagttgatttgaataaccagtgattcacggattgagcagctccaaaccaaaagtgcttccagggctccatcaaaagaatgtgaagggaagacttttatagggcaaacacgaaagtaaagcaaagaaaatactggattggttacagttatactgttgccttatttggtctatcctcctggaaagttctagttatgtaaccataagttagataactagaactttctgcttccaaytggttagccttaagtttcatttttctgtaacataggcatttacaagaaatagctcaagttttgtttatgtctgcaaatcaagcagagttaagrtcacttatgaggcctaactggctttgtctgctcagagattcttcaggtctggtgtccattttaatttattgtaacaaagcaaaacccatttcattacacaccacatgtgtttgctgaaataycttatctgcaagcgactgttttctttgtagggaagtagaactcttgtaggaatttattttcgaatatagtgctcaatactttatacaacacaagcattatttttgaaatgactaccctgcatttctattcttgcaggtttkcttgaaaatatgtatttttttcatatagagtggaaaagattaaaattccaggcagccattctttctagtggtagtcgacctgatagtctagtctgtggagaatgattaattttgtgttgatcagctggtcatttagtctccacttccacttagaatagctctttatttagggaagtcactctgcataagctagaggatggaaaaccatctaccactctgggcccttttcttttttcccccggcagtagttttcccagtgtgaggaattcataaatgttgatttttgcatatcttttcctgatgtctagttaattaaaatttccaagaatatctggccctccttgcccacctcacatttgttccattttacctgccaatacttctcagtaataagtgggtcctggtgactgcatttggttttgtgtcttccacatgatcggtgtatctgctagctaccacattttcaaaccatccctaatagaacactcaaaatctatttacatgctcctcactgacataccctcagaaacaagccaaaaataagatttttactctttactctgtcttcaaaatccaggttttaatgcaacctactttgttttatggtaagtgacttgaataatttaacagatttggggcttagtaaattttgtcgttagtcccagcaagctccggaattgattacgagtcctctgtgtagatgcctttgtagagtgttaaagagaaatggaccatgaatcaaagtataatgccatatagtttggaaaaatatataattattagaagagttagggttgttgttttccttaatgttattgcatagagaaaatgaagcattgaatgcarcaattagaaaacagtgcatttctcagcaagacaatcaataatggtcgggaataatgtcaagaatctctgcatcttaagaataatcttatgtggcagggcatctgaaagttgtactattagtatttttgagatgttactttaaaattcagataaagcctggtaaaggcatcattagatgtgggtagtgaacttaggaaaatcattcagaagaacaaggctgaaatcctttggactgattcctttcctgtatagcagaggtgagatgtagtctggtgggatgtgccccatggattcaggagattgcagatactgtgaatcctttttttcctctttccatgctgccccacccactgtcagagaattaggaattaggaaagatggtctcattcctaaacgagcaacatgtccatatgggcttgcctaagaaattggctcgacttagtagtttgctaaatagtcttttgtccttattttaggttattttataaatagtagtcccttttcctaattattaaaataaggacaaacaaaagagaaaattataaaatagattacacagatatatttatatatacctttttaaaaaawatatatatatacacacactagttttgacaaaactagacttatatcatataattgacaatattatatagtctgctttctttcttttttttatgtgttttgcctgtcctagtacagttctctataacattttcagtggcggaatggtatttacttgtatggatatacaagtttacttaacctagtgctctgttatttgatattcagggtgttacaaatttaaaataatgccatgaacctccttgttctcataactttacataaagctgggattattcatataagataaattcctagaagtgtaagggtcaaaatgtatgcacattttaaggttttcacatgcattgctgaattacctcagtaatagttgaaggacttgtagagggctaacatcagtgagttgactgcccatttattttcccatgtcttggctatcattgctgtaattctttaccaacaggagaggtagcatttttaaattctttttcttctattcagcatttgtaatgcctctttatgacttgccttttctttttttttgtctagttttccattattacataattctcacagtgatttagaacacaggactckgtgtgtgtgtttgtgtgtgtgtgtgtgtgtatatgtgtgtttgagatcaagggaatgggcagttttattyatgtcatcagtcatgttttcccacatcttgactcttgtctttaaatttgtttatataaattttgatgtctcactataataaagtatgtacacttgaaatactattgtgtagagtatattgagatcacctcatgcatgttagtgtcttttactatgatttacttagtttcccatgaaacttgtttttagagttttaaaatttgtgatttcatgaatcaacataccatggtacaatttcaagtcaaaaatggtattccccccacccctcccacaaaggaaacagttctcctggtctgtttaaagcaagatgaatattaggatcagaagtggcatgttcctctagttattaataagattctttttatttccaaggaatgcttttagagtgttggaggaatttcactgtaatctaatctacattgttttctcttagtattcttggtatagttgatcattatttgcttgttctgtatttggaaattcgcctgtgtgctaaaattaatttgtactccaaaagtcatttgtaattccacagcactttcaaggtcattcaaggcaatgtgcagagtggtgaaaaattttagtcacccaatgcacatgttcccaaatgagatcaaaaaggcaatcctctgccttcttgtttcagctttcatactgtaaaacgtgtccttttgcagtctatttatggccatgttttttgcatttttgtccttttttgtgtgtatgatttcactgttggcccccaagcatagtattgaatgctttctagcattcctaagtgtcagaagcctgggatgtaccctacagagagcatacaggtgctagataagcttcattcggcatgagttaataatgctgttggccatgagaagcaacaatatatattaaataaggtgtctttaaacagaagcatacttaaaacaaagttaggaattgatctgctgatgaaaatattgtgactagaggctcataaaaatgtaactgtgtttttccgctaagaacaatggttgagtatttgctaattcagtggttttagtgactgtatagaccataactactgtggataatgagaattgcctgggtagtgttttggataattatgagcagcttttcatagattatatgatagagacaccttttctttctctttctttccttcttctttctttttctttcttctttcttgactgtcttttctcacagggtctcattctgtcacccaggctggagtgtagtggtgtgatcacagctcactgcagcctcggcctcctgggctcaagagatcctcccacctcagcctcctgagttgctaggactacaggtgcatgacactgcacctggctaattgaattttgttttgtagagacagggtttgttgccctgcctggtctcaaactcctgggctcaagcgatctgcctcttagcctcccaaagtgctgggattacagacatgagccacaacgccaagctgagacacttttaaagaaaggacaatcagaaacccccagtctaaatgtaaagtaaaaaacttttcttatcatagtttacttgttcccctaaaggaaggatttgattatgagaacctttagaatatgccagtaatggctttttagacatactgcctttatagctatggaatgattaaagtttgaggaaattttagtttttcaacgtttcagttaagaatgctttccttacaaatttaggttattttcactttatgtttttggaagtttttaaatattaaataatgatcgctgtttcacctttacgaatttacatttcctactaaaagtgtgatrttttaaaaaatttcctaattgtattcctgtaatacaaccactattatcattttaaaaaattttcttccagcattatgtgtcattgcctgatgaacatcttctcatgttgttagtcttcttgatcatcattttcctagcagtataatggaccttttaattttagatatttatttaaagaagcctaacatataaaatatctttcaaaaagcatgtggaactttgtaaaccagatttgcttaaagcagggaattatacagtcagaaatcaaatataatagtaacaagtatgaagagctttgtttcacagtaagccataagacttaggaaagaaaaagaaaagctttgggggtacataacagttttataacaataaaaaaggaaaattaacataattcaggaccaagctacatattttttatgtattttatacaattactacctctgtggacttctaatttgagttagttttaattatctcagaattaacggcaagtcatttattaatatttgacacagtccctctaagttgctgggatgctaaactacctaagaattccagaggtggctgaatgcaccttccgagtttttcagtttaatatcttcctgttcaatgtcttcctggtatattcaggtcagtgaggttaggaggcgtcaagaatgagacttggtactggtcagaaaatgaactcacctttatttttccattctctttcttgctagaatcctcaaatgatttattttaccaaaaacctcttaagattccactgatttctctgtgcattcccaccaaactttctgtctttgtaaaggagcaacatactccaggtgaacttctaaattaagcgtctttttaatctttataaccatcatcagatgtatccttggggataatttgtgcctatctcctttttctttttcatgtgatatttacaatttacagtcctcaccgctgaataatctctttatttattcacttctttttaaaaattctgtaaaattgctcagaaatattatagtttgtttgcccccttccccatccccacatttcttgttgctttttgctccatattctttaaaaatacccaaggtatagagctttcctgaattttctccccattcaaggtttttgttttatgcaactattgtatacttcattatctgtagcccctgtaatggtacatagaacatggtagatgccccaaaaatatctttttagaacaaactcatattgtcagcctatttttttatttccatataagtcatctagctgaatattctcagccaggaagaaaagcgtaataagtcaatgagttgcccttctgaaacgattcagtttccaggctagatgccaatgccatgtgtctggcaagactgtaatacaatggggcagtctggtgggggccatactctaggactagacttgttcaccagagtcaggcaagcattggaaggaaggactctttgcagagagtgggatgaggttccatccagcagccagaggcaatgcgtacaggaaatggttggttgtacaggaaggattgtggcagtagggaggggccttacctgaaagcagcatgttagaagatagccagagcacacacagagggaggcaattcccaaacaacatataggtaattcttttaacaaatagccagtaccaccaatcccacactagtgcaagggccaaactccattcatggcaagcctcctgtaagccaaagcttggttctagggagactcaagtaccaggcagataactaagccaggaactcagccataggtacaagtcagggtgtcaaccatgagctcaagattcattccacagcaagaatgacttgagtaggtaggggggtgttctccagcatgtcagggggcagctctgcaaagacccctttgtgaaatcagttactagttcctcagaccacagaatgactaaactggattaaaagccatttagaaacatcagccaaacaagaatatattaagtgtcatccctgccaggcattcttataggcactgaggataaagcagtgagtgaaatacatctcgtcttgttcactggaggtgccattttaaagaggatagaaaatcgtttacactggtgagtaactagtaaaagaaaattatgcaatatatctgctggtgctgtctgctagtttgaaatataaaaatgaaagggggcttgaaaatgccaggtgtttgttatttctgatagatttgtccaagcagacctctctgatagttgaccttagagaaagaaatgtcatcgccgttccatgatttggagttggagtttgtgggtaatgacatgaatgctatcaatgaaagaatctgcccctcggagttgtcctcctttctcttgtcttgacctaccaaagtgttctgagcaatgttgcttgctttattacagattttttttttttaagttttgtccacttaaatagtttacgcagcaactttaccctaatttgggtggcaactctctcgcaattagaggtcctttctgaatatcaatggatatttcatctgcatacccaggaacctctcctgagaatgcttcatttccacctttgaggtcttctgaaatggagcactgcaaacacacatattagcattcccaagggccatctggtacaaatccgagttaattatttttcttccagcttatctgtgggttttttcattaattgttatctctaagtattctggacacatccttttttctcaattagaactcaatagaaagtttttgagcaaacgtttaggtgtctgctctaatactgaaaggcctgaagatcgtaaacagcaagcagaaaatccatttggagctttaacccttgaccttctaggtttcacttgctcgttaatcccaagtagcacatttctctgagagggagacaaaagtgacttagaatcttccgtgtgtcattatgatccaagagtcttggcatttgggtagcaggtgtgagagaaaacaccaaaatcacctcatatttagatgatttctgatattttctgtgttttataacctgtgatcagtagttgcatttcatgagtggagccttcttctccattaagctgaacgaccaaatagttaatccaaatgctgacagtgctgaccaaattccaaagaatagatatttggtattcaaataagaagggtgaatgaagctaaagtaaaaaaatacaaaagtatagaaacatgaagagaacttatactgaaagaacaaattctttgattcagtttttctatacaggtacttccttaaaggcactgccaattgaaagttgcaccaatttatcctacagtgtgaaataccttaaataaggtataggacggaaagtgaagccccatcagcatactatatttctcttctagtggttacagcttggtatttctgcatccagcctgcaatcaacaattctttcttccttccctccctccctctcttccttccttccttccttccttccttcttattgagatagtctcactctgtcactcaggctggagtgcagtggcatgatcttggctcactgcaacctccacctcccaggttcgagggattctcctgcctcagccttctgagtagctgggactacaggagagtgccaccatgcccagctaatttttgtattttttagtagacacagggcttcgccttgttggccaggctggtctcaaactcctgacctcaggtggtccgcccgcctcggcctcacaaagtgctgggattacaggcgtgagccaccacgccctgccaacaattatttcttgagcacctactatgtgtcaagttaggagctaatcgagaaagtaggaaaccatccgatatttgatgctattggttccaatggggctttccttatcaatttttttctgattgtaataatctctttaaagcagagaaaggtaggtacctgaatgacagatgtagtcttttctgcagtctttttaaggctcaataaaaacccagtatagagcaatattatacttaaggtcacataccagtctctaggtttactgagatttgtctgtgaaggcttactaatcagaatgtcagccatggactgtcagtgttgacaacaatttttaagctgttagaaatgcacagtctgtgttttcatgggatctccaggtgattgctgtgcacgttagagtttgaaaagccctggtctaaagtagggacagacaaactacagtccatggccaagtcctggccaatgcctgtttttgtaaataaagttgtaccggaatacagctgtgctcattcactttcttaaggagttaagaagttgtgaccaagaagtcctggtccacgtggtctagagcagtaatgctcgaaagtgtgtggttggacccatgccagtttatgtaccagtgcctgtttgtgagctgttttaggtttgtgataagtacagatactgagaataagcatttagaaacttgtattgctaattacccttgccatgacatgcaagaggaatatcaattttttagtaatttgcattattacattttataataatacaagtcaatgagttagggaattatttttaaaaattcattcatcatcacagattatgtaagaagcagcactctatgagtgtagatgatatgtttgtaaaaaaaacagtgtcataagtgaatgtgattgtacatcttgatgccaaagtgaacttccttatgggctgcggtaatcacattgtcctattctttgctcaccctgcttttccatgaatcttcctcttgtctctttggggatacttccttgaccttggtgatgctgtaaaatgtgatgccttctttctctctgtatgtcttcacttggatcctgtcttccctagctactgctcacagagtaagctttcgcccaggccaggccaattgctttactgcatccctgccattgtaggttactttcagggatggtctctggccacaagtccctcaagctagttagaaccttccccaggggttttctgtggaagctcatgaaagaggccacctacctctgggatcatgaaagaaaataatgtggcccaggaggctacattccctagtagctggtgaaagcctgtgtaagctccaggagcaaagctcctgccatgctatgatggaggctcctgccatcatagggcttagttcctctagcctaggtttccatgactccatggttttcaaaagtgtggttggactagcagcatcagcatcatctggtaatctgtgagaaatgcagattcttgggctccaccccagaccttcagagtcagaaactctgggatgaggccccggaatctgagttttaacaagccttctagatgattctcgtgtttgcttgcatttgagaatgtctactacagctctatagctcctccttatttctgtgagttactttagcatccttcccaggtgtaagccaactggttccctttaaccccttaaattagagttgattttcggtcactgacaacacagaaagtcctgtttcacataccatgagtactattcttaaccaaaccgagaatatgcctcagcacactcttgcgtcctatggtggcccagagctcacctctgttaacacttatttttatttccttccccatacgctttataaccccttatatttgaagatttttattctcttctatttctgtttcaaaatctgtccctgaaatgcagaggactgtatccattctaaagtgactttgttacccagatgagaattaaggataatcttccagataataggtagagttcatcaatgtggtttgtaaatgcatttttctaaagatcaactccctcatggaggacttttattttccttctctccaaaagtagactacatcaagttgtgtaatttttaagtgactttctataaactttatgaaattacctcatcttgagctcagtcatcgaggtagatctaattcatttttgtccccgttaagttaccatcaactgcttcttttcacaagagatttctttcctattactgctcttcgtgcatttaatcastcttagcgctttctttccgcctcttgatttataagtgttttgctgtgattcagtctcctgtctattcttgctacagagtacaaccttcatttgttatctgtgttccttgtgctgtctggggaaaaggacagtggtcagatctttcagtatttgacaaacatcrtgataatagagtgtttcaagatggagatgttgaatcaactttgatgtttggtcaagaaaattgattcataatgatatgtgacataaggtctttgctgagtttttcctcggtatgtatgaggaatgaaaaaaccactgctttttttaaaaatagaatttaatgttttcttttgttgttttttttttttactttgatggctctttgtacaagctccttttacagattactctgtggtcagagaatcagcatgtgactttttctagatattggataaatagtctttatgtcaactaccatttgggaattgagatttgaatgcttttcttttatttcatacgttcactatcaagatgagacttcattgctgtttcttccacctctgaggttatatcatgttattggatgttcatgtctgtcttagagagtgggccagagaagacatgacttgagctacttttaattcccatttgtagatcctgggcatctctagctctgtgtagccactgcacagtggtgttacaccctatatgagggtgaaggtctaaagacagttcttaaggcacaacatatttactatcatcattaactttgaaaattctttaagtgacccatacattttagtgcctttaagcacaagagtcccagtagtatggtgagacgctgacccgatgaggktatgtagagctcattctcttccttctgtctcaggaactcgtgtactttgaatggaatagcwgttgcaacctcccactagattttattcgttaattttggttctttcccactcacttacttgttctgtctctgtgcctgaatagttggatttacataaattaaatgtgtatgtgatgcaactttgacgtatgatactacataacatgttaatgaaagtacggagagaacagtgaaaacaaccagggatcaaggaattgttgaagggtattcttgtcatgcatattagttttccatttttaggatttttcatttgtttgtttaatattcaattatccaaccgaaagggtcattatatatgttgattgagagcttgcacttcaatgacagacagaggtctgttcagttccttctcagccagtttctggctttttgaccttgggcaagttgatcagaatctcttcacctcgcttgtttggtctgtacgatgsagttaatccattattagaggaaataacacgtgaagtgctcagcagtgtctggtactttgttgtcattccataaaattgtggtcgtggtggccgtcttcagggctatgggtattgtggtcatttatatggaaggggcggttaagtggcctctcccaccggccaggcattgttgagctagctgataagagaagggattctagagccaggttgcctaagtttgaatcctggtggctctgccactaactgcttggccttgggcaacttaatctatgtgtgccttagtttcttcatctataaagtagacatgataatagtacctatcgtaggtttgttgtgattaatagatgtgttaatatttgtaaagctgttaaaacagtttctggcaaacagtgtctgtgtaagtgctagctgctgttatttttatttttattttttcactrtagatcagttaatttcttttattccacaaaataagtattcattctgtaccatatttctgctgctctttgaggaatggggatgtggtgaacaaaagagagataattcctaattgtatggagcatacagtgtcgtgggtcagacagacttagtaaaacctccactagttttctttcttttttgagacagagtcttgctctgtcacccaggctggagtgcagtggcttgatctcagatcactgcaacctctgcctctcgggttcaagtgattctcctgcctcagcctcccaagtagctgggattacaggcacctgccaccatggccagctaatttttgtatttttaatagagacggggttttgccatgttggccaccctggccttgaactcctgacctccagttatctgcctgcctcggcctcccaaagtgctgggattacaggcatgagcaaccacacccagcctctcaccagttttctaattacagactgattgtgagaagtactgtgaagaggacactgagaatcaggagatgactaagatctagagtttgcctttaggggaaaaaaaagtcagccaaatggtggagcttgtacacattagaagcatctgaggggagttttcagcactccacatacccagaccttactccagagcaattaaatcaacttcttgggatgggggaggtagtgaggcatcgggacttttgaagctgttcaggtgatgccacagtgcggccactttgagaaggagtgatacagagggtgataaccctgagcatatgggaggcaggtacagatagatacaagcagaatttacatatatttgtagattcaagaatcatgacagttgttcagggggtaatagataacggttattctggctccagagacctcctcaaggttatcacaagaaaattttcatggcgtctccacaagaccagaatcagagttggaatcagctatccctggttttgctaagtatggaatcatgtagacgccattgatttaaaatatccaccagtttccattttttcctgttatcttccactgctgcagtctctggaattattaactcatgccacctgaagtttttggaattaatgaattgcctagcctggtagctacattgttaggagaatattatgagacaaatccagttcttatcttacattattagttcccaaccattttggtaccagggactggtttcatggaagacagtttttctactgagtgagggtccaagggtgcagggttgcgggggaagaggtggtgatttggggatgattcaagtgcattacatttattgtgcactttgtttctgttattattaattgtaatatgtaatgaaataattatacagctcaccataatgtagaatcagtgggcactttgagcttgttttcctactagatcgtcccatctggtagtgatgggagagaatgacagatcatcaggcattagattctcataaggagcgcacaaccttgatccctcacatgcacagttcacaatagggatcatgctcatgggaatctaatcccgccactgatcggacaggaggcagaattcaggtggtaatgcgagccatggggagcagctgtacatacagatgaagcttcgtttgcttgcccactgctcacctcctgctgtgcggcccagttcctaacaggccatggaccagtactggtccatggcttggggattagggacagctgtataacatgaatgtgcacctgactcttggtttctcagaatcaacatataaaacattaaaggttaacattgtgtttataaattagttacacataaattgaatcccattgaaattttattaaattgataggcaaaattagcttgtgagagagagagagagagagagagagggagaaggaaagggaaggaatactcaaattctgtggttttaaattggcctttctatatcatacttcaatgatgttatccttccaggcagtatttcaggtttataactgtacacacttgcaaaagggaaacatttttgttgggcatggtggctgatgactgtaatcccagcactttgggaggccgaggtgggaggatcatttgagaccaggagtttgagacaagcctgggcagtgtagcaaaactccatctcgctctcaaaaaaaaaaaaggaggggaaggaaaatcaattatggggcagcggaagcgaggtgaacacataaaagaaaatgcctatgtaaagtcggtatgtcatagtgggtgatagcacctgaatgcttcatgctcagcaaatcatttgatttaaaggtttggaccacaagacatgtcttttgattgaaaacttataataggacatttcattgggctggcaagttacaggatctctttggaaatgtttaatttctgcatgtcccttagaggctgtccccttgagtgcctgcctctttggggatgtgctctcagaattgtgacagattcgcctttaatcagaacttccaaccagcacagcttttcttaggtggagtagaaactcaaagtttccttgccatttttgcaatgaagagaaatcactcagttttcttacaaatgaaaaacattttctttggtgagcccttaatgtcttgtttcagttaggtagggtttaatatcgttttcattctttctgttttgctaataggcagttgacttaactacattctcctacagtgtcaggagttgccaactcatgatttgggaactctgagttgtatgtagggtaatattttgttgatcacttatgccattcacttatgtgacactaatacaaaagatatgacattaagactacaatgcttgcatttttattcatttctgggaagcatgatttttcctctctttttttttttttagaccaggaaaggaaataagggttggagctggacactcacaccttgttggcatcatgagtgagcaattctgagggttgggaaagtagagcctacttatgttggtgttgtagggaccactatctccagagctagaaagagatgaaggcacaacccatacgcctgtggaaagctgggaatagggcttccctaagagaaatctctggagtttaaaagacttgtaagaattgtgaatgccctggacatgtgtatgggcattttttaaaactgcaaataaccaggacaaaattcagtaaagataaattaaaggaaggttgcattcagccagtaaagtgtgtgtttaaatttaaagtgaagcttcttaaaaaactattttaaaactttatatgtaacagtattttagaattacatgagcccttctaaatgtgaaagaaagcaatatcataatgcaagttaaatttgagcaaatataggaagacttggcatattcttctgaaagggggccaagtcatttatagtcaccaatcaaatcacgtcttgtctcatctctgtcagctacttggtatagccacagaaatctatagaatgagaccggcgaaaaagtagcaaataagcttcatttgggggcattattttgcggcattttatcacagtaatattcatctcttcaatatatagaaattaagctctagaaaatgttagtctgttagtgtattctttttctttctttctttcttttttttttgagatggagtctccctctgtcacccagtctggagtgcagtggcgcaatctcggctcactgcaagctccacctcccaggttcacgccattctcctgcctcagcctcctgagtatctgggactacaggcgcctgccaccatgcccggataattttgtttttgtatttttagtaaagacgggtttcaccgtgttagcaaggatggtcttgatctcctgacctcgtgatcatcctgccttggcctcccaaagtgctgggattacagtcgtgagccaccatgcctgacctgttagtgtattctttaaactcagtgaccacaagaagatgatgttgaccttgtacccgttttccatcactaaggataacagcagtagcctccttcagagaagagctgagctggcatgataagagaagttgggaggtgatgtgaatgataaactcttactccatttacttaaagcaagtggttttaattaaacacagtttatacctttatcgctgcacttggcaagttttgggaagttaaagactggtggtactgctactcggaagttatctgtagaaaacagccttaagtcttttccaaacaaaatatcattttaaaatgaagttgggtcaaaattcaaataaaactccctctaaaatgaagtgtgcaatatccactcttaatgtgtgttgtatcgtgtagtcaaaagactcttaatgattgcctgggaggttggtacagaagggatttttatttttaacagtctctaaaacacaccttttaatactcattctttttggaattctaagttaatttctattcttcatcactggtgcttttaaaaaaaaaatcacaaatttcagaattaagtgtctgagggatttatttcctaaataattgagctccataatgtaatcctttacaatagtcattacaaaggatttggaatacagaaaagtacacaaataaagtcatcaagctaggtgggagaaacaccttagtccgggaggtcaaggctgtagtgggctgagatcacaccagtgtactccagcctgggcaactggagtaagaccctgtctcaaaaaaaataaataaaaataaagtcatccataattccttagctcagaaataacaactattaaaatttgacttatctacttccagtattttcttttcatttctgtataaatgcatatttttaaaaattaaagtctagatcatactgttttttccacttaataacatactgaagtcattttatgacatcattaaatatttttctgaaacaagatttttagtggccattttattttccattatatgattacacccttatacttttagtcatttccccatgtttaagatacttagctgccttcctgtctttttgctgtcaccatcatcttagatacgtttagtagtatacatttataaatggaatttgaagtatatcattatccccactccagcccgccttggagacatgggactacattgaatgtttgtttttttaaccctacacctacaagttggaagaattttattttttgctatccttccctaaaatagtcctctggtgaccatttagttaattaagattgattggcttctgtcatctgctgaacaatgcattttgctaaatgatcccaaatattaaataaaaacctattaacaagtataatagatatttagacattaacagatggcttcagagggtctgcatataattaaagtaaataaatctaagtgtaatagtgacagttgggtaaaaataaattattttcatcaagaatatttcattataagataacccagaaaacagccattgtgataaaatgtaaaaattatagagtaaaatccagtatatcatgtaatatgtctatgattaccagattcctaatctagatctaacacatgacactttgtggttgctacagacttcattcacatccagcatgaaaggaaacatggtcttgttttttaaaaaaatattttttaatgtacaagtcagtagtaaaatatggacatgtgaattttttagacatcaccttttccatgtatagaataaatgaacatcactgtgttaacaatgcctcaaattagagtccaagaaagaagttgtttgcttgttcctattggactcattttatatgtcttcatggatggacaaagtaggaaatcaagatgaaactagatttgatttttttttcagtgattttatccatttataatgtaacatcaaattatttttagtaattttatgaaaataattgtcttaaaacaaggtcattaaggactctaaacataggaaggtgtatgcatatatctaatatgttttctttaatcacattgtggcctctggaggaaacagttctttgtgtctacttgttttctcacctctcacgaaactactacaaggatgaggagagttatggatgtggtttgctccatgaaagcatatttagttggccttggtgagtggagctgctgggtttggttaagagatccagagcccagccatgttgtccgttctctgctaccctcaggacctggctgaggggtaacacagaccaaggttctcccctaaaactggccaaattaatttgccgccttcttcttcttcatcatcatcatttctctcccacacctttttgtattctcccccagagaaggctaggtcagcctagaccagaccagttttagccgtttctggagagttctctgtctttctctctggctactttccctgtaactgtagaagaatgaagttttctggtttcaatagagtggtaagttaaggagcttgaatttagaggggctgcagttgggtcatggaagttgaaaaggcaagtgtgatgtcctaatgtcattaacttaactgggtaaagaagccctcaacccagttattctgtcttacaaagatttggatgctctcacctcagctgataatagaggtcatattgcctagcctcactttgcttgtacatttatttccctcatcacccttgtgtggcagcctcataatcacggctgaagccttcagacttcccagggttctctggccaaatgccatttgaataccatctcaattcaccagtaatgtgatttaaataatcatttctccaataactctttcttatctagaggatacacaaaaggaaacaaaattgaaatgaacaccactctgatcccaacagtgttagcaatattttctatcttctccaagtttttctctttgcagtgctcctgtgggttcttgctctagtgtccctttttgcgtaacccatcaccctcccagttaacaggcataacagaagaacggggtatttcaggtctgtaacagctgtgcttaaaaagcagcagctcccccatttcacctgtttggtttgtagggcaaggatagaaaggatggcagtgggtatctttctatctaagtggtggcaactgagaactctgaggcatttatcttaactcattttctgcggctataacaaaatagcacagactgtgtagtttataaagaaaagagacttatgtggcttacagttctagaggctgggaggtccaggagcatgatgctagcacctgctcaaccatctggttagggcctacttgttacattatcccatggcagaaagtgaaaaggcaagagagtgtatgagacagagagaaaatgggggctgaacttatctttttatcaggagcccactccagctaaccaacttttgcaataaagacattcatccatttgaggatggctatgccctcatgacctaatcactttttaaaggttctgcctcttaacactgttacaatggcaattaaatttaaacatgagtttgggaggagacattcaaaccattgcatcattgtagagaaaagcatgtaaataagaaaatgcagttacagactcagcagtctgaagtatacgagagaaataagcagaggaataaagcagaggctgaagtataagaagctcattatgtgcacatttttggctaacttgggcctgagaataccacatgaaatgtgaaaagttgatttaagtttctcatttgaactgtgtcattcttttttacattttttttagtttattaaagttagttacattctattccctgaattagatcagatttatgtatagaccatacaattaaactcattgtatgagatgtaaagtttgaattgagaaagttaattccttggacaacatttttttttttttttttttgatatggagtttcactcttgttgcccatgctggagtgcaatggcgtgatcttggcactttgcaacctccacctcctgggttcaagtgattcccctgcctcagcctcctgagtagctgggattacaggcatgcaccaccacacccagctaattatgtatctttagtagagatggggtttcaccatgttggtcaggctggtctcgaactcctgacctcaggtgatagggctgcctcagcctcccaaagtgctgggattataggcgtgagccaccgtgcccgggccataatcttttttaaaaaattattattattagtttgagacggagtctcattctgtcacccaggctggagkgcagtggtacagtctcgtctcactgcaacctccgcctcctgggttcaagtgattttcccacctcagcctcccgagtacctgggactacaggcacatgccaccacacccagctaatttttgtattttttagtagagacggggtttcaccatgttggccaggctggtctcgaactcctgacctcgtgatccacctgcctcagcctcccaaagtgctataattacaggcgtgagccaccgcacccagccaaaaaaaattattttaaaataaagtatagctaagaacttcctagtcatgtgaggcctagggtaaaggttgagtttcccttcagggtatcctctccttgatctttaagaacttatgtccagttaggttccccactgatttctcctgaatctctcatgacagtcacagtggccacaaatctttcttccatccctttgtttagctcccgctgcttttgggatacagctcaaaatgcttaccacagcttataactctgtatgagctagcccatgcccaactcgccagcctacctcatgcccattttatacatctgctttaatttggttactaatcttttctcccttcctagaatgtatgagggcatctccatcttcaagacttcgactgagctgttctttctgctccagactttcccttctcatgtttttctttcttcagcttactcttcaggtcttagctgaatgtaattatgcagagagccttgtacgcactccttacacctgattgaaggcaggggcatgttcctcgttaggatttctcaaattatactctttcttgtttgattatgtagtcatacaggtaattttgtattcagctctgtttccgttatccattgcttccttaataaaccaccccgaagcttagtggcttaaaaacagcagtttatcactacctctcatgcttcagtgggttcacatgactaatctgagtggcccctgcttggagtctgctatgcagctgcagtcattggtggatggagcccgagccgtgtgatgactcaattgggctggacacacaagatggcttcctcatatgcctggcatctcattgctccttggcccatctctttttctttctcttcacattccatctgatctctctgtgtagtttggccttttcatagcatggtggtctcagagtgatcatatatagtgaatggctcccaagaggcaggaaatggaaacttccaggccaggactgacagtgtgccayttctgccatcttctgttagagcagttacaggtcctgcccaggttcaaggagctggatggattagagaaacagaccccatctcttaatgtgagaatggcaaagttgcactgcagaagagtgtgaagcagaaaatattacaggaccatctttgaaagctgccctactttttctgctagactgtgcccttcatgaagacagggtccatgtctatactatattggcacctaataggtgctgataattttttggcaaattcctaactccagggaaaagtcttagacaaattgaagattcgctcagaaaacaagtttgagtgagttcgatttttttgcctcctcagaggccagactccctgctctacctcctcaacccacacatcatacagaatttgacaccacccggcctgcttttatttcacacttttgcccctcttgtagcactcatttgggcatctgtattatggctcttttctctcctattcattttcacaatagcatttctcgacagcatgcattatattattcagggtgcttagtttggtgttagaccatgtagttaaaaacatgagtaagccttgattggaattcccgctctgtttcctcttacatctgtgactttcccaagtgagttaactcctctaagtctcattttttttttcctgcctgtgaaatgggtatattaatagaaacaactcagcagggttgctatgagtattaaatgacaggataaaacatatacgtctcctaccatattacatatttaattattattcatttccattaactcttggttatggtgttatactgatctggtagtcatttattagatatttgttgaatgaataaatattttatagttttcaaataatctctttaaaggatatcctatcctatacttgttcaaggtaaaattgcagtttaagtttccaaagacatcattcttttactaaaaccctatttgaaaagtctgtcattgcaggcctttacatttcatcttttttccacgtgaaggcagtggagcagcttttttctcgcttcacctgtcaaagttgttctctctagagattaagcaggtatgacgtgtgctttgaccaaaccctttgagcttaagaaaattgtgagaaactgaataacttcctattcctcaatatttcaggtgagaaaaatatactagagctgctgttttgatgtatgagagattgtagctagtatagtaaaagatttcggaggatagttattgtgtatctaggtgtgtttatattatcaatctcaagaggtaagagaaaacacaaagttgtagagaacatttagaaattctcctgaagactttataggccagaggtcattaattagtaaggaaggtcttggtttctgtattcatatcatagtggaagttccgattctcaattcttaattcaaaacaaattaaatattcctacttgtcagaatcctgacttgtatctaaatgttctattggactagatgtaatatacttttyccctccagggaaagatagtcaaggatttatgtgagaaagcaaacttcctaatggctgcctccctttgtaagcagtaaagcatgttatatctttgtatcttggwtgttcagctggtaatatttcataccttactgtccatacgtttcctgatagtaatcaatccattttgtcgttatcacacttgcttgcactgtggctgggcagccactgtctaccaaaacagtagcatttcctcctggagatgagagtacttgatcgaaagggagaaaagggagaacaagacccaggttttgccatataaaaatcgatagcgacaaacttcagtgtcatctcatcttgccggatgccatcttgatagcatgactgcttttccatgttagtaatagcacaacatcagattaagcttccctcacaagacaggggatacactaagtttatttttactgcctaaaaagctacaaagccagttagatagatggaggcagtcagccttgatcaaaccagtgttctacaaattccttcagtttacctagtatgttaatgcccattttattaaatccatctttttaaatggatgtaaaaatatgaccagcataaattcttttttttgagacaaagtctcactctcacctaggctggagtgcaatggcactatctcagctcactgcaacctctacctcccaggttcaagcaattatcttgcctcagcctcctgagtagcagggattacaggcatatgccaccatgcctggctaacttttgtattttcgatagagacggagtttcaccatgttggccaggctggtctcgaactcctgacctcaggtgatccacctgcctcagcctcccaaagtgctgagattacaggagtgagccaccatgcctggccaattttttaaagcagggtatttaagcagatacaacgtaagggctgtgtgtgtcattaaaagagtactgcttggtgagaaatgaatgggaattcttacagctgggtcctgattcttgctctgactataattaaccatataataataggtcattgtttctcaaacttgagcatgtcccagaactgcctgaagggcatggaaaatgctgattgctgggtgccacactagataattttctgtggtactaagaagatagtaaaacaggatgataataaatatgctagggtcccagatgccatcaagacaagattaaatgtgcaaggattttatcagcagaaatccctttgaaagaaaatgagaaagcagccaggagaggctggcctggccatcagactatgatgcaggtctgactctgagtgaaggagagagggaaggaagattggatgcccctactcggctgggagcagcccaggggaagcatagccttgcccccagtgcagccagtcatgctgcctgcagttcagagtgtgaggtgcattctcaggaccttagcagtgagacagcaattgctgtagatggggtggccagagagggattctctgaggaggtgacatttgagtggagacccgaatgatgtaaatgagtgaaccttgttgatttggggcaaagtgaaaagagcagcggaaaagcaaaggcaggagagagctctgagtgtttcagagcagagtgagcgagaaggactgaggaggcgctgagagtgaagctgggcccagctctgaaaggacttgcaggccaaatcaggaagtttgaattcattctggataaaattgtaagcctctgaaaggctttaagcaccagaacaatgaaatcttagacaaagataggagtacgcattgtggaaaaggaagagaaaacagagactagttggagactaatggtattagtctaggtgtctccaaattgcctccatttgaattacctactttttctccatgcctctgggatcttgaagatacagtggctatcttcttatatcagggacataaccacaggtgccctgctttcttttgccctgtaatgtatttcaggcaatcgattgtcaagcccctcttccgattcgtcctggcagctctcactcatcatataacccatgtcactatgccatgccctctttgagttttagcaccatgctggcagctttcatagacttttaccatcaccttcaaaccagttgaagactgatccaccaatctcatttctacttctatatattgtctcagagattacaagcaactgatttctaaaagacaaagtaaagtagggcatctgttaatatatggaggtcacttttagagaaaaacaaataaatggaatttgcctaaatgtgattaataagaatattttctcgttgtgacagttcctatgcttccttttgcccacatttttctctcagaagagtagcatgtaagaaagtggaattataagttttgacttggagttgaaggagtgtagacatctgcttcttttctgaccactctggtctgccttgattgagggagatctttgagactggctttttgctgtgcattttgattgagttttcagcagcacagtgagtatgtaaaatcatagccatgatggttgaaatttggaattggggatgtcccatttgaaagaaatgccagatcaaaaagcgctattcccaggaaggatgcatacacacgcttgtaaaattgcacacccatgagggcttcttactttcttagagctgtgaatttttctgtttttgggcatgtgaggtgctcttgctgtccagaagaggttggtgcttatactttaagtaaagtgctgattgccctgtcagtcagagcatggaggaactgggaacttctgagattgatgcttgacagaataattagaaaaccgtcactttcagtaaccatttgaggactcctaaaaggaatgggcttgggccaggtctctgctgtccaaatccagaggttaaatgttcgggaacacaaaacatagtatgtcacaagagaaaattgcttcaaatgcacagaaagagatggccctccaactcctaaacaatgatgctcaattatctgggcattcacagatgtgtttccctagccctgctgctgttttcatacctccttgagattatttctccctctgtcagttggttgccttgaagtgaggtttgcaaacagctgttgagatggcttcctccttgaccttttcacaggatgacactttctttctctttatttcaagacggcccccggccctggcataatctctggttaccaaagccagggccttttccatacaaccccagtcaactggattagggcaatattttccaggctaacagtatctaaattaaatataagtggggtaccaacaggaactcttgagagagaacaggaaaagcatggccccataaacaaattaattcaagaaaacattttatttagatactcttctccttatttattaagaaagtataaattaggtaagcatttataacaaaatatataaagataaatgtttctgttattctacatcctttgtcatagtttcctttttaaaagataaatttctgaaagaaaatgattctctgtgtctgcacatctgtatgtatgtacagatattattaacacttccaaggcaccagggttccttgggccatactgagaaatgctgacatcagccatcagtgccccaccctgctttaagacagccagcaacaagaatggtaataataaggaattaacattggtgagggtactctgtgtgtcaggcaatgtgcagaatattttctctgtgtcagtgtatttctgttttaaaatccagaaaattttcaatgacattcagccaccttgttaagaagacagtctcagagagggcctgtaattacttcatcccctatttttctttaattaaagcaatcaaatggcagcagcacacggtcacactcaactcataggacttgctttttgtgcattttactgcagtttctgcccacaaacttgatccctgaatggaagaacacaaactgtattttctctattttcacaccacaatagtcaacacagaagacttctgtgatcaaatgtgtggggggttttccccaccagtaagcaagcaatcaattctgcagcagacactagctgggcatcctctawytaaattcagttctgacactccacctggagataatctcagatcccacaggttgagggctcagtcccacaaaaccacgcctcacttccgatgctgattgcaagctccaggttgttttacctgtgtttctcaccaaccggctataaattgggtttcccatgacctcttccttgggttcaattcatttgctggggtggcacacaaaamtcaggtaaatactaacttatgcttactggtttattataaaggatgttacagaagatacagataaagaaatgaatagggtgtggtatgggaaggggctcagagcctctagcccgttcctgggcatgccgccctacagaaacctccatgcattcagccgtccagaagctcctgaacgccatcctcttggaccttttatggagagtccattggatgggcatgattgacagccattttgaaatgtgactagacaaaaagggtatgatctaatgctagtagactgagtgggaacacccagaaaggcctgtctatacagatgcttcttggcctctctgtgcagcattccttcttctgaggtatgacacaggaccccttcggaaatgagggtctaatgacccataatcagaaaagtggggggagattagagtatatttttagtttctaaagcctgctgtgggaagaaaaaggagcaggtgaaaggaaggcaggagaatttcagagagagagagagagagattgttttttgaggtttgcttctgagacctaaagtgccccaacattataacaaaaggctgtaacaggagctgtgggagttatgagctaggaactgtggacaaaaacatacatatatatatgtaaaataataccacaatccccatttcctgcaaactaaattctgaatttctgagtcagagattcagaagcttgtatcatccggccccgcatgaccttacctccccttgctggcatgatctctaccatctgttccagagacccttctcccagaatgttcttcctctccctcctcactttgcctgcctgttatccctttctccttggaaatcttcccaggttctgtgaactggggcgggatggaccagatcagctgttctcagctgggggccatgctacctcccaggggacatttggcaatgtctagagacatttattattgtcattttggagtgggtatgctactagcatctggcrggaagaggtcagggatgctgttcaacagcacacaaacagctcaccataacaaggcattttccagcctaaaatgacactagtttccaggttggggacccctagatactagatgaaaattctagtactagtactagtactagatggaaggtcctccttttctgaytgatctctgttttcccagtacctgatacataatatatgattccgaaaatattaaatgcacaaaccccttccccctcagaatgccatctttgtgcttcttccaataccgttatatggaattcgaattacattttatgtttttacttgccagaatacaagaatcacttaaatatataatctatactttcaagacttcaagcagatttatggagttggcaacagaaaatgagaaatgagttggcttcaatgcactgttaatgttgagaaccctgagtatcgtttggagcgttaaactcatgcatgctgtgggtaaattgttaatggtcgtatttcagttttctttatctcagagcttggaagagaaattttaaaaggcattttcttaaaaactcataaaaagaaagagcagtcccttgtcatagagttttaaatcctgcatgtaattggaatgtctttcagcaggaaaggtacgactcatgaatgtcttgggtcagagagtacactgggcacttgggcagtgaacctgagtgctggctctgtagtgcagagacgttagacaaattatggaacctctgtctctccacttcccctccccttctttatatcttatcagataaaccccagagaatgctcactagaatgtttgcattgcctatattttctccaactggtagtgttgggaatgattttttactctcttctttactgtatagttttaatttttccttcccagtgggcctgtattgtttttactatcagatcaaaatcagtattaaagtatagagcgaggatgaraagctagatttcctaagtccttttctggccctgttaggatttttataataaaartcctaccattgattcaatattacagtgaattaaagcactccgataatttggacctcagtttcctcagctgtaaaatgtgatattaatgacctcatcaggggaatgattaacaccagtgtgatcaagagggctttgatggaattgcagttctgtttccctcctgaagtgtatgaccttagaaaagtcacttcccatctctgaagtccatgtcttcataaaatggagttaatgaaaacctcacaaagttgatgtgaagattgatgagaataaggtattatagcactcagcacagaatttggtgtttaataaatgacagatactgctgttaatttctgctatcattattattgtcacttttattgtactatcatgtgattattgtgtgaaccagattgtaacttttacatagaagtttttcagatttaaggtgttattaccactgttattattcttagctacacttctactaytggaaataataagacttcaatcagtagygatttactaccaagaaattaattggtrtaaggcagggcctactgagatatccaatatcaatttttttttcttccttaatagtagaatctcaacaaaatgtcaattctatgatattgttccacctccctttcagctgggtggaatcacgtcactgctttctggccagtgatatgtaaacaaaagtgtaatgtgggacctctggcaaggctgtgtttaagaagctgaagcagctgggaagggagcccttttccctgctcctcactgttgcttggaatgactttacaatggcaggggctccagcagccctcttagactgagaaataaccttagaacggtaccattgcatggtagaggagacaaaccaaaggcatctgagttcctgatggactcctggtagcatcctaccatcccaggcctatctaccaccagtgttcctttatgtaagagaataaatccttgtatgtttaagtccttatatttatttctttgttcctagcatccaaatacaattctcaactaatttatttagtcttggtgcgaagagctttggcatactttctctcatttaccatggagtacttccaatagttctgttcttccctggtaaatttctttttcattatatcacaaataaacaaactgacccaaatttaaacttgacccttgagcaaatcaccaagcaaaagccttcataaaaagagtaaagaaagacacatggatgtttttcttgacatgcattttaggcttgttttgaagatggaatagttttagggaatggggtaattggcctgggaagtagatttgctgcctgcctggtgttttccttccaacagttggtgatagcatgaatcttgtgggttttctgtgtacattgactccagaaaggtcatagagaatgttgttatttcagaatacaaagagaactaagtgtgtttccctctacttaaatgtgcttcgtcaagcaggccacgttagcttaaatagttgagaatgaggaaaacgtaaaactgtgataacgaattcatattaaaacacacacacacaaaacagctgccctttgaatggttcactggtcaccaagatcagaggcaggttgaattaagagcatttggataattgaccttccatgtgaatgaattagaatagattagatttgattgaccacataacaatttaaatcataaaaaagccccttttctctttccaggctactttgttatattgggtctcaaaggtgattaaccatgtgtttttcttgttggaagactttcctgaacacaaattagcagactgaaaaagagatggtaatatttacatttgccatttcttttttaattgaaaaactcaaaggaccatatgacagactgagttgtttaacgatattccagaagggcagcatacttggagtgttttaatatgcattcagccgtctcttcctgactggtggggtggttcctgttactcagatggcctgggcagttgggatgggatgttctcaaggtgcttttttcccctccgacctttgctagtgtgtgtgatgtgatgtgttgaaaaccactgtataaacrataagcaccggctactcatttagagtcatggaatttcagagctgaaaagaatcttagacgttcagtgagttattgactctctttactttagagatgatgagacacagtcagtaataggaaatgccccaccctcagatgagaaatggaactgctgtgtgtttgataatatacagaattgttctyatgcagtaaagccctaccccctcgacttattataggaggcgttattcaaattggataaatgcttctgtagaaggatgatattattagtgcctatttcttagggttgttgtgagattaaaatgagtcaaatgtctataaagcactgttttggttattatttctgcatagcaaaccaccccaaaacttgatagaaccattttcttatgatttagcaatctggcctggggttaggtaggccattcttccactgttcttgtcagtgttcattcgtgtgactgcattcagctggcaggttctgggaaggcgggcctcttccctcatccccagttgttgaaggcccctctgtctccatgtgatatctccaaagggccccttcagcaaagtaaccagcctccctatgtggcccttaagcatctgagagggcaaaggcagagactcccaagccttctcaaggcattggcctgaaactggttcagcatctctgctgccacattttcaggactaaagcaagtcacagactcagccaggatccaaagggaagggactatgcaagggcatttataaacgttgacaaggttcattatagaacaccattgtaatggactatcccaagcatgtaccactgtgtctcatgcatggtaaaggtcccataaatgttattgctctcttgcagtatagtagtaatagtagtggtagctgttttaggagtaaaaacagctaaaaaaaaaaaaaaaaaaaaaaaaagctgcttttgttcttttgttgttataagtagatatagatggaaaacaatttatatagttttaaaaaatgaaataattttatttctgtatctcttagtttaaataacaccactatccacagttttcctcgggcatcttctgtaagtaggagggtagaataaattcctttaatcagtaattccccaataagttccccaattccccaattcaagcaggtctgagttagggacagagattctgtacttctaataattgtaacattgagaatcataaaattgatattattcaagttataaagttaatttctgcacatgtttcccaccaaaattgttttacatttccatgtatcactttagagcatgacatttttaggagaaggaaattgaaaatctgttcttttcttttgaactgattscttacctgtttccggatacatttaatgctgaagatctggagaaccatactagagtctacaaactcagaggcacaggtcttaaccattagcagcacccaaaaatggagattggagagaggaaggaccattctttcattaagagcaagtcattagattgtcttatggaggatatttggggtttgcttgtgatgagccttccatgtctaatgttcatacaatgttattatatgatgacttgaatgtttttctttttgctaaagctctttatctgtctaattacaaaaattatgcattcataatttaaaattttcaaaaactacataaaggtataaagaagaaaaggaaaataacctggagttgtttatgtccacattcatattttggtgtgtatcatcccagacttcattttaatattttccccctaaacatgtttttctctctggcaaatatgtgcatttgcttttaaatattcagagctgaatatcctcaagaaagtttcaagtttagctgttttgcttgagagagataccgtgatgtatttttgctaatatgttttaaaccttgcattatttatagtttctccttagaagcttgaaattaaaatttcttttctaactgwttttgattctttcctgtctggcttacaattgatttcacctcgctgtgtttctaatgaagcctgaaattaccatacccttgtttgagttgaatgtgtttttccctatgccctcacataccatggatcacagggcaactctgttcctattatcagctacatcttcctttactatctatattcaattcagtgtgttccagtaaatcttccaatgagggcttataccgggattgaatagacaaacatgtttttcagttacatttgaggagcattgattttctccatagagggacctattttttcctttcgctttgctgatattccctaagacctgcctatgttatagcccttgcatataatgggccatatatttttgacccaattaattttttatttgattggtaataaaggaagagagtcctatgcagtataatttaagatattcatgtatcaagggaggaggaaggccaggctgaatcccggaagtcccacctcactacccagacagcaatcacatgattccaggttgaaagggatgctgaaaaatattataaaattgacattctgttgagatactgccactaatgaaagaagaattaacacttggtatcccaatagtctctgccttatactgatcaatatcatgggagtgaatcacccctgattgaggtcttactacttccagtggtagaattaaatataataacagtggtaataatacgttaaatttgaagagccttgggcacaacagtgccccttaccccacatatccttagggcagggtgatggaggtaaagacctggaatattgtggtgttcttgccgggattgaaacactgggtagtagaacaaaatggaaaggcctaccctttcagatacccatatttgaaaatctttattcctcatgctttttcactttctctgccatattccctaagaagatctttgtcccatcagtgttttttttttcctccacccagtacctagagcacagtacagtgaattttgattatagtgtttgtgctaacattgagaattacaaaattgaaattgtttaagttagaaagttaatttctgcattctctccccatcaaaactattttacattgccagtatatatcactttcaagcattccatttttaggagcaggaagaaatttaaaatctcctcttttcctccagtctgattctggaaagtaggctccctttttagtcatgggatttaaactgagttggttaggcaaacatgaaagatgcttatggtgatttatgccccacatcacaagtgtatgtcaagagtgaaataacgcctgatgtgcaggaggatggaccagaagaccctcacttactcaaagtgtgaggaggatgggccagaggcatctacaatgtcctttttgccttaatccacaaagctcagtttcaagttatggatttgaaaatacttgctacaattcagggacaaatggactaaaatatatatagaaatagaaaacttgaaataagtaaatctaaaacactgaatatgtgaaatagaccctaagaactacatgcaatgtgtgaactttgaatggatactgctttgggtatgtgtgtctataaaacattcttgggataactgggaatatttcactgcaggctgcatattagatgacaataggggaattgttcattttcttttttttttttttttttttgagacggagtctcactctgtcgcccaggctggagtgcagtggcgccatctctgctcactacaagctccacctcccaggttcacgccattctcctgcctcagtctctcaagtagctgcgactataggtgcccactaccatgcccggctaattttttgtatttttagtagagatggggtttcactttgttagccaggatggtctcgatctcctgaccttgtgatccacccgccttggcctcccaaagtgttgggattacaggcatgagccaccacgcccggcccattttcttacatgttgtagtgtgattaggacaatgttcctatttttaggagatgcatttgggagtgaagtgtcatgatgtaggccactcagtatgaaatgcttcaacaactatccatctatctatatatgtatagctacatatatctctatagagatagatatagagaggaagagagggagaaagcaaatatggcaaatcgttaaatactactaaaggtaggtagaggatacatgggtaggctgtataattatttcaccttctctctattttttttttatatatttgatgtttttcttagtttgaaaggtaaaaaagtattgccttgtaaccaccagtgcgaccacaaccctatcctttactctgttcctggatctcaaaccaatttttcatattatttattcaacaattactctatataccagctactgttccaaatcctggagatatataaatgggtaagatgtcgtccctcgtccctgtacttaaagagctcatgatttagaatgtttcttttgcaatttttgtgcagctctgtcaacttcttatccaacattgggaatgaacataaaaatttacatccacttaggcctaagaatattttaagcaatttatattgatataaggctgtcatcagtcagcctattaacttctaattttcttgaaaagttttatgtaagaacaataggcagtaatggaatatttaagccatttgcacacacatacacacacacaaaatgcacgacaacgacaaccttgggggtttgcccaagtacatcgtggcattctggttatatctagatatatttctggcatacacagctagaattatgtttcaactggatggtcacatttgtaactgatacacatgtgaccagtgaacacagtagttttcaagaggcattgccttcttgggagccaaaggcttgatgtggcccctctattaaggaatatcaagagtttcccactacttgaaaataactgcattggaagattgttttcttacttcctgatttgtagcctggtaaccagtaaggcaatacatatatatattcatgctaaataattttgttgtgttctgaatgtttgtgcccctctccccaccattcgtaagttgaaatcctaaccctcaaggtgatgatattaggaagtggggcctttagcagttgattagctcatgagggtgggctctcatgaatgtgattagtgtccttatgaaataggcccaagggagctccttcattccttctgccatgtgaggacacagcaagaaggtggcaccacctgtaatccaggaaacaggccctcaccagacatcaaatctgttggtgcctggaytgtgatctttcagactccagaactgtgagaaataaatttctgttgtttataaactatccagttaatggtgttttgttttagactatcaataagaattaaaagaaaatactcataaaaaaaaaagaagtctgaatgtactgaggtaattttcttcatattattcctgtgaaaaggaaaatgctcatataactcaaaaatcataatatttgatattcagtgttgtagtccttgctaatcagctgcagggtaaagaagagaaatatgctgaagatgttgggcacgcaaaagagatgcatttcagggttataattaaagaacttaaaggagttcagaaagagaatgggaaggtctactttagaccttcatctatgattacattgaaaagaaaataataccagaggctcctttaaaacgtgcgagattatgcagtttcaaaakgcagtgcaatggctagaagattcttatatgtgttaccaagatctgcaaaattaaaatggtattcatgacttgtaaacaaagctactaattgaactataatttagaaatgcggtcctgaatacaatttcagtcacagaatgacaattagaggaatttattagatgttatctctgatgcaggggagtgtcttgggttggatttagtaatctacttgctagatgctcaataaatatttgagagggaagggcggaaaggaggaagagtgggaagggaggaagagctaaaytggatgtggattgtttagtaaatttgacaaggaatttgtggtaacttgagctactaactgaaacttacctgttttctacatattagaaagggtttaataaagaaactaatagaagtaaaagtattcttagtctgttaaaagtattaatcattactggctcattaagcacctcaaaagcactcattcacataaaatcaatgcactaattacaaaccagtctcgtctttgtaaaagcaggcccaaatttttagaaaatatttcaataggcataattcatggccacacatggaaaatacttgaaacttacaacctttaaaaatattatgataacttatgctttttattaatgtatgttttattcattccccaagttaatataaagggatgagattttcttactaggcaacataaaattggggaaaagaattatgggagttctggaacttagatattttagaagcacatagagagtttttgttttttatttgtatttgtatttctggagaggagttaatcaccagaagttatttttttattactctggtgtgaggcttggcaaagtatctttccacaattcctagatgattctagggagttgacaatgaatagattacatggagtcagttaacctggcttctaatgcagatgctcacacatttttctgttaccttcaacaactctttcagttatcctggtcctcagaatactcatgctttcattgacggggttgggctatggaaattggcaaacactacacatcaggttcttccccagcccccctcttcccttgtaccactacatcatagattatattatctttaaagtccattcaaactttaaggctgtataaatcagtgatcccttatttcaaaagtaattatattacagacattctgagatatttaccatcttttaaaattaactccaactataattgccgccccacccccaccagaagtaaaaagtataagaaaggggatgaaaatttgtatctatgaaaatagtcattgtggtagaatatccttccattgatgattgagctgaagaactcaagacaccagaaaagagataactgctaggacaacaaaatgtgaatttgcctrtacctagcctaaacatggtggtgtacctcccttgaggattatttaacatctggttgatttttgttttgtcactcttttctgacaactgtacgtgagaaatagtctcattttggttgtcttaagacttacttacgaaaacgaagacctaatatttcagttagtttatcaaatgtacattttgaccttgcaaatatcgattcatttatttaattcttaaaatacttgagcatgtctcatggaggaggtggcatttgagttaggtctaaacagatgagtaaagtttggatgaaggaagtgtaggaaatgtattcaagcagccaaaactacagatttagaattgtgaaaggtgttagaagaaatgtacatgggctgagtggaggccactgcaaaaattggacagtgtgttgagttgttcagttataagacactgctatcacttggtcacctataaattgggaataataggaaggaagaccttcctcatagaactgttttaagggttttatgagawaagcaagtgaaattcctaggacaaggcctagcacagagtaagcsctcaataaacgctacctgatggacataccatgaggccaaagaagtgaattagggccaggttgtgaatggcattttatggcaagcagagttagtttagttttgcacttatgtgttagggactagagataaggaagaaagatagccatgggccagatacagtagcaagccttctgggatgggccaaggcctgggaaatgatgttgttatcttttacaatagtctttccaaaattgtggattgggacctggtgattcttgagagaactccctctagrtagttaaataacaatattaaattaaatagccttgatttctccatagaggaatggatagaaagatgatgtctgaaaaaggaaatacagcaaatgccagatgatagtatctagatgatgggcatataggtgttcactgttcaatttttttcaacttctctgtatacttgaaaattttcacaatacagtattggggaaaattgagaaagtgtattccctctttagttctttttcaattccagaaaatctcaagaaagtctcttggtgccaatatggcttaaacactttgctttggctcagagccactggcagcctgtatctagttacaatttaataaaactattgtacattttcccaggtttggtagcttgagcctgtaatttcagccactcaggaggctgaggtgacaggatcgcttcagcccaggtgttcgagatcagcctgggaatcatagcaaaacctcatnnnnnnnnnnnnnnnnnnnnnnnnnnnnnnnnnnnnnnnnnnnnnnnnnnnnnnnnnnnnnnnnnnnnnnnnnnnnnnnnnnnnnnnnnnnnnnnnnnnnnnnnnnnnnnnnnnnnnnnnnnnnnnnnnnnnnnnnnnnnnnnnnnnnnnnnnnnnnnnnnnnnnnnnnnnnnnnnnnnnnnnnnnnnnnnnnnnntttataggaattaatatgttatttttcgtattgatagtgatactgttctcttttcaaataatgtatttaagctttaaaatattcagcatggccgagtgcagtgtctcatgcctgtaatcccatcacttttggaggccatgcaggtggrtcacttgaggccaggagttcaagatcagcctggccaacatggcaaaaccacatctctactaaaaatacacaaattagctgggcatggtggcacacacctgtagtcccagctactcagggggctgagcgtgaggattgcttgaacctgggaggtagaagctccagtgagcgaggtcacgccactgcaccccagcctgggcaacagagtgagactatgactcaaaawtaaaataaaataaaaataaaatattcagcaaatagcaaacagatagtgtgcactgttgtggtaaaaaaaaaaaaaaggcagaggtattatgtacatgtctgatgactgctataggaaaaggaggattattgaagaatttgaagtaaaggactggactaattgttttggaagttaaattattcaccctctgctctttgtatgactgcagaatgaatatagagttttgggcttttatagttcctctagtcactgttaaacttcaatatgtgacagtgactgcctgtctgcatgttcagattttcttcacaagcctatgaaagcaaagatcccagataaagctcataggctttctagtgcttaagatgtggcactctttacttgcttttggaaaacattcacatatttcctaaaggggcaagagatatatattcttgaaataaaatagagccacttaatcagagtggtttgccaaaggggactgcctgtggattggattttaatctgtctgtcacagtcaccttttctttttagaatgttcttaatagaatttagaaaacaccataaaatacctcacttatataaagtaaatgtaaaataatgtgtttctgtgaaagcaaaaaagcaagaaatattcaaattcaacagtgtttttatattacttccatctgtctattgttacaattctgtgttcattactatctcaatggaattcaaaagttttttttcactaccagaatcaacagtaataatgataagcagtcagaataactagactttacccactaaaagaaaagaaaaaaaaaccttttttacacttgattcagaaatagtgttttttcatgcagtttaaacattgtaaaagtgtattgyttcctagtaccagctatatgtccttatgaactttcatatttctgataaattgttagaagtaaaactgctaaagcaacatattaatattttaattgttatctactttttgaaacaaaaagtagctggtatctcaggtactcctgaggtcgggaatttgagaccagcctggccaacatggcaaaaccctgtctctactaaaaatacaaaaattagctgggtatggtggcacatgtctgtaatcccagctactcaggaggctgaggcatgagaatcacttgaacccgggagcagaggttgcagtgagctgagattgcaccattgcactccagcctgggctacagagtcagaatttaagtgtgactcttctctgttccccttctgatatgtttacatgtctcctaatttgttctttaaataaatggacccatcatatatgtattctgtgacttacatttttacctaataggtcttagatttttatgttaatacaaatgaaactatttcattcatttttatgattgcattccataaaatgaatgataatgtattaccaagtcccatcttgatggctattaagttattcatagttttttggggatttttttcatccagtgaatatcatctatatatccttatgaacttttgtatttctgataaattgttagaagtaaaacggctaaagcaacatattaatattttaattgttatctactttttgaaacagattttctcagccgggtgcggtgggtcatgcttgtaatcccagcactttgggaggcctaggcaggcggatcacctgaggtcaggagtttgagaccagcctggccaacatggcaaaaccctgtctctactaaaaatacaaaaattagccggccatggtggcacatgtctataatcccagctactcaggaggctgagacatgagaatcacttgaacccgggagcagaggttgcagtgagctgagattgcaccactgcactccatcctgggctacagagcaagactccgtctcaataaataaatgcattaataattgtctcaataaataaataaaatgggacaaattttttcaagtttttatgaactttcttttccattggcaaatatgttgatttggaatatagttcattaattacccaatacttctgttgtgggagtcaaagcttcctcctgaagtatcttgttcctgttttctgtatccattcagtgtattgtattctgcatttctcctgccctccatgacacacatttttccatttctgtacccccagattgtgggcataatcaaatcagagttgtactgatttttgtagctacctgcatctatcccaatgcctgccatgtaataactgctcaatgaatattgaaaagatggtaggaaaaaaactcattcctacacttataaaatcatattttctatatttaaacagtcactttttggtaatgacttgataagacattccctctcattgttggggttcaactttatagtcaattttgtatttaattatagtattttatggtacttctagtatkattacagttgagaaatgaggtagaaatcctagatgttagtaggtaaaatgattttttaraattaactcagttttattgaccttgaattttagcatgtttttcagtaggtgattcctgttaacatctgcattttgacaacacacttaaataaaactagtgaaccagagaacaatgaattttcatcagctaattactagtgatgattttaacctgtttcaaaaaactaatgttnnnnnnnnnnnnnnnnnnnnnnnnnnnnnnnnnnnnnnnnnnnnnnnnnnnnnnnnnnnnnnnnnnnnnnnnnnnnnnnnnnnnnnnnnnnnnnnnnnnnnnnnnnnnnnnnnnnnnnnnnnnnnnnnnnnnnnnnnnnnnnnnnnnnnnnnnnnnnnnnnnnnnnnnnnnnnnnnnnnnnnnnnnnnnnnnnnnnnnnnnnnnnnnnnnnnnnnnnnnnnnnnnnnnnnnnnnnnnnnnnnnnnnnnnnnnnnnnnnnnnnnnnnnnnnnnncaatttaaaataaagtgaatagtgattatagtgaataaagtgtgtagttatatatttttctaaaagtgaaatacccttttaatgaccaacattctttgagtgcctggcattgttttgcctaaaaagacctgcacatggctgggtgcaatagcttacgcctgtaatccaggcactttgggaggccgaggcgggcacatcacaacatcaggagttcaagaccagcctggccaatatggtgaaatcccatctctactaaaaaaaaaaaaagaaattagccaggcgtgatggcaggcgcctgtagtcccagctactcgggagggtgaggcaggagaatccctgaacccgggaggtggaggttgcagttagcggagatcatacaactgcattccagcctaagtgacagagcgagactctatctcaaaaaaaaaaaaaaaaaaaaaaaaaactgtacatatgtacatatttagataccggagagatctaatttcattagttcytcaatatccttggggaattggttccagactcccttgcagataccaaaatcagcacatgctcaagtccctgatataacatgatacaatatatgcatataacctagacacatcctcctttatagtttaagtcatctccagattacttgtaatacctcatacaatgtacttgctatgtaagtagttgttatactgtattgtttatggagtatgaccaaagaaagtctgtacatgttaagcacaggcaaaaccgtcctttttttygtttctgaatatttttataccatgattagttgaatccatggatgtagaacccatggatagggagagctgattgtattatttatgtgtgtgactcttacaattgtgaaggggatgcacatttcaggagtgcatttttattttgtctgaattcagtctgggaaatgattaattacagggcaatatttcttgtcaagttgtgaataaatatgtttagcattagtatagatgtttacaaacaagaaaactcatactgcttgccaagcagttgattaaaaaatgcattcaattcaccacaaagtctctgtaggaaaaatctttacatttgtatgggttggcatttagtaattaaatctctaaatattttgattaggctgaaggccacccaaagtctttggtcatatctgaaaaacactttcagccatcagtaggaacaaagctctaggacagccactgtcattttcacaggagtcttaaatctagagcagtgtgcataagaatcccctggaaagccctttagaacacagattcttcagccccacctttagagattccaatttagtagcccggggtggggacgcaaaatgtgcagttgtcactagcttcaggccaatactgatgccgctgttccaggtaccatagtttgagaaccactgttctggggatttcagttgtgatttgaaagtagacagcccggccgggcgcggtggctcacgcctgtaatcccagcactttgggaggccgaggcgggcggatcacgaggtcaggagatcgagaccatcccggctaaaacggtgaaaccccgtctctactaaaaatacaaaaaattagccgggcgtagtggcgggcgcctgtagtcccagctacttgggaggctgaggcaggagaatggcgtgaacccgggaggcggagcttgcagtgagccgagatcccgccactgcactccagcctgggcgacagagcgagacttcgtctcaaaaaaaaaaaaaaaagaaagaaagtagacagccagattgatgaaatcaaccctttttaaaaaggcttttgcttgacaggtattttatatatttcagaacaagatactgatgggaaagaaagatggcaaagtgttttctgtaagatttgggaggaggagcagatgggaagccagtatgtttgcccttttatttctcttttcattaacagcactggggaaatattctgagttatttttcttggttcctttcatgccctctccttctttcctaacagcaagtatgttggaagtggcttgaactctgccacttctagcaatgtcatcttgggtagattactgtatatgttagttatctatattactttgtaacaaaagatcctaaagttgagcaacttagaacaacatctattatcactcccagtttttgagggttggaaatacaggagcagcttagctgggttgttctggccaggggtctcccatgaggttacaaactgttggttagggatgcagtctcagaagtatttggagtatgttttcaagctcacacgcagacatatttgcaggaggcttcaattccttcccatgagtctccatagggctacacatgacaagacaggagactcaacacaacactgaagccacagtcttttttttttttttaagttctgagatacatgtgcagaatgtgcacgtttgttacatagttatacacatgccatggtggtttgctgcacccatcaacctgtcatctacattaggtatttgtcctaatgctatccctctcctagccccccagcccctgacaggccccagtgtgtgatgttcccctccctgtgtccatgtgttctcattgttcaactcctacttatgagtgagaacatgcagtgtttagttttctgttcctgtgttagtttgctgagaatgatggtttccagcttcatccatgtcctgcagaggacatgaactcatcctttttatggctgcatagtattccatggtgtatgtgtgccacattttctttatccagtctatcattgatgggcatttggattggttccaagtctttgctattgtaaacagtgctgcagtaaacataagtgtgcatgtgtctttatagtaaaatgatttgtaatcctttgtgtatatacccagtaatgggattgcttggtcaaatggtatttctagttctagatccttgaggaattaccacactgtcttccacaatggttgaactaatttacactcctaccaacagtgtaaaagcattcctgtttctccacatcctctccagtatctgttgtttcctgactttttaatgatcgccattctgaatggcattagatggtatttcaytgtggttttgatttgcatttctctaatgactggtggtgatgagctttttttcatatgtttgttgctgcataaatgtcttcttttgagaagtgtctgttcatatccttcacccactttttgatggggttgtttgtttttttcctgtaaatttaagttctttgtagattctggatattagccctttgtcatatgggtagattgcaaaaattttctcccattctgtaggttgcctgttcactcttgtgataatttctttttctgtgcagaaagctctttagtttgattagatcccatttgtcaattttggcttttgttgccattgcttttggtgttttagtcaggaagtctttgcccgtgcctatgtcrtgaatggtattgcctaggttttcttctaaggtttttatggttttaggtcttacatttaagactttaattcatcttgagttagtttttgcataaagtgtaaggaaggagtccagcttcagttttctgcatatggctagccagttttccaaacaccatttattaaatagggaatcttttccccattgcttgtttttgtcaggtttgtcaaagatcagatggctgttgatgtgtggcgttatttctgagggctttgttctattccatcggtctatatatctgttttggtactaataccatgctgttttcgttactgtagccttgtagcatagcttgaattcaggtagtatgatgcctccagctttgttctttttgcttaggattgtcttggctgtatgggctgttcctgggttccacatgaaatttaaagtagatttttctaattctgtgaagaaagtcagtggtagcttgatggggatagcattgaatctgtaaattccttttggcagtatggccattttgacgatattgattcttcctattcatgagcatggaatgtttttccatttgtttgtgtcccctcttatttccttgaagagtggtttgtaactctccttgaagaggtccttcacatcccttttaagttgtattcctaggtattttattcccttagtagcaattgtgaatgggagttcactcatgatttggctctctgtttgttattggtgtataggaatgcttatgatttttacacactgattttgtatcctcagactttgctgaagttgcctattagcttaagaaaattggggctgagacaatggggttttctaaatannnnnnnnnnnnnnnnnnnntatacaatcatgtcatatgcaaacagagacaatttgacttcctcttttcctatttgaataccctttatttctcttgcctgattgccctggccggaacttccaatactatgttgaataggagtggtgagagagggcatccttgtcttgtgccaattttcaaaggaaatacttccagcttttgcccattcagtgtgatattgtctgtgggattgtcataaatagctcttattattttgcgatatgttccatcactaccaagtttattcagagtttttagcatgaagaggtgttgaattttatcaaaggtcttttctgcatctattgagataatcatgtggtttttgtcattggttctgtttatgtgatggattacgttaattgatttgtgtatgttgaaccagccttgcatcccagggttgaatcctacttgatcgtggtagaaaagctttttgatgtgctactggatttggtttgccagaattttattgaggatatttggattgatgttcatcatggatattggtctgaaatttcctttttttattgtgtctcttccaggttttggtatcaggatgatgcagtccttataaaacgagttagggaggagtccctctttttctattgtttgcaatagtttcagaaggaatggtaccagctcgtctttgtacctctggtagaatatggctgtgaatccgtctgatccttgatgttttttggttgataggctattaattactgcctcaatttcagagcttgttattggtctattcagggattcgacttcttcctgctttagtcttgggagggtgtatgtgtccaggaatttatccatttcttctagattttctagtttatctgtgtagaggtgtttgtagtattctctgatggtagtttgtatttctgtgggatcagtgatgatctcccttttatcatttttcattgtgtctatttgattcttctctcttctttattagtctggccagcggtctgtctattttgttaatctttaaaaaaaaacagctcttggattcattgattttttttgggtgggaggatgagtttttcatgtctttatctccttcagttctgctctgatcttagtaatttcttgttttctgctaccttttgaatttgtttgctcttgcttctctagttcttttaattgtgatgtgagggtgtcgattttaggtctttcttgctttctcctgtaggcatttagtactataaatttctctctaaacacttccttagctgtgtcccaaagattctggtacattgtgtctttgttctcattggtttcaaagaacttatttatttctgccttaatttcattggttacccagtagtcatttatgaacaggttgttcagtttccacgtagttgcgtggttttgagtgagtttcttaatcctgagttctgatttgattgcactgagccacagtctttttatcactaatcgcagaagcgacagtgcatcacgtatatgtattcttttcactagaagtgagtcactaagcctacccatactccaaggaacaaatgagttccatctcttgaagggagtattaaagatggacatatccttaaaaccatcacactacattagcctcagttttctgttccataaagtgggaaagtgatatttcatagtggctcagtaatggtagtaattaaattattctgatgattataattttttatcataatcattatcatctcttaagaactttacgttcaaccaaattttctgatgcatgaaattctccccacctaaatccatattttataaactgccacatatcataaaagcctcttcttttaaaaaaaaatagaagaaatttacccttataataaagccagcctctctacagccaaaaaagttaaagactgatattaatatgattatggatgagaacatctgtaataatttatttattgaataggagtcagcaactattaaatgaataagccgtattaccaagtgggatgtatcctgacacacaaagactgtttctatctggtacgttaaaaagctatcgtatcatttagccttgtagtccatgtctggtattttgtcttaagaaaataataccagcatttttgatgccagaagatgtttaacacaggattgtattttcaggcagcctttaaaatggcccctagtgattgatccttatctcttgttgttcaggctcttgtgtaatcacctccccttgcatgtgggctttacctgctgactcacatctaatgaatagaaatgaaataattcggttataaaaaagactgaagcttcagtcttgggggctgctgcttgctctctctgtttacacacagtattttttttaaccacacctggcataaaacttctccccactcccagaaacatactagaaggaaatatacaaaattaataatactcaatgtgtttaagtgttaggactctgtcatttgatctacttttttgtgtttttctatttcctatcttgatcatatattattttacaaaatggcaatatttaaaaggaaaacaataaagaaaagaaaaagcaaagaaaaaggacaaagtacatgtaggtgtttaaacacaggtaacatttgaaaaacatttgattgtttagtgagaaaaaagttgaaatgtgtgcatttgtatttaaatacctacaaaaatgtataatttgtattcaagattatataatattgaaaatttgtgtggtggtcatacatcacttataatttttttaagcactaaatgagatgtttatacaaaaatactggtaaatttttacctaacacttgctgatgaaaagtatcatgtaaatttctagtaataatattgatgatgatatagtgacaacttagtaaaagtcctatagtaatccaggcaacagacttgactagcacatcgctgctagttggttcctcccaatccgaatccttcaaccagtgaagatttttgaatcgttggtcttgtttggctacaggatttttataaatgccattcaatgaagatttgccctctggccttcttgatgttggtttaccctccctcctccagtctattatttagcatggtgatgccttccataatgactgagcccatctccttgtgggctctctttggggtccactatgggtcactgtgatatgggtgtctggcaaagggctggaaagcaggaacattaaattacttcagtttcagaccacttactttttctcctgcaggaactgaagcagagcaagattttgttttcctgctcattcattattagcagtagccttgtctttagaaaaaagcaggttatttttctcacttttgagcctttggttcttaaaattacctgaagcactttgagacttgacttcatttcatatctttctgtgatgctcaaaactaatgtttgcccttaatttttttagaattgctcaaaccaaataaaatagtttcccaagtaccaaatttactgctataacgtatrcatctcttcggatagcaaatacaatttcaggaccgcttttgggagacactattcctcacatacttatattacaaacagtattaatagaacttcagtctaaaatatatgaagaaaagaacatctaactacatttaatggttagtggaaattccatttagctatgttcgtgtttgttcctaagtgaagttatttaaggggaaaacagtcataattgagtgagcatataatgttgtcttgtctgtacttgattaaagcaaaacarattacatttagggcccatctttcttaatagaaaatcacatctaaaaaatattttctttactttcactagctttcctattcttgcaaccttagaggcacatatgtgtggacataacattgggcttagataatgtrtattctttttaatccataagatgatgcatgtacattctccccactgagtcttaagggctgctgcaatttgaactgtgtagtaattttgcattttcattttctctgacttaacgatgtctataaataaaggyggcatcttactttaataataaaaaacccattatcgccatgtggtggagataacatattatcattaccactattaacaactgctagtgttaataatacatattttctgcttcagccagagccaccttgcatttgaagcaaaagtttgaggtattatagccttttaagtttattattcttcctatgttttgttcaaaaggaaaataattgttaaaggatcctgaaagcatattgtttgggyctaaatcaatattacaaggttgcaaactgcagtcatacaagtgtacttgtgatttgctgagaatgagaactgtggtcctcaaacctttgtcagctgtagctacaccagcccatggaggagaggtcctactgtagtttacccactcaagcagataaacaggagaaagcaagtgagtgcagaaaaagctattatacgattgaccttgagtcttttgtacttcatttagaagcacaagtacattattcacagatttatatatttaattatcattagttactggtgaagaacttacctaacaacagttgagacgtagaaagaatgcacatttaagaactggtacaatgtatcagattggacttgacccagcccttttgggtgcagttctcttgcccatttatttggaatgaaaagagaaargaaatgaactcattgcatctcatgttgctatgtggtatacatagtcacatatatatgaaatctgataaagaaggaaatacatttttaaaataaagcctttgctttgtattcagatttgactgccatctacccttctcccaaccagtataaaatattactgctggccttccccttctctcatcctaagtgttgagaaataattttaacacctttttttgttaggtaccctatgtacaatatttaaaagcagattcacagtcccacattgttgttattgttgttgttgttattgttagagacaggaaccagactggaatacaagtggcatgatcaccacacactgcagtctcaacctcccaggcccaagaaatcctcccacctcagcctccccagtagctgggactacagatatgcactactatgcctgactaatgtttttcawtttttgtagagataggttcttgctgtgtttcccagcctggtctcaagctcctgagctcaagagatcctctcgccttggcctcacgaagtgctgggataacggacgtgagccactatgcctggccacaattttaaattgaacttattttagcagcatcaatttcttgattatgttaaacaacagaaatratcatatatatttgtgtgctcacttttctgcttttcaaagagatttctgacagatcatttcatttgctcctgtagcagttactcgtactttagtgatttggggttgcaagatcagtacttatgagacctgcttcttctcatgcactttgtcaacctctagtgtatgtgtggtggcctcttggatttgccctcatggctcaattagacagagttctcgtaggtattgaaagcttttttttaactacaattttttgtgaacagaaattaagctaattattaaaccagcaagaaaacagttaaaaagctgtgttttatagatgtttttgtagagctaggctaactaagcatctctgtgcaaataagtttttttttttttttactaaatcccgcacctcatacttcctagctaatatgaccctggtttagtctttacaccttaaatttaattcacccaatgtctggatttattattaattctgctaggaactctctatccctctgggcatttgagcagtttgcttattaatcagctaatgtggtaggctcatctacctcgctactcagtttatacctcatttcgcagttctctgcaggaagaaatagccttttttcctcacacagcagctagcaaaaagaaaggtcactcagtcacttgaatctgggcccactcccccatcttctagaaaggattctccctycttccacacccaccgtgcgcaccttcctatctttatcctcagtgggcatcacggctcacatccgaaagtttccctgaataaaattggttcctttcagccaattgcaagcacagatgaggtcacaactggtaaatggaatgaaaaaataaaccagtagcatatttagcttgaagtaacattccagctaaatattttaaaacttgttaaacagggtttggggaagccatatgaagtggtttctcctggaggtcaactttagggtttttcaaatggttataaagtggtgttctatggggtagcttttatagaagggctattttgaacttttactagaggaaatggctagcagcaacctcccccaacccccagaagtacagtgaggaaaaacccaaaagacaaataatagacaccctttcccctaacataggggagaacagtacagcataacaagataccatctcagctttatttcttacctattcagaggattttaagatcaggaagctcgagagaaattagttattccttcaatttaattcaatccaataaaagagtatggagttcctcttcgttttaaaattctgactgtggtgttacggaaggaccttctaggtgaaagggtaaccgaaataacaaaggttccatttcgtccttcagcaaattcaaaagcttgagagcgagtcatacaatgtgattatttgataattctctctatattctgatagaagaaccagagggatataaaagacagaaaggtaaaatgggatggcatatggtaacaactggaggcttagaacctagcagatcggggtcaccatgttggatgaatgtgaagggtaattatgccgggagaggtcacaagaagaatcttaaatgaagcttctaaggataggcaggatttgaccaggtgtaaagaaaaaggaagctctaggcataaggatagaaattagataaaaaataaacaacaaatttggaatataatattgtatagctggaacgtttatagttgaccacagaaagtttccttcgcagctgtttgcccaaggtttcaccagtgcatgtgactttgtatttcaartcagaccttgttgatcataaattaatattatcacctctagtactgtcctagacctgcaggatacagcatttactaagaccaattgctgtctgtaaaaagcttcttagtctagtataatatgcagccagttacttgctgcttctttactgaaacaagtttaataaaccagcaaaacaatgcctagcaacccactgttgctgggtttaaaagtaaagatgctggttgtcatctgccaggcgtgtacttcaaaaggtagttagcctcccatctagcctcccattgttaaatctagtgcctgctaacagtatctcttgacagctgaaaaatgcagttgggacaaagggaatctgaacagannnnnnnnnnnnnnnnnnnnnnnnnnnnnnnnnnnnnnnnnnnnnnnnnnnacccctaagtaatttattatttgtttgtatttaacttaggttttcttttattattttattatactttaagttctagggtacatgtgcacaacgtgcaggtttgttacatgtatacatgtgccatgttggcttgctgcacccattaactcatcatttacattaggtatatctcctaatggtatccctcccccctcccgccaccccacgacatgcyccggtgtgtgatgttccccaccgtgtgtccaagtgttctgattgttcagttcccacctatgagtgagaacatgcggtgtttggttttctgtccttgtgatagtttgctgagaatgatggtttccagcttcatccatgtccctacaaaggacatgaactcaaccttttttatggctgcatagtattccatggtgtatatgtgccacattttcttaatccagtctatcattgatggacatttgggttggttccaagtctttgctattgtgaatagtgtcacagtaaacatcaatacctagttcactgagagttttwagcatgaaggggtgttgaattttatcaaaggccttttctgcatctattgagataatcatgtggtttttgtcatcagttttgtttatgtgatggattacatttattgatttgcatatgttgaaccagccttgcatcccagggatgaagctgacttgatcgtggtggataaactttttgatgtgctgctggattcagtttgccagtattttattgaggatttttgcctcgatgttcatcagggatattggtctaaaattctctttttttgttgttgtgtctctgccaggctttggtatcaagatgatgctggcctttaaaatgagttagggaggattccctccttttctattgattggaatagtttcagaaggaatggtaccagctcctttttgtacctctggtagaattcggctgtgaatccgtctggtcctggactttttttggttggtaggctattaattattacctcaatttcagagcctgttattggtctattcagagattcaacttcttcctgatttagtcttgggagggtgtatgtgtccaggaatttatcaatttcttctagattttctagtttatttgtgtagaggtgtttatagtattctctgatggtagtttgtatttctgtgggatcggtggtcatatcccctttatcattttttattgcatctatttgatttttctctcttttcttcttgattaatcttgctagtggtctatcaattttgttgatcttttcaaaaaaccaactcctggattcattgattttttgaagggttttttgtgtctctatgtccttcagttctgctctgatcttagttatttcttgccttctgctagcttttgaatgtgtttgctcttgcttctctagttctttttaattgtgatgttagggtgtcaattttggatctttcctgctttctcttgtgggcatttagtgctataaattttcctctatgcactgctttaagtgtgtctcagagattctggtatgttgtgtctttgttctcattggtttcaaagaacatctttatttctgccttcattttgttatgtacccagtagycactcaggagcaggttgttcagtttccatgtasttgagcggttttgagtgagtttcttaatcctgagttctagtttgattgcactgtggtctgagagacagtttgttataatttcttttcttttcatttgctgatgagttttttacttccaactctgtggtcaattttggaataagtgcaatgtggtgctgagaaaaaatgtatattctgttgatttggggtgcagaattctgtagatgtctattaggtccacttggtgcagagctgagttcaattcctgggtatccttgttaactttccctctcgttgatctgtctaatgttgatagtggggtgttaaagtctcccattattattgtgtgggagtctaagtctctttgtaggtctctaaggacttgctttatgaatctgggtgctcctgtattgggtgcatctatttttaggatacttagctcttcttgttgaattgatccctttaccattatataatggccttctttgtctcttttgatctttgttggtttaaagtctgttttatcagaaactaggattgcaaccccttcttttttttgttttccatttgcttggtagatcttcctccatccctttattttgagcctatgtgtgtccctgcacgtgagatggatctcctgaatataggacactgatgggtcttgactctttgtccaatttgccagtttgtgtcttttatttggagcatttagctcatttacatttaaggttaatattgttatgtgtgaatttgttcctgtcattttgatgttagctgattatttttcttgttagttgatgcagtttcttcctagcatcgatggtctttacaacttggcacgtttttgcagtggctggtaccggttattcctttccatgtttagtgcttccttcaggagctcttgtaagacaggcctggtggtgacaaaatctcagcatttgcttgcccgtaaaggattttatttctctttcatttatgaagcttagtttggctggatatgaaattctgggttgaaaattcttttctttaagaatgttgaatattggcccccactatcttctggcttgtagagtttctgctgagagatcagctgttagtctaatggacttccctttgtggataacccgacttttctctctgggtgcccttaatattttttccttcatttcaactttggtgaatctgataattatgtgtcttggagttgctcttctcgaggagtatctttgtggcattctctgtatttcctgaatctgaatgttggcctgcsttgctaggttggggaagttcttctgggtaatgtcctgaagagtgttttccaacttggttccattctccctgtcactttcaggtacaccaatcagacatagatttggtcttttcacatagtcccatatttcttggaggttttgttcatttctttttactcttttttctctaaacttctcttctcgcttcatttcattcatttgatcttcaatcactaatatcctttcttccacttgatcaaatcggctactgaagcttgtgcatgcatcatgtagttctcatgccatggttttcagctccatcaggtcatttaaggtcttctctatgctgtttattctagttagccatttgtctaatattttttcaaggtttttagcttctttgcgatgggttcgaacgtcctcctttagcttggagaagtttgttattaccgatcgtctgaagctttcttctcttaagtcgtcaaagtcattctctgttcagctttgttccattgctggcgaggagctgcattccctttgaggggaagagatgctctgatttttagaattttcagcttttctgctctggtttctcaccatctttgtggttttatctacctttggtctttgatgatggtgacgcacagatggggtttcggtgtggatgtcctttctgtttgttagttttccttctaacagtcaggacccttagctgcaggtctgttgtagtttgctggaggtccactccagaccctgtttgcctggatatcaccagcagaggctgcaggacagcaaatattgcagaacggcaaatgttgctgcctgattcttcctctggaagtttcgtctcagaggggcaccctgctgtatgaggtgtcagtcggcccctactgggaggtgcctcccagttaggctactcaggggtcagggacccacttgaggaggcagtctgtccattctccagttctcaaactctgtgctgggagaaccactagggatgtttaagtctccagaagttcctgctgccttttgttcagctatgcccggcccccagaggtggagtctatagaggcaggcaggcctccttgagctgcagtgggctccacccagttcaagctttctggctgcttcgtttacctactcaagcctcagcaatggtggacgcccctcccccagccttgctgccaccttgcagttcgatctcagactgctgtggtagcagtgagtgaggctccatggttgtgggaccctctgagccaggcatgggacataatctcctggtgtgccatttgctaagactgttggaaaagcgcattattygggtggaagtgtcctgattttccagatactgtttgtcagggcttctcttggctaggaaagggaattccctgaccctttgtgcttctcaggtgaggtgatgccctgccctgcttcggctcgtgctccatgggctgcacccagtatccgacaagccccagtgatatgaacctcgtacctcagttggaaatggagaaatcacccttctcttgagctgtagactggagctgttcctattcggccatcttggaacctcttcctatttaacttaggttttaaggttgaactgacttttcctaccaactagatagtcaattgacaacattagttctgggatataatgtgcccatagaaatacttttgaccagtagcttccttgatattaaggcatttctgaaaccaagcatttgtgtctatgaacaataaaatcaggtcttcagttgctgacctggtttctattgtttactttcttgtcaagggcttctcctcctcaaagttattttaaagcctgatcttacmacartaaattcagtttcacctgtgaattggtaggctacttttaaaggaaaatgtttttctaaaaaaagaagagtgataacataaaatacatacctttggctattttaggtgactggaaccattactaataatcagtttcattcagcaaaaaaaccgttctttcaggtaatatataaaaccttttgttcatccttagtataaggccaatcggtaggaagaaatcctattgtaaattacattcttagtgttacttattattttatgtgtttaaagtaggcaaaggatgcttggtcaaatggatggattttgccacttttttttttgagatggagtcttgctctgtcgccaggttggagtgcagtggcaagatctcagctcactgcaacctccgcttccagggttcaagtgattcccctcctcagcctcccaggtagttgggactacaggygcgaaccaccacacctggctaattttttgtatttttgtagagatggggtttcaccatgttggccaggatggtcttgatctcctgacctcgtgatctgcctgccttgggctcccaaagtgctgggattacaggtgtgagccactgcgcccagcatgccacctattttaattagcagaaaagagtgtcatgctattaaggaatcaagtatttataaatgagacatttcaatactggagaaaagtttattttcttgaatatggtaagtatgttctttacagtcttactgtaatatatatttttttactcagcaaatacttttccttaaatattgcaaaggtaaattgtggaagagtcctccatattcacattctgaacaaatggagtttgaaatgaagagttttaattgtttgtgcagagccattattagcattttgggtaatcagagctttctttttcacctaatatattctttcttatatgtctgttttacttgctttcaagtatgttttggttattgtacaaaccaaccttaatgacctcaggtgctaatatgacactgagttttataagtagtgaaataatcatgattatgggattttgttattgtttgcttkttattttttattcttttagctcaagaaaaagcaagcattttaaaatactaaagcttggcaatcttgtcttgtctaacctcctggaatagagacttagcattctctaatactctcagagtacagaatctttctcataggaattgtgtcatatattaagtgagacagttggtaattgagttatattctttattacagaaaagcaggatcttcctgagctggaattcctctctaactgtacattaaaatccttttgagcttatagtaatattttacaagtctctatttgaggctaaattttatttttgggtcattggaaacctcgacagctcgaatgtttatgcagtatcatggtgtccagtgaaaatttactacacctgttttagagttcaccaaacaggacaaataagagatataaagagatttattataaggtattggctcatacartcatgaaggccaaggaatcccacaatctgctgtctgtaaggcagagacccaggaaggctggtggtatagtytgaaggcctgagagccagagagccaatggcttagcatccagtctaagtctaaaggcctgggaaccagggatggcaatggcagaaggaagatgccccagctaaataatcacacagagagagcaaatcctcccttcttccacctttttttttatgcttaggcccccaacagattggatggtgcccacccactttggtgagggtgggtattctctattcagtctatgaattcaaatgctaatctcttgtggaaacactctcagacaccctcagaaataatgttttaccagatatccggatatcccattttccagtcaagttgacatataaaattaattatcgtactttccaagcatcccaatattaattctagggataaataatacacttaggacagaggtgtgggtcagtccactgataatacccagatcttattctgtatgcctaaaatgatgctaagtacaagaaggcaataccaagtaaaaataggaaactctttgccctgtaattagaaaaacaaagtaaattcataagtcagttaggaagccataaatcatagtaatcttatatgacattgaatttaaaactagaagagcgcttaattcaaatgcaaaatgattctctggctaaaggtgtgggggaaggggaggcgattgtgggtggaagatgttgagtaggctcaatgagcagccttgatagcagaagagttggaagggtgtaagagaaggtaagggcttttaggctggatgattgagcaggagaatacagtaaagagattgttcagattggctaaaagtggaatgctaagcaacatattcagccagataaaatggggccaaatcttggagggcaaggaatgctgctgccacttctataatcatcgttgtcctgcagcagttcatttggggtcctccatcaagcagcagtagtgagaatggtggtggcagaagtgatgctggkggttttagtaacggccagcaattactgagctcttatgacgtgccagggtcttgtacttcatgtggattattgtattttaagacattattatctattttacagccaagaaaaggaggcatagaagagattcataactaaccagaggacacagagctagtatgggtatagctagtatgttgagcccgggcaattttacactatattccgtatttctaaacacatccctgtattaccactggacagtaagtagctacagagagcarcagttccaatgcatcatcctacattttaggagggatgttggtgactagagtccgtccagagaaggataactgggaaaataaagagtccttgaatctctgtgaatggaaatagagatgtcaaaaagataatccggtttgtgagagaaagtggtaaattgggctttagattcccccctttttctcctcttccccaggcacagtgggctgagtcccctcaccattgtatatcagagattgaagaattatgtacaaatgtttaaatggattacaagattattccaggtagatggaactatttttatcagtgacaaaagagttcctaagagttgtcattcactgaccttttttgaatgagccatcatttgcttttatattctactaaagcaatccttgaagatcaagtacagagaaaacaaaatcagagtatttatcagtttctgcagttttgattttccaccaaacatatgagatcctttagagacttcatgaagtggaacaagaggaagggaagtggtgtatagttagtatcagtgtcagtcctgttattggtcaggacctaaacaacagaaatgcagtatttcttctgctctagaatcctagctatagtaagatacctcactgttttaataatggtgttttaggagcaaaactcacttcagtaaagggagatattcattctaagggggattctgatgtcaaaaatgttaaaatgtctaaaagctttttattttaaaatagcggaaataagaagtaagttctgctctgatctttacagaatcttgtagagcagggggtaagagaaaactgggcaaatattaacaaaggcagcatgatgtgtgagtatttgggctccaagaggtgagggaggcatgaggaagatagactcaaatgccaggcacagaaagagcctaaatgaagttggtggatgttgggaggagggaattgtagtgtctagactttgagtactcatatcaggttagccctgtaatggaaacattacaaacatgcattttatggaaatgcataaaattattcctaggtgtattagtccattctcatgttgctaggaaggaacacctgagactgggtaatttataaagataagagtttaaattgactcacagttccgcatggccagggagtccttaggaaacttacaatcatggcagaaggcacctcttcacagggtggtgggagagagaatgcaagcacgggaaatgccagacacttacaaagccatcagatctcgtgagactcactcagtgtcacacgaacagcatgggggaaccgcccccatgatccaattacatccacctggtcccaaccttgayacgtgggcattattacagtgcaaggtgagatttgggtggggacacagagccaaaccacatcactgcacctattaaccatccacaaacaagactaaatcaaccctggcagcctggtccaaaaaaacctaccttcttcagcctaataaatttgtctccaaagaccctgaccacataattctaccttccattctcaggtccagaagcttccacctaatgtgatgggtgtcctcacaaccttctgagtattgaccatctctcttggtgtagctgaagatgcttattaagtgtaaatgatacagatgccctatccgtcagttgcccaccctttagtaagatgcacagacaataaaaagtccacagttacctccctataggcattatcttagtaaatggtgaagtagctattaaactggaactttatggtttataagatgttcttagttgagctatgcctttgaaatctctttctcattctcaacatcaagttcaccactagattataaaattagcaaaggcaaagactatgactttctggtcacagatttcctttgtctccacatctcaacacagttgtacacatattgtaagatcttagtaaaattgtgttgaatgttctttttttttttttttttttttttttttttttttttttttgagatggagtctcgctctgtcaccaggccggagtgcagtggcgcgatcttggctcactgcaacctccacttcccgggttcaagcgattctcctgcctcagcctccagagtagctggggctacaggcgcacaccaccatgcccagctaattttttttgtatttttagtagagacagggtttcaccatgttggccaggatggtctcaatctcttgaccttgtgatccgcctgcctcagcctccttaagtgctgggattacaggcatgagccactgtgcccagcctgaatgttctttttttaaacttccctgtcatactttattgctcatcagagctatttagggtgaaagaaaaacctcaagttttgaagcttagtctctgagactcaggtagggctgacagccattcagttctgttctgcatttacttgcctcatttgagtaaacttcttcctgccttgaaggactgtactatatacatgtggactgatgactgtgcaaatcttctttgcttttattcaaagaattgaaaacatttctcatcaaaatatcctgctcctcaacataaccgaaatagactttaaaaagccaattttaattatttttctagtccagtttatgtcaaggatgcaattcagttctcttgacagtctttatattctaattaaactcttccaatttgcaatttttgtcttcattcttcatttattaataaaagccaaatttgacctagatatgtaatagtagatgacaaaatgtggagttgctaagcccctttctcccaatgaatactatttatctttcatttttatagcagtaaaacatttatataaacataccatagtggaataaaagcaacagtctggtgctagtgatcttcactgtgattgacttctattacttgcctatacatttagtatgtttgtgcagaaatgtttctcaaggattttctaacaggtgatgttattgaggtcctgagagatgaagagatgtgtccaaggtcctgtacctaaagcagggcagagcgaagactagaacccaggtctcccaactgactgctagtgaaatgttatgcatccctgcttctttgattgtttttttgctgagagaggattgttttgggaaatataaaaaggactctgttagcgtgtgtctagggtcatgttatactgtaatagcatatgtggggtactctggcagtggtaggacagtgggtctttaaatgggtctttaaaatgggtctttaatgacagtgggtctttaaatgtggtagatggggtatcaggttggataagagtttgggtaagctgcatggtcagatgggcccagattgaaattcctgctcagacattaagcagctgtaggactatgggcaagttactaacctctgtgatctccagtgtcaacacctgaacttcttgtgaggatgaaatgacctgatacttatgatgtgcttagcattacacctcacacagactaacacccttaataaaaagttaactattcttagatattacatgtttatctgagttatggttattgaaaaacccatatgtgcctgacagtaaaactaggattactgcaaggggaaaggaaaagatgacagtcatgtttcttactaactctcattggaacacacaacaagcaccttctttagaattaagataaatacccacacacactcacacacatacacagtatgcatatggtgtatgtctttgtgtgtgtgtatctattcctttgttttttactttatcatgctgcctaatggaggattgttttttgaaatatgaaaaggactcctacatgtgtctgtaagtcatgttgtaggatagttgtggattggatagtccccttgagattctccttgctcttcaatatcaaattaacagagaaagaacatagttttactttgtggtgtatggacttttgcaaatcagtaacaagaaaatagtctattatttcccacaccatcccacactcatacttaataatactcatcctactactttgtttttcattctttcccttacttctcttgaagtcagagatgaaaatataatttgccaatatacagccaaatttgtttttggaacacattctagattattatctttctcacttaccaccagtgtggtatactgcattgttayaaaacaaaatcacaaacaattttcaggtcagtacattttagtaaagtcagtttattaygttgcctattttgtagatgagatacctgacttgtgacaaatggttggacttatatttgatagtaagtcacttcagactcaattcaatttcattttccttttttcacccaagtccattttccccatttttctcctgaatttagcatggcaagtatgtactttatgctttgcagataagttggtttctgtgtaaccataataataaatcaagccaactgggtgctgctgcccatatcaaagcctacagcttcctagtacattccaattaattatcttcatgaagcaatcaaaccatccctgccttccttgcagtgtcttttctgtttccctcaccttttcttaaacatcttaaagagaaacatgcctctgtgaaatgattgaatggttcagcagcttttgattttcagcttctcatttaatcatgcaacctgtcattctaaatatttttcacctcacaattatcctattttcttttcctgcttgtttattgtccactctgtgaatcatgtcaataacagtttttaaatcattgtaaatcataatagtttgacacttatttggagaagccttatttttgacaaggaggaggaaatttcatatcatactgtcataaattgggggtcaaatcaacatagatttctcttctcattaacatttcagacagaatgctcctaatataagactttaagaaaacagtcactaagatttgagtttaaattgtttcctctggccttactagctaatgaaagcacattcataaaagaccttcccagataaaggaccataattttttgttaatattatggttcatgattttagttacatttctcagagccagagtcagacaattagacattctgattcactgtagtttgtaagccaatttcttatgtaccttcctaatgaataggcagaactgtatcttgtaagttcaaaggagtagaaaatctatatcaggagagaccgagataacatctgacctggtgttctaagtggggtgtgataagcgtatctcttcagaaaattacagacatgatttagagttattttaatttgttcctctcaacaggccatcaacagaaagtcagtttctttgtaaatttagctgatgtaaatagaatgccagcatcctttcatcacaggactgagtgcttggtgatagaggacagagatgactgagcgtgcttttgtaatatcaggaagcaagcaacctggaagtactcttaagtgtcataccattgtattctgatcctaacattgtgcagaccttttttttttttaaatccatgacttggcatagagagcacacagctatttcaaaggtttcactgaatgcatttcttataacattcacctgtgtgtctttattcccgactagataattctctctcaatacttttttgttatccctgagttccaggagaggtccaggccgtttgtgattatcccatgaagaacagttaaaggtagtggaagccccacctctacagaggcagagattaaccaggatggtatgggctccaggaacagaggttggaacagcaggcaggatggctcactggaagcagggctcagggacttcaaagattcttccatctccagggctcctgttctcccatggctaggaagggaggaatcttgtggttagcttttggcactaactatatttatatcagagaaaggaaaaattttggatttgtcatagattttgtcagtgaatactggccctgtcactttaggattaggaagttgccttactgttcaccagaacagcttagtgtaatggttaaagctcttgtcattagataaacctgtgttcaaatccttgtctagccattaattagctgctgatcttggcaaactacttcagctttctgagcctcagttttcctgtctctaaaaataatggtaataaaatcatagctcataggagtttggaaagggttgaattacttatatgccrggtaaatagtgagtagcaataattgctgactgctaataagtacttaccacttgccacgtactgggcttagtgccttattttaattatctcatttaatcctggcaccaaccctgcaaaggtaggtactaatattattatccccattttaaagatgaagaaactgaggcccaaagaagttagctaattcacacagctaataagtgatagagccagtgcttttgttgcagagatcagaatcagaacctactgcatgggtagaattttacagctcctcgaagtcaggatcatgtattatttatctttgtrtcttatgtcctctttttggcctcaggaaccagaacagtattttgttgtgtcagatgaggtcccccagtataaagattaaagaataactttcaaacagctatagcctcaacaatgcaatggagggatgcaatgggccaccttgcaaaggaggaaacttttgtctttgaaaaggttcaagctgyggtggctgaaccctcaggtcctgcctagctctaagattttctggttcattcatctccccggcatgcccacattacataaggtgcctttctctgctggaggaaaaggggaaagagtacacatctgtgggttatgtgttaaatcattcagccttcactcttacaaagtaaaatctcctactcaggatcctaccaactattattgtctacgttttactaaagaatcagattttcatttccactccgatttttagttttgagaaactagttcagttccttgttaaaaagtattgtaggcatcgtgtcgcaccattattaagaaatgtattttacaatatgaatgtagtgctaggtgaatttatatgaattattccatgtttgagaaggaaccatttggtacttgttctgaatacagttgtttaagggaagaaaattgcagacatgcagttttgttccatcccatttcaaaacccttgaccttgtctaggcagctagcaatgatgactgccttgaaaatgaaattactgtggtactttctaggtactccagatctttaattatttccaatatattgccaaatgaaacatttatgaaaaagcttacagttacaccaagtatcttgaaaatttacacttacgttggtgaaacatcaaacagtacagtgtatggtagtactatttttttttctctagacaagaattctctttgctcttttttttcatgactcatccttccttaactcatctttcttatcctctgaagctttcttttcagagaatcaaaatagctttcttcatcttttttttcttcacttcacaagacctccacttttgaatagtaggaataaggttggtttttccacaggaattggttataaattccttctccatgccgaagtacactggcctctagtggatacctgtctcagttgtagttcatactgatcttgccttaattcacttattgtagcactaaaccagatattttaataattttcaatagtctatattaaggaacacaatcagaactttggagggtttaaagtagattttattatgaaattgattaagctttatgtggatagtcatatacttagcaatatatttaacaaatttagattatctcctgcaatttcttaagatgtaattgtgatgttaactccacagtacttttcatttaactcacattgcacttgaagacttaaggcatatgtaacagatcattatagaaatcagcccaacttactcatgtcagagaaataagattctaataggataccaaattgtctcatattccctgtacatagtcctgattaagaaaaaaaagctagcattttccaaagcagtattattatagtgggattttttaagtataaaatttaggaaaatcatctgttaaaaagtataaatctatgtcacttcttagaacttgcagtttagtatatttcagtatggcaaaggattagtttcaattttcatatgtggtcattaaatggtaaaagcatatacattttattcagcaatctgccattaatttaaatgtgaaaaatattttattgaaagagctacctaaattcttattcaaaactctgcctatcagtgagccaacaattcaaccttgagtttattgataagtgacatctggttttggttgtaggttggttctgcctcagggtctctcatgaggctgcagtcaagaagtatgccaggttcactgtcatctcaagacttgattgactggggctagaggatcaatctgcttccaaaatgactcacatggcagttggtaggaggcctgaggccttggttccttgctggatagaagtctcttgagtgtccgtccttatggcttggcagttggcttgcccagagtgagtgatccaagagagagaacaaataggaaggagccccaatacccttcataacctggtctcaaaagtygcacactgtcatgtgtaccatattctgctcattagaatgaatcactaagtacagcccatgctccagaggaggaagattaagctctacatcttgaagagaggaacattaagggatttgtgggcatattttaaaactaccatggaaggagatcttcaagggaggatttgtctcatgtttaaggaatgtgttgcatctggtgtatataaaggacattttaggctatgccaaggatttcagccaagttggccagtaaggtgactgaaggtgttagagtagaagagtataaggcaaaccatatgacacagtagatctggagtcacatgagggtttaggattatcaaatgtgtggcttagaggagttacctaatgcctctatactgtatgccatctgtaaaatatggaaagcagttaccttccttatagggtcgtggtgagatatcagtaagttaagatagataaaatacttaggcagtgcctagcatctagtaagtgattaagaagtgttagctacttcagccttagcatgattgctgtcatgtgtaaattcatgttgtataactcttcaatcctcgttttgtagccggagaaatccttgtgtccttctccaaacttgcttggtttcttttctctctctgtgtagctttattctgcattccaacattcacacatgtaacagttttccattcgaatatttcattatatgcagaaatattttcaaattctggccaagcatggtggctcacgcttgtaatcccagtactttgggagacctaaacaggaggatcacttgagcccaggatttcgggaccagcctaggcaacatagcgaggctccatctctaccaaaaacttttttaaaaattagctgggcatgtggcagatgcctgtagtcacagcttctcaggcggctgaggtgggatcacttgagcctgagaggtcaagtctgcaatgagctgtgattgcgacattgcactccagcctgggcaacagagccaagattgcatctcataaagaaaaaagaaatagaaattttcagattatttgagggagtgggaaaatccaaaagttagagagggtagtgatagtatcaggaaagatgcactggtttggaaagcatcttctgggatgttgatacatctacctagttgtgggagatacacagattaagcagtaaggacagatgctgctctcagatacattttgtctagtaagcctagtgtttttaaaaatccagaattttggcttttgaaaacaggaaagatctgggcataaaaggcctacattcgcatggcaacaattggatagattgtgtagcaactgccccatttgaaaaggcatgtccttgctggtatgtcagagtattttctgttgtcttaatctaatacctctctactcatttacttacctgtctggcactgagtttgaaaccaccccttccaattaaaattaacactctgcaagtcagttagtcaatataatctcccataagaagtacccccaacatcaatgtactcratacatctataaaaasagtcatttggaactgtaacatgaaactgggatggaattcctgttctcaaatctgccaaggcagagattacagtcttctcaactaggtggcaagaacttcggagtcgagttagatggcatagtatgaaagggaactcgtgtagcagaaatgggcattacaggaagcatcacctactcaagacaaacaaaaaaatgggagatgccctcagctagccttgagcaacacagaagaccatccaggtttccggagtaagaactttgacatgatattcaaagcaatcatgaaaataaaaaggtggcaggtcaagacatttacaaaaatatttttttcaacccaagaagcttttttttgataggacacaaaatagacattaaataagttaaaaactattttttggatttaacatattggaaaatacatgttcatgagataaacccacactgagaaacatgtgtgataagatggatgaggtaggcgtctgcaaacagggacatttgtccagacatttcagagaataaaggagagttacagagcagggaagacaaaaggaagctctagcatatctggaaagcaaatgcttgtctacgttgtggacttaggtactgtgtgtgtatctgtctttactggatgctgctcagttcctagaaaagccatgtggaatttgagagctttagtttccttccgcatggtttttcttggttgttaagccatcctatacgtattccctttgggtatattttttggttgactgttaacagctcaatgacacagtttatttgcttagtagaacagaataatgtggcttttgagataaatgtatggtgactacttgcagctgggtcattggcattttatggaagttaacactttttgttcaaggttgcagacctacatttttaaatactaaccatcttctcgagtttgtctccatgttacccatgttccttctttagacagactggaagaccacatggggattcagtcttattgagcccatctttcatcatgctgaaaataaggatttcaagtcactttcttagtgggccttccttagttttgtttgtggctaataaactgaatgaagccgttttagtgctgagaagctcgttttcacctgacaagccatcatctgtcatttgtaatggacaggacccaagataataaagcctttagcttgttttcctttttctgcctttaactggggtgtagatccagacagctaatgagcaacaatttcagattcttaggtattagccatgtcccaaaaagagccaaggaaagaaatgtttgtgataatactcatttaatggcttgtgctgagaatgtgcagctttatttgacttttattttattgtgtaacccatgaccrtggttatcttgtggagagggggtaactgaacaaaatgttaaccttccagttctagaaggttgaatggattttcccaagagcaagctgggttggtcaaaatggcacattatcagttagtcttaaaaggaaacaatggcacactcatctcacagtatatggaggaaagtttatttttaaaaatattgataatgacaatatatgtggggttaaaggaacctggggctggcagcgtgggatcgcttctgtcccaatgctgagagagagagaaggaggtgactacttgaccagaagagaatatcctgtaatgaagacttttttgagatgctctgataccttctgtggaggaaacagccacccaagacaatcgtgctgggagggacgggggaataaatgcccccaattccctctcctcctgccagggctccccagacatcagatccaaaaggaacccattaatccgttctctctagtcagcctcccagggccaagaggaggttgcaaaagagtggagaggatctggagaggcccctgacaattctgcagcacagctaggtcccaaatcacgatgttttcatagtctgtttaacatgtgcctcagagaatatgatattctggaatccttttgcaaaaggagtctaatagctggagaactctactaggtccatgaaaggttaaccatggatgagagaaggtgtggccaatcaatgatttagacactttgaggtagaaagcattttgttcaattccttacttagcaggctgtagggagtgctctgccaatgtagtttctaattttctccagtcatggtatactgacatttgctgaacagctaaataaatagatctctgttccacacaacagataacagcaaggtcagacagtgatattagtaattttagaatattgtctacagctgagaatgtttttttggtgacagtgacacttaatactgctggtcagtgtagaatgaattctacaagattccattcctcctgatattaaatattaccaggcaccagccctgcccagggatttcagaggagccctaattcaaatggggtgttgatttttataacacatgtttgaatgtgtaactttcttgcattattgtttatttggttttcctcttaatttacctgaatttaagtttgagatgctaatgaattttttcagcagtgactgaaaattctgaaatttcagaatttaagattctgagtgtcaggtttggcattagagtcattttactggaatgaacaaaaggtggggatttggggaaatgaaatggaaacttgtttttgtaaagaaatttggcagtaaattgcctttcacaaatatactagtgagatttgtaatgaataaaacatgtatgtgttttaaaaatgcttttacttaaaataattttaatataaattttagtctataagaaatagcttatagatcactgaaatcatagctggaatcttatgtttttactctttccagccagatatttatccactagggttttgatatgaatctttgtcaaccccttatttttccagaaaactaaatgatcaaataggtttatttgaacagatgcctaaaacctcacaggatcattatattccaccatcgttttacattagatttgttatttacagaaacagtgggttttgccattaactaaatttgtcttcatttctctgtggtgtgaagtgtgaatctgtgtggtcttaagttttggctctctctgcttagctatttttttttctaattgatgttaatcacaaataaaggagaagaaaccactcatagaaatatattttttcctcttgcttgtagggacagtaaccctgtggagactgatatgttgcaacaatagatgggtagacatcctgtttatagattaataaatggatccttcaccaagttgccaattttatgggtgttctctatattaactctccaacaaatgatgatggagtatacktatttacatgcatcaagatgacataagtctgagatgattgaacaaaatatggctcagaaagaatgtgccaataaatattctcaatctgcaccaatgtagctcccattacaaataaaatatagatactgcattataagcaatgagtatcctgctttgaaagcaattatctgttaagctggaaagacagttttgtaaccaaatatttctgaagagtcaattctaatagctgatttgttaagagagaattatatgactctttttttaagccttttgatgcccctttatgaaatagtatgaccaaaatctctttgctctatttttttttagctttgaatatctctgtggccaaattatacattatggtagtttttgcatgatttattttaaacacacagcactcaaaaaagaacgttgcatttgccattctaaatgtccaaatggtttttgtaatcatggcagtggttctgattctcagttcaaaaggatacgggaactatggctgtaaaaaaatagaaactgtgcttgtgctattcccccaaatctctgtgcccttcagtccttttaactccttgtctccttttcctatttataatgccattcaatatttccatcttcagatttttcttctcctgaaaatcctgttaatacctgacttaaccactactaccctgtctgctgacaactacagaagcatttatatgccacccttggcctggccagggcctttgtagttgctgttcttgcttgtgaaagccttctacttttgtagatactataactttgacctaaataatgaaatgattagcatctttgtaaagaaggaccatagatctctgtgccacctaaccacaaacataccagctcctgaacaccttttctgacagctctctgcagatcaaatttccaacccattgactcttttgcagaaaataactaaattaaggtgttataatttagaacacagatggtctgctaaagttcacattaaggtagaatccaaattatttgaccagaagattttttcaaggagcattacttaggtctaatacttcgtacaatatactttggagaactttgatttaaggaaacagatccttgttttgggaggaagtatggctttataatttatatggtgcagtattcacattagtttttaacctgttaagctataccagtattcctaatggaagatgtcttcattctatttagagctggaagtctatatttaaattttttgctttacatatacctaatcatacataattaatatattcttggtggttatgcaggatgtgaactggatttctttactgcctgatattttctttgtaaaagttattaaaggaggggcaatgttgacagactaaacctttagttgtaattatgtgtaattatgtgtaaatatgtgtcatgtaactccaaagttagggaaacaaatgtattatacacttgcattgactctttcctccacttccatggcagacattgttaacagttcaaagatctctgccatggaactaactagaatgtgcccccatcatcattcttcaagcagccacttacagagttaccatgcctaccagtggccattccactgcctgatatctaaaatctgtattgatgatgatgtctcaccattagaatttttatggccataatttcaaagaataatagtggcaatggtatacatttcagtgtttcagacatggagaggaggagctatcagtctgcagagagagttcttgttaggaacatctgtttcagctcaggacagagtttagtgtttgaaggccaggccccactcttgtaccttcatgacccctccccagccccatctaactaggaaatgccaaaaccatgagctctggacaactcttttatcagtaaacaggaaatatctgtattgtaaagaactaaaacccattggtccacaaacctataaaagatatcttacctctgattgattttaattcagcagcaaaatttgaaagcaagaaatacttgggcaccagaatacaggactcagaagcacgttcttgaagcttggaaataggaccaatatggagctggaactcctgactcatcttgggagtctctgattatagagagactgccagagggagtggaacgaacatggactttacagtaagaccgccttaatttaaatcttgacaccattgcctactgctgtgtgatgtttaagctcattgagtttatttaccagggaaagttataatacataattttagcacctaggaaaattaacactcaataaaccttaatcctccatacagttttgcttattctaccaaggagtaaattatagaatataagtaaagtgaagaatttaggaagaagagaatagacagaataaggacagattrgagtctaattagacccatttccctaggttcgcctgactgctttcagaggtcaacctgaatggaaacttgactctccatcaagttactgtccccagaggatctctccataagatgtcgtttccatgctatcagttcagagaagttggaataaaatggttggttcatctcaattgatgaatttaaaatgcccaaatcttgttttgtattaagggtgttgtataagacatttccttttgattctgagattttcaggcaggatcgtggactcactaaaattatttcttttttccttggaagaaattaaaagggcagagtgggagggtatctttcgaggaatgctgtttttcacatgtcagttttagctattttggaggtacatgagttgctttattccaaggatcctggcatttgaagtcacacaaaagaaaataatttcaaactccaagaatataccaaaggtagaaaagtgagcctgagcagcttgccakaatttcagcagaaggcaaatctggtcccaatcgaaccaatctgttggtttatttgtattattacaacaaagcccaagattgaattcctcacctgaatcacttccttattgactgaatctatttagactcccctctaatttagcagagtattttttattaaatccaggcatacaaacatcarttatccaagctgcatctcatttccttcaccatttattttccttcgttggctgccagtggattagaagacatgattagaattcatcaggaaaataaaaacaacaaaaaagaaaaacagtttcacaaaaacagatgcttaaacaagagcaacaacattcagaattaaaataacctgtgatttttttaaaaaagtccttatcttggctaatataaacatgcttgcttgatttttatcaacctcatgcctgctacagtgggactaaattagcattcgtgattggaataggcacagacaaaacctaatagttgcacttactgtgcttcacgtatatgctacagtgtttttaaatacaatgcagtacttaactatttgcaataacctttgcaaagtagctggcttactstgaaagttttctattttttcacttccaaccaatgtcagggaggaaaaaagaacaaaacagagactttccttctatgaacttgttaaaggtaacaggttttgttttaaaggaatgttattaaagttggactcctttatgtaattggccaccactactgcctgggtacctttgtgttatcagtgatggcaagaaaataacacaacaaagaaagacaacgtaatgtctgaaaagtgttatcaaagatatatcaagtgacatgaagaaggaggggtgatggtatacttgccatgaatttgaggggaaatgaaccaaatcacatctgtgtcaggttagcaaactatgacctgtgggccaaatctggctcaccgcttgttgttgtaaataaagttttattggaatacaccatgcttatttacttatatattgtttgtctatgattgctttcatgctgcaacaagggtaagtagttgtgacagagaygggctcaaaaaacctaaaatatatactgatagagctcttaaaagcaagatgttgtcgatccctggtgaatgtcagtggctcctttatcattatccagctattcctaactgccctgcatgtgctgtggtgaaacagtgttggtttgaactgtaactgcttaatagctaggaaaccctaaattttctgagactcagtttatctataaaatgaaggttaaaaatacatttttaagcttattgtaaattcattgtagatgctcaataaatgttaatttccttcctgaccttactgtagtctgtgtaggtgtctcaaaaccaaaggcttctcaaactctttgtcatggcgttcgctctgtgagactctgcatgatttgcgagggggcccatcttgtttccatcactctacttctcaggccccagggacctgatactccagattctgttcagtttctcaaatgcaccacactcttttctgttcctccacctgtatacatggtattctgttgtcttaagatacttttctccgtctcttaatcttgatctacctgccctcttcccaactgcccttcagactctagcttaaatgtctctgcctatgagaggccctccctcaccacctggtgtaatataggtcctgtcctgctactcacataggacctagcattttcctccccttcataactattatcgtggtttgcagttttagatatatagaacctttttgtctaattttaaaatctttcttgctggcttagctactgcctacaagcacagggcacatagtaggccgtgaagaatatatattaaattaataactttttattgagcagtcttgcaatatttttatttcattaaggggactcaggatcatgttgaataaaaagagctgaattttttagactgacagcaaacaggctgcctaatttggcacaatttgtttctacctctgagtcttggttttctcatctgcgaaaggggggtaggtaatatctgtctcacaagtatatggcagagttggttgtggtaatgaacacaaagagactaagccatcactcattgtagggcttctctaggtttgctggcttggaaggatatttgacagtagataaagctgtaacccctgattctcccagatcttcacctcaatttggggatgattatacccacctcctgtgatactcatgtgttaaatgcgttagtacatatacaataattagaatactgagtacaacctgctaaatgctttagtaacgttaattatggttgtatttgtgatwgctattcatatatcaactctagaggattatgtacactttgccsagaaaaatacacattcagacaaaaattctgtggacagctgcgaagaattcactwttcctctgaaactcatagccctctcctgaatacatatggtgtgcactaacacttgccattatctgaaactcatagccctatcctgaatgcatatgctgtaggttaccacttgccattggaggtcttggaggccatatcctgtaggagcagggtagccatgggacttaactactattatcccccaaaaatgttgtgtttgtgaattcacctgactgaggaatccctaatattcatcagatattcaaaaggatccatgttccaaagaagaggtttagtattgatttttgttggtttgtttatttgagcagtggggatgatgtyraaagaagcttgataaatagcaagggctgtagctgttcttttttcaaagtttagtttttacttttaattgtgtactaaaatctgcagctagagtgtgttttgcaaagcaaaayacccagacatttgaaaaacttgtgtatggactgcctgaccacctgcacagctgccagagcaaacttgccttgggatcagctgtctgggrtctggggacccgggccctgtatctggcacttcaactgcctcattagatgatctttacttttgtaaaacagtaaatagcaaccctcataattctcacccgagaattagaaaaagcctctgttcccaaaagcacttgggatcttccgggagagtctctggttacttaaatagacctaacactgaattcttaaaaaaaaaaaaaaaaaaaaattctctttgccagggggctgggggaagataattaaaagttgctgttggtatcatcatggaacagcagttagtggttgtaaaatgaatgaacatgtgaggcacatattgaaaatttgacatgctttataaatgctaaataataataatgatgtcacgaggctttcatttttaaactgtcttaattgcattcccagtttgagattgcagattacagtagttaattatagaagttggcccagagttaaaccttaaatcagatttccattaaagtgcatgactgcagcaaattactttacagtgggagagaaggcgagaatggcataatctctggttgagtgggatcttctcaccacccagggtggtgactttcctcttagggtgctgtggtgtatcgtgtgtcctaaacaatcccatttccctgagctaagcagcctgcgtacttctatgtcctgttgctcttcttgtagaaatctcaattgctttgttagtatttgtcatactctttctgttcctctgtcttcctcatgacttctcactctcctttttgcactttctctctctcttattcttttgcgttctctcatgccttctctttactgcttcttgttcactcattctctctctctctctctctcccatgctctctcatggttgttctgtatttctcattgtctctcatgcactcactctcctctctgtccttctgttcccctcctataacttctcttcggcgtttcagggagcctgctttcaagacttgcgtcyacccagttctgaagaaggaagaggccaggcacggtggctcacacctgtaatcccaacactttgggaggccaaggcaggaggatcagtagaggtcaggagttcgagacagctggccaacatggcaaaatcgcctctctactaatactgcaaaaactagtcaggtgtggtrgcagctgcctgtagtcccagctactcaggaggctgaggtatgagaaccacttgaayccrggaggcrgaggttgcagtgagtcaagattgtgccactgcactccagcctgggtgaaacagtcaaaacgtgtctcaaaaaataaataaataaactaaaaaggaagaaataagaggatccaaattcccatccctggcatctggcacctgacaatcttggcctcacctgtatcatcttaacttacttcaccattcaaccattagttcctcagcgaactaagttgggtgacatatctgcctttatcctggctgctccctttatctcagatcctgctctttttttcttcctgtctactagaacctcacctattccaaaaatcctctgtcatgtcagcagcctgcatcaccgcctctcccytggtcttggctgtgtgagacatctgtagaccctgtatttgtaattgtcagtttattggtctggctctcaaactagtctttgaatcttccctgaggacagtgatgatacttcatccttctccatatcccaaaacttaattctgtacctggtacaagggagatgttgatcaagtgtctgttgaaattaattcattcattgttaaaccattatttttacgtgattatgccatatcatggattgtgctggctactgattattaaaaaaatgggaaaatacataatctttgttttagagaagcacaaagatgatccaaacacgggagttgcatcttgggatggggagaggaaggtaagaggagaataaagtacattggagaacaacagctattcatttctcagtaagtctaacaaaaccagttatccctctgcagttagaaaagaaggcttttcctggggttcagcaccaactaaagtagttaaattttaaccgcaagtggttatatgaagagtatctatttttaacatcggactctaattaaacacgagatactaacacatgagagactcatgggaactgatgccacctgaggcaacactgattcctgtttgacacttactccaggcactcacccactaagtagaattgaatcacagggtctcaagccccttctctcctttttgctcctatccctcactcctgcctgtttaggtgaattcacataagattatgatgtaaactatactctgtaaaatgatygtaaagctttagatgggttaaacagagtcagtgattctaatttaatgagaattccctgagaagttgacatccgaacttgtccttaaggaatatgcagactggaacatggcagaggcatgcaggtgccaatgtgtgttttactagaatgccaagttcctctgcacaaaccttactgagcctcagcaggtcctgagtttctatcatgkaccccatggagtcattcttgctcttgaatgtttttcttctattgttctggcaagttcctctccatyctacagttatttggaaactactgctgtaccaagcctcaatgctaacagcatttaatagctgtcattagaaagcaagcttctgcttaccagttgtcctactgtgaatagtaatgggagatttcttttytgggagtagccccaatctctaattggtttgaaaaatattgttcatttctttgattcttaaggcattacctttttgttgaatttcaataagtttgtatttccattatatttgaattcaacatgagctgcagtctactgaaaaaggttttcttacttgctctctaggtaacctgcccactttcatcaatgcttgctgaataaatgcaagtgtaaatacccattaagtacatttaaagccatgtggtaaacatttcacatgtattacctcatttaggcctttcaacatcctgtgggctaggtcctctttttattcccataatacagatgaggaaatgttcaagagaggttctgtaactcgaccaaggtcccagccctagcaacaacatcaatgaacaaatcagtagacaatctagggagctggctttgggcctggccacagccacatgacagctgtgtgaccttgggacaacatgccccaatgcgcccgatggctttctcagctagagagccaaccttcaccctacctaataaatagggttctgggaaggctcacaataaaaaataaggatttgtgtgatggcactttctaaacatttaaatgctatacaaatgtaagatattctcttctcatatgtttggtgtaggtaatttaacagacagaaataataggattctatgcagcacatatatatatgctttacaattagtgtggcataatttaattgtgactctactgttggaattttgatgcctccagcttcatgaacagccatttttctgtgggtgttatyaattaatctaggtaatgaattctcttcattatctcgttcttcatgttaattatacaggattttcttatgcctakttatcaagtcaggacaagtagagtttgtttttttttttttttggcccacatgcctttgaatatggaatatgtacaaacaagttaacatgatgggtgatgggtttaaatttacatttctaagaagctccagtcagtagcttgactttccttacattcttacttatgctataagcttggatctctttatttcgagagtctttttttaatcaaaaggttgctgtctaagataattaaactatctctgatttttgagaacatacctctagcatatcaaagaggtattaaggaagcatgaaaacatttgaatcttttttaccttttaatacaaaacaataaatggtttctgattttgaaatattgtgtgaggcaccatgacatataaaaaggcaattgtaaatcgtggaggaaaaaaacctaaatgcaagaaattttaaatgatactactcataaaaagaatagacaataatattttcagaaaaagaagacattatataatagacgaatgaatgatgattaaattcattttgagttgaaaagagtgatkgatgggaaaatttggtaatgttatattgtgatatttattaatttattactaatatgagctttcttaacatgttctgggccatttttgtattttatgctctgtataaaacaaaaacaaaaaaacgagcagtcttattttaattgtctctattatttaaccagttatttttgagactgttggcgatcagcattttgattggtaactttttatttttgatttcaggttgaagccatccttgtcaatatatttggtggtatcgtcaactgtgccatcattgccaatgggatcaccaaagcctgcygggagctagaactcaaggtgcccctggtggtccggcttgaaggtgagtcatggtagatttccgctgtgccagcaccccttctccaaggtcaggtgaccagcatgttctggattcacaaacttcctgagataacagaacgaaacactagattgtgtaagaygaaacaaacacagtacggcaggacttccctgggcctctagcaaactaatgtggcttttagctctccaagtatggcaggtgttatgattctccagattttgaaaaattaccccagagcaaaagcccttttatttatgaatcattttatgagattagtgtttggggaaaaacactctgagaaatgtttctctgagaatcatgcatcataactgaggatcccaaaaagctttggttttttggcttatatttgtcaatgtttattaattgatttaattgataaattaatttgataactgaaattacttggaatttaaaaaataactcttaaaaaataatttgtatattttatggtatattttatatatcayatgtattatatattttatagcaataaatattttaaaaaattttyagtaagaataatgacattgttttacaggtttgtaaataacttttcacatttagcrtgtctgtttctgcataaaatgttataacatgttttagttgaagtatatgaagaaaatctggcctcacagacatatgtgtttttcaaaatgggagtagttttgtccgtttgtttgtttgttagtttgtttgttttgagacagggtttgtttgttgcccaggctggtcttgaactcctggcttcaagtgatcctcctgcctcagcctcccaaaatgttgggattataggcttaagctaccacacctagccagggggagtttttaatgctcttttcatatagttctgaatattctttggtactacactaaaagtctattggtaatagtttattgaaaattagtktccatgtggaatctggaactatctcgatgaacttttcatattccattaaaacccattggtctgtgttacacattaagggagttttatccatgcatggttcaaaatcattcactgatgatccagaaaatttgtgattatgcagatcttccaaaggttgtctcatttcaatgtacaatataaaaaaaatcacatttgttaatattaccaccatcatattagaaaagctttttagtaggaagctgtcaagttcacagggcaggtgcacattgtctagaatttgaatttgactttatagtgcaaattttatcagccacaaaatggttaagttgttttccttgatgggacagactcacttcactcatatttaagaaaatgtctgccagctaaccaagtctgagcaactatagtgtgtcagtctttattccaagaaagaaacagcatttcatggaaaagtgagcagtttagcttgatacccagacagttgcacgaacacttttcctcagaacagttcaagatgctgcagaagtgctttatgtgtgtttataatttggtcacaaagagtatcaaacagatgtgtaatcaagggttgaggtttaatgaaataattttttttctttttttttattttattattattatactttaagttttagggtacatgtgcacaatgtgcaggttagttacctatgtatacatgtgccatgctggtgtgctgcaccgattaactcgtcatttagcattaggtatatctcctaatgctatccttcccccctccccccaccccacaacagtccccagagtgtgatgttccccttcctgtgtccatgtgttctgattgttcaattcccacctatgagtgacaacatgtggtgtttggttttttgtccttgcgatagtttactgagaatgacgatttccagtttcatccatgtccctacaaaggacatgaactcatcattttttatgactgcatagtattccatggtgtatatgagccacattttcttaatccagtctatcatcgttggacatttgggttggttccaaggctttgctatcatgaatagtgctgcaataaacatatgtgtgcatgtgtccttatagcagcatgatttatagtcctttgggtatatacccagtaatgggattgctgggtcaaatggtatttctagttctagatccctgaggaatcgccatactgacttccacaatggttgaactagtttacagtcccaccaacagtgtaaaagtgttcctatttctccacatcctctccagcacctgttgtttcctgactttttaatgattgccattctcactggtgtgagatggtatctcattgtggttttgatttgcatttctctgatggccagtgatgatgagcattttttcatgtgtcttttggcttcataaatgtcttcttttgagaagtgtctgttcatgtcctttacccactttttgatggggttgtttgtttttttcttgtaaatttgtttgagttcattgtagattctggatattagccctttgtcagatgagtaggttgcgaaaattttctcccattttgtagattgcctgttcactctgatggtagtttcttttgctgcgcagaagctctttagtttaattagatcccatttgtcaattttggcttttgttgccattgcttttggtgttttacacakgaagtccttgtccatgcctatgtcctgaatggtaatgccgaggttttcttctagggtttttatggttttagttctaacatttaagtctttaatccatcttgaattaatttttgtataaggtgtaaggaagggatccagttttagctttctacatatggctagccagttttcccagcaccatttattaaatagggaatcctttccccattgcttstttttgtcaggttagtcaaagatcagatagttgtagatatgcggtgttatttctgagggctctgttctgttgcattgatctatatctctgttttggtaccagtaccatgctgttttggttactgtagccttgtagtatagtttcaactgaggtagcgtgatgcctccagctttgttctttttacttagggttaacttggcaatgctggctcttttttggttccatatgaactttaaagtagttttttccaattctgtgaagaaagtcattggtagcttgatggggatggcattgaatctataaattaccttgggcagtatggccattttcacgatattgattcttcctatccatgagcatggaatgttcttccatttgtttatatcatcttttatttcattgagcagtggtttgtagttctccttgaagaggtccttcacgccctttgtaagttggattcctaggtattttattctctttgaagcaattgtgaatgggagttcactcatgatttggctctctgtctgttattggtgtataagaacgcttgtgatttttgtacattgattttgtatcctgagactttgctgaagttgcttatcagcttaaggagattttgggctgagacgatggggttttctagatatacagtcatgtcatctgcaaacaaggacagttgggcttcctcttttcctaattgaatacccttcatttccttctcctgcctaattgccctggccagaacttccaacactatgttgaataggagtggtgagagagggcatccctgtcttgtgccagttttcaaagggaatgcttccagtttttgcccattcagtatgatattggctgtgggtttgtcatagatagctcttattattttgagatacgtcccatcaatacctaatttattgagagtttttagcatgaagggttgttgaattttgtcaaaggccttttctgcatctattgagataatcatgtggtttttgtctttggttctgtttatatgctggattacatttatttattttcgtatattgaaccagccttgcatcccagtgatgaagaccacttgatcatggtggataagctttttgatatgctgctagattcggtttgccagtattttattgaggatttttgcatcgatgttcatcaagaacgttggtctaaaattctcttttttggttgtgtctctgccaggctttggtatcaggatgatgctggcctcataaaatgagttagggaggattccctctttttctattgattagagtagtttcagaaggaatggtaccagttcctccttgtacctctggtagaattcggctgtgaatccatctggtcctggactctttatggttggtaagctattgattattgccacaatttcagagcctgttattggtctattcagagattcaacttcttcctggtttagtcttgggagggtgtatgtgtcaaggaatttatccatttcttctagattttctagtttatttgcgtagaggtgtttgtagtattctctgatggtagtttgtatttctgtgggatcggtggtgatatcccccttatcattttttattgcgtctatttgattcctctctcttttcttctttattagtcttgctagcagtctatcaattttgttgatcctttcaaaaaaccagctcctggtttcattcattttttgaagggttttttgtgtctctatttccttcagttctgctctgattttagttatttcctgccttctgctagcttttgaatgtgtttgctcttgtttttctagttcttttaattgtgatgttagggtgtcaattttggatctttcctgctttctcttgtgggcatttagtgctataaatttccctctacacactgctttgaatgtgtcccagagattctggtatgttgtgtctttgttctcgttggtttcaaaaaacatctttatttctgccttcatttacttatgtacccagtagtcattcaggggcaggttgttcagtttccatgtagttgagcggttttgagtgagtttcttaatcctgagttctagtttgattgcactgtggtctgagagacagtttgttataatttctgttcttttactttwgctgaggagagctttacttccaactatgtgttcaattttggaataggtgtggtgtggtgctgaaaaaaatgtatattctgttgatttggggtggagagttctgtagatgtctattaggtccacttggtgcagagctgagttcaattcctgggtatcgttgttaactttctgtctcattgatctgtctaatgttgacagtgaggtgttaaagtctcccattattattgtgtgggagtaagtctctttgtaggtccctcaggacttgctttatgaatctgggtgctcctgtattgggtgcatatatatttaggatagttagttcttcttgttgaattgatccctttaccattatgtaatggccttctttgtctgttttggtctttgttggtttaaagtctgttttatcagagactaggattgcaacccctgcctttttctgttttccatttgcttggtagatcttcctccatccttttattttgagcctatgtgtgtctctgcacatgagatgggtttcctgaatacagcacactgatgggtcttgactctttatccaatttgccagtctgtgtcttttaattggagcatttagtccatttacatttcaagttaatattgttatgtgtgaatttgatcctgtcattatgatgttagctggttattttgctcgttagttgatgcagtttcttcctagtctcgatggtctttacattttggcatgattttgccgcggctggtaccggttgttcctttccatgtttagtgcttccttcaggagatcttttagggcaggcctggtggtgacaaaatctctcagcatttgcttgtctgtaaagtatttcatttctccttcacttatgcagtttagtttgggtggatatgaaattctgggttgaaaattcttttctttragaatgttgaatattggcccccactctcttctggcttgtagagtttctgccgagagatccgctgttagtctgatgggcttccctttgtgggyaacccgacctttctctctggctgcccttaacattttttccttcatttcaactttggtgaatctgacaattatgtgtcttggagttgctcttctcgaggagtatctttgwggcattctctgtatttcctgaatctgaatgttgtcctgccttgctagattggggaagttctcttggataatatcctgcagagtgttttccaacttagttccattctccccgtcactttcaggtacaccaatgagacgtagatttgatcttttcacatagtcccatatttcttggaggctttgttcrtttctttttattcttttttctctaaacttcccttctcgcttcatttcattcatttcatcttccatcactgataccctttcttccagttgatcgcatcggctcctgaggcttctgcattcttcaagtagttctcgagccttggctttcagctccatcagctcctttaagcacttctctgtattggttattctagttatacattcatctaaatttttttcaaagtttttaacttctttgcctttggtttgaatttcctcctgtagctcggagtagtttgatcatctgaatccttcttctctcaactcgtcaaagtcattctccgtccagctttgttctgttgctggtgaggaactgcattcctttggaggaggagaggtgctctgctttttagagtttccagtttttctgctctgttttttccccatctttgtggttttatctactttttgtctttgatgatggtgatgtacagatgggtttttggtgtggatgtcctttctgtttgttagttttccttctaacagacaggaccctcagctgcaggtctgttggagtttgctagaggtccactccagaccctgtttgcctgggtatcagtggcggtggctgcagaacagtgggttttcatgaaccgcgaatgctgctgtctgatcgttcctctggaagttttgtctcagaggagtacccggccatgtgaggtgtcagtctgcccctgctggggtgcctcgcagttaggctgctcrggggtcaggggtcagggacccacttgaggaggcagtctgcccgttctcagatctccagctgcgtgccaggagaaccactgctctcttcaaagctgtcagacagggacattaaagtctgcagaggttactgctgtctttttgtttgtctgtgccctgcccccaaaggtggagcctacagaggcaggcaggcctccttgagctgtggtgggttccacccagttcgagcttcctggctgctttgtttacgtaagcaagcctgggccatggcaggcacccctcccccagcctcgctgccgccttgcagtttgatctcagactgctgtgctagcaatcagtgagactccgtgggcgtaggaccctctgagccatgtgcgggatataatctcctggtgcgccgttttttaagcccgtcggaaaagcgcagtattcgggtgggagtgacccgattttccaggtgccatctgtcacccctttctttgactaggaaagggaactccctgaccccttgcacttcccgagtgaggcaatgcctcgccctgctttggctcgtgcatggtgcgctgcacgcactgtcctgcgcccactgtctggcactccctagtgagatgaacccggtacctcagatggaaatgcagaaatcacccgtcttctgcrtcgctcacgctgggagctgtagaccggagctgttccatttcggccatcttggctgccttccccaattttttttttcttactgtgagtatgtggtagtaaaaagtacaatgatctctcaggtgtagtgatgcatgcctctagtcccagctgagcaggagactgaggcaggaggattgtttgagcccaggagttcaaggctgcagcaagctatgatcatgacaatattctccagtctgggcaacttagcaagaccccatctcaaaaaaaaaagtacagtgactactagcacagtatggtgccactgccttgattccatgataacatgccagcggttttgcctaccattactttcaacctatgagtacaaatgccaacatagtcttctcttattgttattattactgccactattaactatgaaagtggtttttaccttaaggagcacccctctgcccctgcctaaagtgtattaggacgttttctctaaggtaaggcagtggatgtctaacatgggataaatttcaattactcacattatcctaggggtaaaatgaaaacccaaagggccaaatatagtagattatttacctggaaattgatatattcgatctaagaaagctagcctaactaatactttgatcaggtcctgtgagcctttgtctaatgtttacgtgtggtaaagtttaagcattaagaagwgttttttagacaatrgagcagatttgaggcttgacggcagcatgggattccctcaatgtcttactgggtttaagctgatgatgaagaattgaacaycaggaggaaggagcaagggggttctgcagggaaaaggkggagaggatgcgagtgataaggcaggagaggtgaaagatgtcactgtgaagtgaaactggtcctagtaaggacatgtccacaggggtcagtgaaggaggaaggagatgaagaggtgagtgggcactggtgaggcagagagcaaagtgatgaacaggacatgtagaaaatggagacctggagagtaagaagagaaaggacaatgagactcaaacatacagaaggacaggggcatgcactgacaaaaacatcagaccctcctccaagagccacgtctccaatgacagcagcaacagaacgacctcagacaggctgtgggtggaggtgggaaacaggtccatcttaccttgcaaggggacagggcttgagtaaagaatagaagatggaaaattaactccgtacagaacacacgttggaaacgagcagcggagagaatgcctaaatccagaaaagtgcaaagaggccaggggacatcatcagacacagaactggaccttggctctgctggggatctgcattcactctgcccagaacaattccaccactcagctaagggcccgttctcaatgtattctgggtgttagcagcaaatcttgggctctaatattctgaatgaaaatgttttcaaagctactcggcccacagtcaatctaccgaggctgcctttttgataggaggtaaaggcattattactgctctcatctcttggtcttagaacctagcataactgaagacttgaagaatgaatagccacgaagcatatgggacacagctgaaaactctatggctgcctctaaactctttaatacccaaaggtttctttctctcctccagcagaccaaaggatcacataccatcatgtagcgaataggagtgcaaattgtgtccttcttagcataccgagtccatgctaagaaggacacgatttgtactcttctatttgtggctccagtttatcagtatttcagaatcaaggataagaaagtgtccacccagaggaggtacagtgcctagtcaagaaagcgaaagacacagaatatgtttatgttcacaacaactttagagaaagtttagggaatgttagagagatttgtaagaatgaagggggtgggataattgtttttaaagacatttggcaaaagaaaaacaaaatgtttatgttgctgaaacaaaccttttggtattgggtggaaaataaaattgagaagatttggctaagagaaacggtatccagtctacaaattatctcgaggtttattattaatatattaagagctcaacttggagtcataatgaacacctgagaaacaagcatattcctcttcagacatatctgagacatagaagtttgctgcagatttaaataggacagtaataaaaggaattcttaaaaaattattataagatgttggtggattctgataaagaactgtaaaaccactcaaaacattttgtttactgcgtttggccaaaacgctttgtacactgactgtatagagctgtcaataaatgtacatttctcaacagtttcatgggttgggccaagttaaccgtctaggcaatttttgtgccaaggtttttatacgtttcaaaaaggaaaaaaaaaaaaccctcatttcagataatttgttctttattcacaccagaaacaattggttacaaaggctgaatttcccccaaatatgtagctgttcatttcacgcaagagtcttttgaacaaaaataatcctctgtctcagttggtgagttctgttctgataaggcaagtaaatacatgtaattataaagttaccattttcaaagaggagaataatcctttccttatccactggtgaaacagcttgtaattattatacagctgagaacaaagatttgtccacaaaatcccactacatcaagcctgatttgattgattaaaacttttctcatcaggatatttttaatacattgtgggtgggcaacagaatctttaaaatgtgggctgcatattagagagactgatggcaaggaccctggatcttctgaatggtcaccaaacaaacaagaaggccacttactttattcacaggaaataggtagtagttacaaaatgtgccactgggttttgaaatgtctgttatctggatcactgaaaatctcacagttcttcagactgtgataaacatgtggcagcgtgcctgaaacttagaaagtacttaataaatattagcaataaaaattatgtaccattgtaatccagtctctggtaacatttttccatcacatctcatttttagtgtcacttggctttgtaatagctactgggatgatggagacccgttttcacctcactctccctagctagacaatggtgtgtgttgtgggagtctgagccaattttaatattgatatgaataaagaaccttgagaaattcatccatcaaaacagagtatagtgtaatgtcaggtcaaatagaaactaccactaaaagygtccaaaatgtttccatctctttgtaccactttatctttctttgttcttgtagacaaatgaagacttgctctgtttagaaaaaaaaaacagaaggaaccaaatcatactctaaggttggataaactacaactaaatgtagagaaaattgtgagagaataagaatttatgttttgacatagaggaaagcaaatgaaaaatttagatggaagataaaagacatttcgcaaaggtccctgtagttggcaactttttctccactggaagtactgagaaccactatttgtgacaagatatttttggttttggttggtttttcattttcactgagctatctttgaaaaccacagttctgcatgtggtttatgaagggcctttaaaatgaccataacttctccatttgtctgtcacatctctccttggatggccccytgtattcatacatctttctccacatgcactctctccagtgttgcagcttcatctctgatcctctcccacgctctctattgagttccctttctgactttcccaagtccatcaactatgccatcattcttctggttcacagatttaaattccttagattccccttgttgtctcatctccttttctctctgctcttgcctccataccactttatatctgtggcaattctgcttgggtttttggttctgcctaatgtcattgactcggtacctactcagttttcccactctgttcttttagccgtaacatattgctgcaaagccattactctctccaggacatccttctgatctacccaggtcctgggcttcagtttttacctctgttacgaccccaataccaactctcaggtatggatgatgacttacttgatgactgacttctgatcctctacccactccttccttcttcctttgcaatgattcaattcttacctatcctccagactcaacttggaaattctccttttatactacttctttgctaactcacatctctaaatctactataactataatagtccatgttgaataagcataaaagtgggttatgccaatgaaagtgagcagagctacactaggcactgacttttgtcccttaaagggacacattattaggagtctgcatttccttagtctaaaaagcattggcttgatttgcatttagttccctttatggataataccttcttcaaatttctgcattgtttcacctatgatcagtgccaagaatacagttataacagaatgcttcatcttccctttattaggcatggtcaatacaatgttgggataggtcttgtcttgctatgggtctgctccattcacagaaatcacacatatgaatattagtgagtatccctggtastttcatgttgagtgtgagaccctgtatctatccgaggacgtttatcacacaagatgccaattcccacaagaggaagaaaaggacaccagctaggactccagaaatgtccaaagctctcttgctttttctctcttgataaagatcccagattcttacggtaagagaggagctataatagtggaaagagggtagtggctaagaagggtcactatgtatatttttctttgcataaatttggaaggcagtgccctctttgatctcatcctgagctatcacattcaattccttcatgatacagtggacattgtgaagttatcaatatttctgaagattcagcaaaccagtctggtggctgtctgggatcccctgatggctacttttactaagatagaagcaggtcctattagcagataacacttgttaccattttatagatattgtcttatgttgttagttttttccattttattttcccagccatctagtagctgacatttttttttacatctctcttgatcctccttaatgcctaaagttcattgacctgcatgcacatggtatttactaatatactaattaactaattaaaaaaccacaggcataaaccttggaagtacatttagttaaaagattcaaatctgatcatctaacaaatttagaaatgtcaaatcttcttcttagtatctcagatagacctctgatgcaatcagcagagaatattaaggaaaataatcttgaatgtggtattttgcatatttcagcatgaatatcatctgcgtattataaaaatcacttaattcttctggaatactaagcagagtatgaaaataaaagatgcactcctttaaatcttttgggaaaaatttaaggcagggtaactagcttttctcgaaatgtatgaataactaataaattgtgggcctctgtgacaactcaggcacagaaaggatccccagaaagaatgggtcaatcgtagtgtgcattcatttctagttatttccagtgacaaacaataatataattggctgatagagacctttccccctttaagaacaggagaagagttgactcttaaaatctgagggtctctgatcactttgaccctgaaaacagtctgacatcaacattttaatcagaaatacaccaatactgatgcactcattgactccttgatcaattttttttcattgtagctttgtcacttattttccttttattacttttattgggatcaattatgctgcatttacacttctaagaagatttaattcatcagtatgttttaatgttcatattaggctttgctgactggcgtgtctgccattttcatttttcctttgtgattattatttctattaagtccatattgtgcagatctaaacatgtgaggcagacagtctcagggaaggaaagagaaaggagagtggcagagagtggaagaagaaagagatacaaagagagaggcaagcacagagaacaacacaggctacaactgtttgggagtcttcatgtcaaaggatgggggtacaccagcagagtcaaaatatccttggactttttcttgagaaggtctccagggaattatggctgcaacacagagcttgggaaaactgagctgttccaagaatgatactgtaaatgatatggcttgcctctgtgtccccacccaaatctcatcttgaattgtaataatccccacgtgttgtgggcagcaccctgtggaagataattgaatcatggtggtgggtttttcccatgctgttctcctgatagtgaataagcctcacaagatctggtagttttacaaaggggaattcccctacacatgccctttcttgcctgccaccatgtaagacrtcccttgctcttccaccacgattgtgaggcctcctcagccatgtggaactttgagtcaattaaacccctttcctttatcaattacccagtgttggatatgtctttattagcggcgtgagaacagactaatacagtagatgttsactcagtggggctgcttgagtatagtaatctgagtttgttgatgaagtgtacaagacttttggatagttatcatattaaagtgtctgttattcaggtggataatgaggtcggagatcgagaccatcctggctaacacggtgaaaccccgtctctactaaaaatacaaaaaaaaaaaaaaattagccgggcgtggtggcgggcgcctgtagtcccaactacttgggaggctgaggcaggagaatggcgtgaacctgggaggcggagcttgcagtgagccgagatcgcgccactgcactccagtctgggtgacagagcgagactccgtctcaaataaataaataaataaagtgtctgttactgctgttactatggtgattctcagagtatggtccacagaactgactttctcactcctttgtgttttttcttggtccctctgagaccttctagcctctcaggaaggccatcctgatcccacggtgttccttaaaagtccagatcccataggtagccaacctaattagcttacctaatagccactgctcccattgttcacagcccatccagccaagccttggggttagggtctttgaagaggcccaacagatccttttccacctgggttctgatcccagtaagaaataaaatagactgaggaaacaaaagtattaccttcatcaccaaagaaaaaagaagtagttggaggatgcaccttattgtgtgaccaccagtgagcttccttactctaagccccagaattaggcagctttgtaaacccagtcacaggctccactagacttcagtgtaccttccatcccagggtggaacccaaggagcagaggatgacctggactcactctgagtggcatatccctaaaaggaaggccagaggaaggggcgggactacccatgccaactttctccattcaaatattcagtcagctccctacaccatcaccactcccggatggagccagtgataggcaaagagaacaggaggggttacactaatgactgtccctctgcatggaaggaaacatcccccagtgcacatcacaggtcttatctgccccaggagtgggctgcctttggtcgggtagctgccccactctaggcagtggtcatcccttcaggaacaagagcctgaagttgcttccctgagcagcagctgtgggtgtggccatttttataaggagaggttttaaaactgggcaggtaccaggactcgcatatcctaagtgctgccttatagtgtcagaacaccactgcgtgctctcgggtatcttctgagtgactagtcagttcatttcttcctgactcaatttccacttgaaagtcatatttgatgagccatcaaaaagagcgagcgagcacattgctatcaggacgagacttacaggtgattcagtctgtagtgtcttatagacgctaagtgtgtcccgctgagactcttccagagagcgccaccttgaggctgtcctgaggcagaactacctatggggaaagacttcatgagaaatgtttcagatgagggaagacagctttcatctcatgccaccttctctttattggcagtggctgcctgagcagtgctgtgccaagaaagattctgaggctatatcccagctcagtggaaaaagagttctatgatctttccagccacacatgtgggaaggggtggagggagtggaaattcgagccaatatttgccattgtcaattcaaagagaccataggtgggtttttttctcctagatatatagctgcttaccactatatcaagtcagaagtagggactgcaagctgggaaacaccagatgaagatgattcttgtcttcacctgaccctttagccacaaggccagaaatttggattgtatagagcaaaggtctacaaactttttctgtaaagggcaggattttaggctttgtgwctgtatattccctgttgtgattactcagctctgccattgtagtgttgaagcagcagtagacaataggtagaggaatggacatggctgtgtcacagtaatctttttttaacaaaaacagatagtggaacagatttggtccgtgagctatagcttgcagatccctagtgtagaaaagaggccagcagcaagacctagaattctggaaaatcctcacgttatctctatctaaatctcccttcccctaagctctgaaatgtctcgtgagagtcaagtaagaatttggcaggcaatattaagctctgagaatctgacttcttcccaaggaaaatattagcaatgaggtccactcagtcatttccccacgtaaggacagaatcacactgagtgacacagtgatgaatgtgattctgtcctaggcagtaatggtggaccaaagtcagcattttcgacaaaagtctcacactgttaaaattacctttgaaaatttcttaaatcatccgtaaattagagtatgcatggcttgaaagctaggaggaagattcaaggaaagcatgaaaggtaaattcacatgcagatgtttgggtgtataaaacatcccttctttaaaagaattgtcttatccctagcagatgatggcaggtgagcacagaagtgtaaggtgttcttgcttgccagagggttcattccattcttgtttaatattaaggctcctttaactttggtttagtatctatgttgctttttttcaagggttaacgtaattgaaagcataagcacgtagcatcagctctcagtgaatatgttagacttgatcctaaaccttgcttgcatgatcatagcacatacacaccattctttgaaaccgtgtagagaagaacttagccattggcttcctgccactggagctgggggctcctgctgtgatggtccgaataactatcacattcacacctcgagtgttgatttcttcttactgtgcgagaagaaatcatcgaggagattaggtgtggatacaatacagccacacagaatatcttatgtcatctttaatcttcataaaatgttaggggtacaaagcatttagatatgattcacattcaaggagaaatctaaagcctcaaagctgcagtaacttccccaggttgttcagctacttgggaacagaaccgggtttaaaatctcagcttcttcctctgcaaaatggaataaaaatagggcaactcyataaggttgctgtaaggagcagatgagtttttaaataatttgcaatagtccttggctcagtaaatgttagctatccttattattatctaaacccttgtcagtatctcgactgaggccacatggatggccaatgctgttggctgccaagcacggtgctaggtattaggcacatatcatctcaaagaaataagagctgctgacatagcagaagttttgcctctgattctcaatgaattattctgtttctgacataaagtaacaaggcaaaagagacatgaaaagttatctaaatttacaggtcaccaagaaaatggacctcctctatctaattgccacttgaaaggagactaaggaaggaggtgcaagggtacaggagcagtggacatttgaggaggaatttgctgctttagagaatttggcttgtttccactgaattcccctctcccagtggggagaaaaaaactcagttacttccagcagaggggctgaaatactttaggctttcgaggccatrctgtctgtgccacagcgactgactcctcccattgcaaagcgcaaacagccactgatgaagcaaatcagtttggctatgttccacgaaaaagttatttatggatgctggaatttgaatttcatgtaactttcatgtatcataaaatgttcctgtgattttttcctcccagctatttgaaaatgtaaaccctattyttaacttgmaggtgatacaaaaagaggcagctggctcaattttgcccaaaaactagaacttgccagccctgactcagagcactagaccaagaatcagacctgtcagggttaactggttgtttgatccaagcaaattgtctgacatctctgggcctcattttcctctagtgaattccttctagcacttaaaggccagctgcgtggttatgtggctttaccctcaggtgaacctgggttcaagtcctggctcagcctctgacttgctggggatgtcgggccagttccgaagcctcccagtgtttttgttgcctctcctgtaaaatggggattaaaatgatgttgactgcagggttgctctgaggattaagtttcatgatacttgtaaatcccttaactcatgtatccaacaaacatttgttgcacctaatatgtactcaataagtgctaactactgtattcttttttaaaaaactgaattcctattaaaataataacttttaaattacagtttctacatatttccagactggaaaatgattttcttcacagccttatgataaaaggcaggaggcgtctgcaccttgcgaacaaaatcctgtaccatgtgcccactacctttattttctcttgtgtgtaataaaagcgaagaagaaattttgataaattaaccttgcatctttgtttacagctctcttactccacccagtggcagaaagtcactggtaacatgccaaggaggtcacgaatttttaacattttaataattgttattatttataatatcccctagtagtagagcaagatttcattttaaactcattcccctttgattttccatttttaaggcctgcagtgggtagataaccatttagctgagtggctctcaacaagcagatattaagaagtgcctgaggttccaccagcatgagttgatcagttatctgtacaggtggttattaaaagtgttgtcctgaaggctcattaaaaagcaatgtagcatttaataaatattagaacatgtcagtagcaccatttaaatgtgggaaggagatcaatttcctttgtaattctgtgcacaggcataaacactctttagaacacttaattccatgtcagagtttaaagcagctatgataatttctatttagaagtaaaggcagggagagggttggggaatagatgtcagacacttggtgaattaagaagaaaataaccttaaatactcaaataatatcattttgcaaaaaaggaatgcagaaactcacagtcatttccaaggcttcctctaattcttttcttccttttctttttcaataacctgtttccactctctgctgttttacttttattttattttattttattttatttatttatttatttattttgaaaatagaagtgggtctcactctgttgcccaggctggagtgcagtggtgcaatcacagctcactgcagccttgaccttctgtgctcaagcggtcctytgacctcagcctcctgagtagctgggactacaggccaccatgcccagctggtttccttttaatccctcttctctgcgtgtccccacctccccttccagttgttccctcaacaggaaggaggaagcaagtggtagttaacgacaagggcagggtcagtgggcagtagagctatgccttcaaggagaaaccaggttgaatgctgcaaagagatggtgccagcatcagggtaggggctggtgtggaaggcacttggcaaactcatttttttcctttactttctcttattctctacctgtcttttttcttatgtctgttcctttttgagctattccccatgactctgtctcttgtctctctcttcatttgtctctctctctatctccctctctctctctctaccyccctttccccttctgtaacaagtttctacctggtcaygatggctctgcatatgacccatttctcataacagatgagcttcatatttgaatatgagaatcccttcaaaaactgcttagttctgagcatgcctagtatatgcttaataattaaggtggtaattaaagtgtaactgcaagtataattaaaattcacttttgtggatcctagaattatgaagcaattaggcattttcacatggcactgaaggagcagctgggaggagagaagggttgtggttttctgggaaactgctccgtcccctttcttccctggccctgtccaccagtgttagcctggagcaaggcctcacttgwctggggcacttgaagctgctacaggttgggagaagtggtaacagcttggagtcctcactcagggcagtgagcacagccagctcttcctgggcccttcccagcaaaaggagccactcccaaaacccctaggtaacygtgagaggactccaaaaaaaaaaaaaaatccctcctgattgcaccttgagcagtttgcggtatctatttcaaccctataggaaagggttgttaggacagcaaggagatctatcaaaaagtacccgcccactcctcttctcgtcaagcacactttgtatgtgggaatccatctggagttaccccgtcggtcagcacgtactgctagctaacggatattgggaggtatccagtaagcaagtctgacaaaggaaagtggatgtttrgaggggacgagggaagcatcagtaagtcatcccaataaggcttcatccatggtaagattttagaaatacaaggtgctccagaagttcattgtaccagcccctgctttagttggggcatggggaggtggtgattagaaagatatccccaaagaaataccatttaacagatgccttgtgaatgaatgggtgtcagcccagtggagagaggtgtcagcccaacagagctctgggtggaaagcccagcaagggcagtggcccagcacatctttgtgctcatgaatttctaaatcatttcttttcccttgggaatactggtgctaagttgggtgcaaaagaggatattaattaaggaactaaattatttagattacttggttgcaaggaagcacaactcattaaagttatctcaaaaaattaagaagatcaagagctcatttcatccatacacatgcaaaggaactcaggtaaaactgaataagaagttatctgaataagtgggaaccgtgrtaaaaaactagtctccagaaagagcaggatctgaaatggaggaagacatcaggagcgccactcctgcacctatctggaggtcttagagctgcattgagattggaaggtgctcaaaagaagaaaggaagaggaagaagggcctagtctacgtctctgcaggaggagatagaaatttacacatggggyacggtggctcatgcttctaatcccagactttgggaggccgaggcaagtggatcacttgaggtcaggaggttaagatcagcctggccaacatggtgagaccctatctctactaaaaatacaaaaattggttgggagaggtggccactgcctctcatcccagctactcaggaggctgaggcaggagaattgcttgaaccagggaggtgaaggttgcagtgagctgagatcacgccactgcactccagcctgggtgacagagcaagactctgtctaaaacaaaatttacacgtgtaactgtcatttaccttctggtccaaagactggtttgctcctgtgtccatcagggcttttgtttcacactctgtcattactccatgaaagccaygctttgattagtttctaaattccttagcctgctatctaacacctgccacagtcaaatgaatcaaagtgcacgcaggttgtgttaatgaaataatacatttttacatctgtgttacttacctatcagcacttaacaaattaccccaaaatgtagcagcttaacaaaaagaacagttattatctcacagtttctgtggtcaggaatctgggtgtggcttaggtggatcctctcactcagggtctctcacaaggctgcaatcacagtgtcagccgagctgtagtgatctcaaggcttgactagggaagaatttgcttccaagatcccttatatggttcttggccagatgcacttcctccttggctattagacccagagcctcagttcctcatcagccattggccagagtttgccctcagttccttgcccaggtgagtctctccagagggcagctcatagcagggtagtttgcttcatcagagtgaaaaaagagttaaagggagcaagactgaagccacaggcttttgtaacctagtctcagaagtgacactccatcacttttgccatgttcttatctattagaagtaaggctgtgggtccagatcatactcaagggggacggattctacaaagatgtgactaccaggaggcaagagtgattgatctttgaaaaccattttagaagctgccttccacagcatttacaaagtcatatgttagtcaaaataatgctagctcctgtaacaacagaaaaatgcagaaatttcagagtcttaacattatagaagggtctttctcattcccataaggtctaagagggtgagtgggtaagatgcttggctccagagagttattaaagtatccaggctgaaggagtcattgccatcttcaagaagtgatttggctgggtgcaagggctcatgcctgtaatcccagcattttgggaggccacggcagatggagtccttgagtttaggagttcaggaccagcctgggcaatgtggaaaaaccccatctctacaaaaaatacaaaaaatagctgggygtggtgatgtgtgcctttagtctcagctacttgggaggctgaggtagaaggatcacttgggcaccggaggttgaggctgcagtgagctgagatcacaccactgcactccatcttgggtgacacagygagagcctatctcaaaaacaaaaagcaagacaaaacacaaccagaaccaaaaaggtgacttccagggctgccccagctaggaacactccagaaagcagacaaggaaaaccgagtgtgaagagtccctttggagattgtcatggccatgtgacattcctttggcctgaactcagtcacatgtccccttcgagatgcaggggggcctgggaaatgtagtttctggctgggcagctgctttccagcaatagcactctactgcagaagaggagcaggagtctgtggtgcaaagccagccaggcctgccacagatactgcaccatttacaaaaatgcttttacactcatttcatttgcttctcatcacaatctataccatcagctatactgtcctcatttttcaagtaggkaagcagactagcatatctttagaacatgcagcgtttataattacagagaacagttcaagtcccatctctgacacttaccgcctctgtgaccatggaaaagttatttaacttctctgtgcctcagttgccttatctgtaaaataggaacaataggactactcatagtttttgtaaagatttcatatgctgtgtataagttacttagcactgtgcctggcatacataagcacttaatgatattagttcttgggaagattacraggatgatagtgctctgtatggaaacaaaagttaaggctcaaagaagttaaacgatttacccaaaactacataacaagtacatggcagagccagcatggagattttaggtagcagcttcccacattttatgctttcaccttccagagaggactttcaccagcttcctctgtaaaaacaggagtaggtgagccttaaggtgaagacacagtgccaagcggccatcttcactgctgcttgggtagacccagggtcccaggggaatcagtgctgcatcatcttttcaatccacccatttctatttaatccagcatttgcctctttatatgaaatgtgctgacccagtgcctstttttatctgcactctttgtggtaaggcaagttctccaaggcctatatttcaaggtctttgtttataaataggctctgtcttgccaactagataaaagcacaggaaatgatgtaggatgagatatttcattagacacttaaattctattacatttctcctacaggagttgttcactctaaaakggcagaaaagcagttctcatgttaaatagtccccaagcacacctwtgaatgaagtgacttggccagaagatactccagatccaccaggaacagtcaagagattgccatcagaggctgctttgcccgttttgaagggctcagcccatttcattttayagagtgaggagaaggcagaaatggacatgctggatgcgccagagtctccaaagcagtggatttgtggacatagctgggcagattctcggaacttcctttctcaaatcaggtcacagcccaaacccctgatgacgtcygagagggctttaagacarggtgacttctggtrtgggccaaaaccgcattaaatccacatggctgtgattatcagcagacaactcagcttccatcagtaaaatatgttcatttccctcttgcaagcccttgctttcatcttcttttctagctggaccacagcttgagataaatttcatcacataatcttttctgtcagtgaccttgatgagaacctatatttaattcatttcctagtgaaaagctgtagacaggtgagtcttgtgtgtccttgtgcaaacttcataaggcrccacctctagtttcattcagtgattgttccctgtccccyttctaggarccaacgtccaagaggcccagaagatactcaacaacagcggactccccattacttcagccattgacctggaggatgcagccaagaaggctgtggccagtgtggccaagaagtgatgtctttgtcctgatccaatggagaaagaaagccatttttccrtaaaaagggatggttcatcattgtgaaagaaatggttatctcattggggaagaaaaggggagggggaaggcaagaatcactgaaaaatcttaaatctgtgttttctggaataagatatctagacagcctaaatctgattttrgtytttataaaaataatrtmttgtgttctcatacttttctgtcactgtaagcctgcccagtaggcagtgttttgcagactttggggagtggtctatgtggccaaatattgtgtgtatagacagaatttgaaatcaagtcctgcttcatttacaagaattttggtgggcatckaatcctacataatgaaaaagaaaaacagaccatttaaaaactcagacaagattatatttaatatattaattactaaaaaggcayaagattacactgaacatattagctactaaaaaggcactgctaagacattcaagcaaatagctattacacactactgcagattttacaggtttctaattctaacatatgtttgaaaaatccgtgagtattccaaaatatatttaataatggaatatctgcattaatataccatccatgtgtttttaccatttgccttaatattgaatatactgtttacctcacactaaaaagaaaaccagaagccttatttgtgattttgggagtggaagcttccatttttgtgtcaaaaatgaatcctgattcttatggaaatctctgttattaagatatttcaagatgagacaacactgaagatcaaattgtgtttagtatcactatcttctctcctcgtttctctcttactcctcatcctcccagaatctaccagtttatggtagaaagatgggaaccttatttgaatgtgtttttttttttccatgatgtccaattttgttgtgggaaaggatttggataaaatttttgtttaaattttggtagatttttatctatacaaatttaaataaaattatgttttgtaagctgtaagatctgtgtgtatctctcattttactcaattttattcctcaaacattttttttttttacaaagacactagtcttagtgtcttaggtatgcctctaaaatttgataatttgggtcattccgggattattccagttccactcaactttatcagatacccatttctgtgttaggagattattgaatccataaaagttatacacaaaccagaaccccaggaatgtatctcagatgtctgacaggttgaactgtgatgtcagtctgcgtaacgcaaagggagatactccagtataactcattccattaagtgaggctcaattgccaccgttaattttcctttcagtgtataaatatgtagtagaccaaactattttgtttgttttttttaccagcttactttgttctcataaattttatgtgtggacaaaagtatgaaagtcattattgtttagagccatgtttgccatggagaaataaactattggatagatcagtcttacatcctttcttaatgcccatgcaatgaatgaagaatattaacaatgtcttcttagttgtgttttggtttttgatagcttaatcactagttggtgcagtaaaaaaaataacctatattatgtcaactagacaacatttttaaatttttgatctctgaagaggactatgtttgaatcacttgtaaatattgatgtttccagtcaacccaatttggaggaggggataaagcaattaaatcatttttgtgattatttcataaaagggttaataacaaggaaatagccttttattttcaaataagctcaaagccatcagagcttgttctttttgcatccttagcgtagcttgtctctaattgttttattctcaggcaggccatttttacaggtggataatggctgctggccattacatgtgaggttctcaaatttagcatcctcagaagagaaagagagagggagcagagggaaagagaaaataaatgagcaaataaacgaaagaaagagggaggaaggagagaggaaggaaagaagcttctcttggtaattctaagacacctcccaaaattgaatatgactccagtgatcagtttcaggtcagtaacctattcctgaatctggccccggttcatttacaataatttttgtggtcttctatacaataaatataggccataaaaaactcagacaagtttacatttaacatattaactacctgatatggtttggctgtgtccccacccaaaatctcatcttgagttgtaatcagtgtttttgattgttttggctttgagcttatttgaaaataaaaggctatttgcttgttattaacccttttatgaaataatcacataaatgatttaattgctttatcccctcctccaagaattaaattacaattcttctacattttattttcatgtctcttcctctcagttttctctctgaggaaaaaaaaaaatgtcattaagaattatattgttttttaagtgcaaagccttgataaaaattagaaggaatattattttttcacattactaaagtaaatatttgaatgtttgattgtgatcatttgtagaatacactatatgttcaaaattaaaataagcgagaaaatatatatcatagtggggaaggaaacaatgtggggaagtgaaaaggatatgttctttcatatttttctagatctggagttggcaaactaaggcccaagggcctattttagtaaattaagttttattgtcacagacacacccatttgtgtgcatgttgtctgtggctactttcatgctacacagcagagctgagtagttgtgatagaaaccttatgaccctaaaatatttcctctttggccctttacataaaaggtttgccaaccccagctctagataaataaaaaaatacaacattgcccccaaaatgacagcaacggagtattgttttcaaacctgagaaaggaagatttagatattaaagtgaaacagaaatggaaaagtaggaaataagatctttgatctttccattttaaaccctgtgagagctacaaaaagtctacaaaaggccacttgccaatgaaaaccaattcagttttgttactttttgtctttccatcaccacaaggactgtctgcagtagctccttgcacttttgaacatatgctgttcctaactgctcacaggtgcattggaataataccaaatcatggctatgaatattaaactaccaaagggctgcacctatcaactaactcatcctcaaagtgatccttgctagtaagtatgtcatgcattgtttagtcttggaaagactaaagcaaggaaaaaaaagtaactgcagtgtacttgatccccaccacattactgcaaaggcagtatccattttaccagtgaggaaattgtgacaaagtgagataaagttgctcctcttgagtttcgtagttaatggcaaagatgttggcttctggactttggattcttgtttaattctatcatttcttctattgtccagtaaaactttctgtatgacagcaatggtaaatatcagtgctgtccaacatatagtcatccatcacatgtgactattgagcatcctgggaactgaattttaaagtctaatgctaattaattgacagccacacattgctagtggctgccatattggacagtatagctctctggtctaaatctcctgagtattaggatgcgttactttcacttcagagaggctcacattgattaagtgctttctgtgtgccaggaactttacctgtgctatcctaattaatcctctttagcaactctatgaatctgtcattgttgttttactggtgagaacattgtaactccgagaatttaagtaacatgaccaagagcacaaaactagcatgtggcgagtcaggattgaaacttggtcttctgagtcaaaagccactggtctttgttttgtatctatggggacccaaattcactaaggttatgccacttatgatcatttgaaaggatgttggaggcaaagacatttaggaagctgggttcttgaatgtattgcttgccctgtgtatctcatactttgggaagcaggatttagaagcagaaagatcaccataagcaactggcaggtcatatggactacaatgtgaatggcacctccgggacttgcacaaggcataaggcaagggccattttctagggatctaattcccaagtgtcttctctttaactcagtgccttcccaacatctataaccatgaccatccaaaagacaaaaggcagaggggcagaagagataaaggctggaggcagttttatcatattaggagaaaatttagtttgcagcctttacccttcttctggagaagtttaggtctggcagtcttatctcatattttcatattctaagtaagccaggagcaattcctaggcaccttatgccaaatttcacaaatccaaaattaattaaattgtatatgccagctatggggaaattgtcaggtttttgttgttgttgttcttgttcctcccttgtgtttgtagaggcagcaacatacaggcatgtttattgggagctctcctaattcctttcctagctagggaagaaaaaaatgaaagtaagccatgatgtagtagtcattaacacatctgttttcaaacatcagacaacgggagaaactagaagatttggagattcaatttggagttttttttcaattaccttttaatattgaacattcatgtgctttaaatccttataactagttgccctgagcaaaacaaataatttttgaaggaccttgtattaaaaagcagaaacgacatcacaatgataaatcgttttaaataaataaatagccttgtattaggaatcacatacagcacatacagtagtcctcccttatccatggtttcacatttcagttttagttacctgtggtcagctacagtcagaaaatagattagtacagtacaatgaaatgttttgagagagaccacattcatataacttttattacagcatattgtcataattgttcaattttattcctgtttgtctcttactgtgcctcatttataaattaaacctttccataaggatatatgtctaggaaaagacatgctatgtgtagggcttggtactatctgtggttttaggcattcactcgggagtcttggatgccctgcaggtaaggggggattcctgtatattaataaaagtattggttgggttttatttatcactcttcatgtatatgatctcatggatacaaacaggtgaccttgccaattggtgctttttgtgtgtttaagaaaagaacagtagtaaccttgctccctggataccaataaaaaatctattatttttttaaaagaattttggacctctagttaaaagatcattgtttcccaactgcatgactctatcttgaaacatttacttattgttctttattaaacatatttttaattatcctatgttttaaataatttcttccaagattgcttcctttcaagagaacttttaaacattcagttaaataagaaccctttaaatttctgttaattgtttcaaatgttacataatttgtatggacccattgacagttgtaaactttcagaatattgcgtgtgaatttcaaaaaaatttgtaaaatattcgcatacattgaaattcattaaactatgttttctcatacttttattttttataaaaatctagtattaaaaataaaagtattaatattcaagtttgacaaaaatataagaaagtagatactcttcattaatttagtatttactatgtaatcagtataacgtttctggaggtcagttttttagtacagattaacagcctcaaaaatgttcatagtgccacttctttagggtatggaaatggcttctgggtaggaacaggtgaaacaggaaaacagaatgcctgggctgatctatgtgacagaagcaaaggttgaaatctctgtgctgaaagccagtgggcgtcttttcttctcaccatccagagctaataaatggcaacggcatacgcctccaactaggtagatgcttagcaaaatcacagaggagacagcatggtgcagctcttccaaacaagactgcacacaggcccagcggaacggctcccatccaccctctcctttcctccccgctacacacaacacatttccaccaatggcacacagcctcaggaaagtattgcatatgcacttcccagctctcagggaggtagacaactgatctcagataaggagatcagagagaattagcacacaatatatcagaacaaagagaaggtagacagctgctgtgttcatcatgaccaagaaaacaagaaacagaaacaacatggcatctgtgctattcagtaaaggaaagaggggtaagccaaaggcagaaaaacgaaggcaccacccataatagacaaataatcccttttggaaaaacatataactgaagaaaaacattttttaaatccctaaagaacctattcgtgtaatacttaataaaactattaattcagttaataaacaaaaaggtgatcaaatactgacataaaaacagaaaaagaagaaaagggaggtaagaaaatcagtggagaaggaggaaaacaatattcaagaactgaccaataaatcacaaaaagtaatgaatcctaaatatattgcaatgcacaggagagcccccaccctcagtgaagagttttctacccaaaatgtcaatagtgtcaaggttgagaaaccccaatttaactacatttactaatttaacataataaatgtgggttacggattcattaaaatgaaaatgccagccgggcctggtggctcacacctgtaatcccagcactttgggaggttgaggggtgcagatcacctgaggttaggaattcgagaccagctgggccagcatggtgaaacccctcctctactaaaaatacaaaaactagctggatatggtggcgggtacctgtaatcccagctacttgggaggctgagg

SEQ ID NO: 93306 - DNA, 27055 bp, Homo sapiens
gggaactagtgtttcaatttttatgcaaatgtttctgatataattgtgtggctttgaaccatgagaaaagaatataggattcggagttgacctaggctgagatctcaattccgccccatatgaatgctgtgagcttagacaagttcatctctgcaccttcacttccatccataggtgtcataacctagcggatgttgtggtcagccatgcagatgccttctcaggtgcctcctgcagctgcctggcactacctgctgctggctcgcagtggaatcctctgcaggaaggccttggcagaaagaagctgccctccccagcagtaggcatcctccctcagggtaggcacccaaaagcagcctgtcccagaagactggtccatgtgagacacagaggcttggctctgctgcctctgttttactgaaagactatcccagcctcagcactgggatgggataaggcctttaactatgcttaattacaacacagctctaaacacagttcacctgcttcctctggccaatcttgcatccctcgctcccgtacagatgttgttctctgggagggctccccagaaatcttcctgcccacaacactctgtctcagagtctgtttcctggggggacccgacctcagaaagtagccaggctgtagtcagtgaaatatgataaggcgtgtataaaggcttagtgcagtgcccaactcacaggagaactcaattgatgacggctgctgggattctccttggaggtcgctgtttctgaaccctgatgaacattgaaatcagctgtgaagcttttttttaaaaggccaattttttcctgagacactgattcaggagggctgaaatcagacccagtgttctgtattttagaaaccccacaggtgtttctgatggacagccagggccgacagccaatgacctgggtcatttttctataccaccatcacccctataatttacaggcaagaaccacaaacccatgcagggcaaagtgacctgttcaagggcagacaggtacttagttgcccagagagggttcaactcattaatcctgattctctcagggtcaatgcttgggttgtgtgtgtggtggggggtgctataaaagcccctgatcccaactctctccaacataagcacaggcagctgcatttattaagcagatcccagaacatttggcctaaccagcaatacaagcagtatgtgatcaaccattgctttcactagtgcaggctgtgagctcccagaggaggagtcctcattgtggctgtggtagtcagggaggtcttcaaggaggaggtgagccctgaaccagattttagagaacagtgaggcttcaaatagggagcaagctgtaaggatgccagaccccaggactggtcacctcattctgtgttcaatccgtttctaaggaaactaatcctgatctgtattctcatcatccttctggcaagaccggggatttcaggagcactcagactcatggaccagtgggcaataatttcccaggttttacaaaaacatattttgttctaaagattaaaacttaggtaagggtttgcttgaagtttgattaacctgcacttcattagccccatttctcttaagcactggagttgcacagccatgtggtcacatggtgtggttgaggtggagctcaggctctaccacttataagctgtgtgaccttggtcaagttacttaacttctctgagcctctatttgttcaaccttaaaatggaaacagtgatacttaccttcttccctctctggattgttaagaggatcaaatggggtcatgatctcaaaaaaaaaaaaaaaaaaaaaaaaaagcacttctgtaaatgtcaaagcacactacaagtgagagctgctactattttccacatttatcttttgaaacttgggatgcagaagcccagggaggtttctgccattgctcagcaccctacagtaagctatatggggagcagaggcaagaccaaattcccccaaatcctactgtaatgctttttccaatatagcagcatatctattcctcaaatctttcttctctctctaatttcttaggcactacagggaattgtgcattctcaccttgccctaaatttgtagtctttgatggctcgtaatcttttgatcccttctgcagcagcctgctatcctgtgcccttcccgcctctatatcatctcaaggggctttctgtctatactctctttactttggacatcctaaattcagcctggaacgagcccccacccagawgatgataaccccctcctccgtgggactctttcctctcatttataacactggtgcaatgttaccttctgattcattcacagcaaggaacttgggaaacagagtcaaaaagtagtctgtaaaagggcccttgagggctcagcaccagcccttgctgggcagcatgacgaggccacaatggagtggggcaaggcgtctcctggaagctggggctggagggctgtactctgatccccaacctctgctattcctctgtcccgatatctctgcctgatcaactaaatcctcagctgcagaaacctcctgctgctctgtgccagcctctgggtctctggtgccaaacccttggcagccccttggctcctcactccattcttcccaccagccctgcaccccctctccccacggagacccctccaagtccaaggcccagctcaggctctcgattccaggagacaggtcatgtccaccaccccggggtgcagtgcgagccaaactaatcaatggcagagtggtagattaaggggcccagctcaaagccatccatcactgtcgtttacccgggcctgtcagcctgcaaatggaaaaggagatgatgtgaaacaacccatctgcaggtttttaacgctctttacaaattgccgtggtgaataacttgttgcctgtatttatcccttttcaaattgtctcttagctacagtcatccgtcttcattctacaccctgatggtgcgtgcaccgccagttgggcaacctcattatttccctgctgctgctgcctggaggaggcaggggaggaagaaagagaaggagaaggaatggaggagagagaaagaagagaaagaaggtggagggagagagaaagaaagggagtgaggtgggggtgggagggtggtgggagaggagagactccagacagtggaaccagcttgggcaagaacctactcagctagggttcttccccggaggtccccacttccctgagctcatggtgagagaaaaacctatcccctctgccaggaagtttgtgagcagggactgtcctccccagagggtaccagatcagtggtcagaatttccagtcccaggtcatcggctgtggtccttcatcattcccacctctaaggaagaaagcctatctgccaggccagttgtaaagcttcatcatgcaaagtcatctttcatgtgtccccttcctcttcccacatgccacgacgtgctacttctagctttccaatgagacccttccctgtgctttggtttccactgccctaggtctgactgacattccttcctcctcagctcggggctgtagcctcctgcaatggactgaatgtttatttcccccgacaaaatccatatgatggcatccttacccccaaggtgatggtattaggaggtacgggtgattaggttatgagggtggaggccacatagatgggattagtgctcttataaaagagacctcagagctcccttggcccttccagcatgtgaggacacagaagtccactgtccatgaaccaggaagtgggcaagtgtcagaccctgaatctactggcaccttgatcttggacttcccagcctccaggaccatgagaaataaattgttgtttataacctgcccagcccaaatggactaggacacctcctaactggtcagtctctctgccagcccacctcctcactctcaagaacaaatgaaaaacttctcataaaggccatgttatttcttcactctatcagtgtcttccagtgatccgtgagcctcctgtattagaatcacctggccaccctgccccaggactactgatgctgtgaggcaggggctgcatgttacatgtttcctagctggttagtgtgcactgcaaaggtcgagggccacaccccagaaatttgttttgacacacaagaaactggagacacagaaagatgcaataatttgcccaaggtcacacagctaattggcagctgaacaggaaccagtaaacaggcctcttttcctacaatcaagtgctcttcctcctataaacagttagatccttccatgaataacagttgtttgtttatccaactctgactcaaacagaagctccttgaggccagggtcccatgcgccactgtacccctccatcctcctccaggcttagcacagggtttattggtttacttttggtaagacagaaaagtgtagaacaggatgcatcaggccaagaccacattgaattcttcctccagggctcttgcagggttcagagcctcccacttcttgctagggtactatggaccgaaccaaaatctgcctggctgtcaagtgctgagtttctaacactgcatctgatatttccactcagtcttccagggcagacctttaaatatttgaaaacagctgtcaggatccatttccgtgttctctcttccaggttaaagtcccaagctccctcaaccactccttgtctggcatgacagcaagaccctggggcatcccaggccccctcctccaaatgctatcccattcgtcaatgtccttgctcaattgtggctcccagaatgaaacgcaagtctccagatgtggtctgaccactgccaagcacagagggccacaccattatctcccatcttctgcactctgtgctttgattaatatagtccaagattgcattgctttcctggcagcctcaccccactgttggctcacattgctcttggtttgctaatccatctaactctattactgtctaatccacaattctccatctcgtccctgaggattacatcagagtccttacaaaatgccttgctgaaatccagatatgccatgttcatcgtgccctgcacgtctaccagtctagaaaacccagcagccggagaaaggagtttattgtggcgggacttccacttggtgaacccaagatgcttcctagtgatcgctccttttcttcctacgggttcatgaacgatccactcaataatctttcttttttctttttttttttattatactttaagttctagggtacatgtgcacaacgtgcaggctcattacataagtatacatgtgccatgttggcccactgcacccatcaacctgtcatttacattagatatttctcccaatactatccctcccctggccccgcatcccatgacaggccccagtgtgtgatgttccctaccctgtgaccaagtgttctcattgttcaattcccacctatgaattagaacatacagtgtttggttttctgtccttctgatagtttgctcagaatgatggtttctagcttctttaaagttcatatggaaccaaaaaagagcccacattgccaagtcaatcctaagcaaaaagaacaaagctggaggcatcacgctacctgacttcaaactatactacaaggctacagtaaccaaaacagcatggtactgttaccaaaacagagatatagaccaatggaacagaacagaggcctcagaaataacaccacacatctacaactatctgatctttgacaaacctgacaaaaacaagaaatggggaaaggattccctatttaataaatggtgctgggaaaacaggctagtcatatgtagaaagctgaaactggatcccttccttacaccttatacaaaaattaattcaagacggattaaagacttaatgttagaaataatctttgtttagtgccctctacagtgcttttctcacccaaggtgcttgctcagtgtctggactgagcaatgatgacaggcggcctgattgatcatgccggttgtgaggtttatgctagtcaacaggagctgcccggggaaaagcagagaggggagtaagtccaaaaaccacaaactcagaaatgcccatggaggttgtaaacagcttgatagagggacgatgagtctctgggttagaaaatttattaacaatgccgaatgtatttcactctccctgcatgatgtttgattcaaagaaaatatgaaaacattactggaatcccaattttgccaaaccatttcctttctcctataattaggtactctgaattttagtatcattttgtgtgtgtgtttgtttcttctgatttccacggactatttttagaccaatcatgactcattttttgaaaggcgttaggaaaaaataagtatttttccccagcaatcaaatgttcctgtcctctgggtgacacacatttaggtaagtcatagctgtgtgacagactcgcgggcctggggcagsgggaggagagcccacaggagaaagtctcctgatctggggggaggacacaatgaggggaggatcaacacaggaaccttcagcccccagccagacccactgattcatcccaccctgtcctccaaagagggagatagatccaggatccaggagggcccagccacaggagtgcagattgcaccaggacgatgccggagaggcatcccagccttgaagagctgccccgggagagccatcaggctcattattcttcaagcagaagcaggagggacatgaacaagtaagtacaactagctcagaaaaagaaagagctaacgatgagatattcaactgtgggatgaactactggacaaagtagtgagctccccgactctgggagtgttggaactaagctggttctttccaaacctcgatgtccaaagccccttccaatgctgactctgtggtatctgccagggaggctgctggaagaattcctgctataaaagagaaactaagtcacaatgtccaaagtctcgtccaacatcaggactctgggaagaatcagacccctgcatctatgtctgcacttgttccccaaagcagagacaacatggggagggctggggggagtttcacctcctccattaggccttcctgctgcgatccatctggagggggaagtctttgaatgctctcccccagcctctgccacagtaacacatacccttcccacctcccacatgaaaagggttttacatacaatttactagctagacacggattcattttccaactccgtttaagtactcagaccttttacagagactcttgtagacccagttccttctttctgggagtttatactctaagatagacctgctgaaactaacaggtgtaaaacacactgccaacaacagcaacacaaacctgtatcaattcaatgtccctggatgtgagagacagagaaaagaagagagagaacatgtatgcaggggaggggaaagtatcaaatttactctgggctgtctctaaactacacatgccctttccttgcccactgagagtctgccatgctcccctgccccaccacacaacatttaagaacgcacccacatggagggccaatgttacatgagaggagcctcagaaaggtggagaacactggaactttacagtttgcaaatccctctctcatccattactcttggattgtccattcattcaccaaagatttatgcagtacctactgtctttgggcactgagagtacaagagtgactcaaaacagacatgtttcctggaagctcacatgaagctcacagcctggtggagaaggcagacactcgtaaacaatcacctaggtgtaagtgtgcacctacagtactctcaggtgagtccagcaatggaaagtcatttagtgctgtggagtgtgtaacccagggagctgacttaacccggggctcaaggaggacttcctggaggaggtgacatttgagttgggatytgaaggatgaaggatgggtaatcaggtgacaagaccgagcctgcactttggaggtctgaaagatacaatctccctgtgaagggcatgcgtggttcacccaagaaacatggagctcctacacacatgtcaggtgctgcagggcactggagacacgtggtgtcccagatagacagcccagccctcctgatccttcagttttcagtctagaatgggaggcagacagctggaaatgtcatgaaacttcagggtggtcagtaaagtgctcgtgaggaaaattgcagggtgcagacaaaatagatggccccacctgggccatccttaggagtgagaatgaccagacttgatggctacttgaatggggtggggaccaagggtaactggggagggtgaatgagaagtatggggtttctactttggatgccaggtacatggggaagctgttcactgaggtggggaatgtaggagccagagtactttggagcacaatgcatgagtatgatttgggcatatccagcctgtcccaggtctgagttctcctgaggacaggatgaagaggagccaaggaaggattctaagaagagatactcattaagcttgatcttgaatggcaaatagcatggaagggtgaggaaggagtatagtcaagaattccatggaagggccacagcttaggcagacgcctgtagcatgaaggagcaaggtttgtttacagaactgcaagtggccgaacttcgctagggtagaatggcacacagtgtggacggagataaggatggagagccaggcagggggccagaatgctaagaaattttgactgacttaaaggtaaagggagtcgccaaagggttttgtgaaagaaaatggcatggtcagatttgtgctctgaaaattcatcactgagtctggtcggctaaccaagggcagcacagcggagcaaggagccgcaggaacccagagacactgcgggccctgctggtgagaacgggcctcccatgggcctgggccctccactcttycctacaggatcccctctccccagacctcctctgtctgtctgtctgtcttgcccaccagaggtctgggtggccctcatgaagcagtctcccctccgttgcctgtataaggagggccccaccagagtcagccagggaatccagtgacctctcacagtggcctgcacacccccgggatgggcctggggtagagagccagcggtcagcacaggacaccctccttcctccaggagagatgcagaccccacgctgggaggaggtcccccatcactctctggaaaaaacccaaagtgcccagttacattagaatttcaggtaagtaatggatcattgtttagtgtaaatatatctcacatattgtgtgggacatacctatattaatccatttatttgttgcttacctgaaattcaactttaacgaggcakccggtgacccgctccttggctgttctatgagggttgggaatcctggaaaaggatggggggaatcatggagaaattaattccccaatagccagggcccagcctacagctcctcacgtccacccggtgctctgcaaggtctatttagggggtcccygtgctccctggaaaccccaggctgtggcctcagctcccacccaccccatatgaagcaccactgccggagctcccccacgcccactgtccttggycagctcactagcagcgctgctcctggagagttgcagccaatccaggcttcagccctgtctccacccccatccctgctcctccagtctgagaatccacttcctggtacgctttcctctgccctcttgaactggagtccatttgctttcactcagcctgggtccagatgctttcaatgaatgagaacttctggtcctgcggttttgattccaatctggaacattttctttcaaagcaggagcaaggaaatagctgatacctgcctttctctttgtctaccctcacagatccctccaaatgctatctttgcccccacccaggtctctcctgggttcccagcctttccagggatccccagccccatgctgcctggctgcaggttttattacccgtgctgccctctgctcccgcttaggctaattgaggctggcacatgagtaggggctgccaatgggcttcctctgcacgggctctcagccggcagaaggaagggacatgattgcctcctttcccgaccattaagcggagcagccaacaccacacacagctcctggctgagcagcagggcatgtggaccagcargggacatgggggctgggagttctcctaccccaaccctgctcagttagcaaaggcatcaggggctgtggctggctgagaggtcagggacaaccaactgtcagacttcctgccagaggctcagcccaggctgtattcacatgtatcccttccagcagaccccgagggcctctgggaagagtccccttgctcctggccctggataggagatggggagatcggctagggtagcccagcccagggactctgagggggttctcatataggataaagaagcaagggtcacccactcctggaacactgctctccctctgcactcccatgaacccctatacatatacatcttccagaatttgtcttaaacttctcctcctctgggcagacctctctgatgtcccaaacgaagtcagatgtcccartacatattctcacagcaccttgagcttccctttcttmtcactcatcaaaattacaattactgcaataagggatggaatgtacacacaataactcrgattggtaggacaaagttactttattttccatcgctgaccacttcttgatccaggttgtccatccctgctcacagtttggtgggtgtgggggtcttaagggatggagggggtggtgatcaacttaccattaaacagtaattccatttaaaagtcccttttagcactatttcttccatcctccttccttggatggccttgggatgggggaagtttgtgtctccttgtggtggccagggcagggcccccagcccacctgctgtcctctgggttattgtcagcctccatgagctattcccctgggccacctatctctgggtgtccaacctgttgccctctggctgcagctgatcttttctgacatcggatagcactcccagatgaggtcccagcctctcccaccatctgccctcacgtgwcctcctcatcctaactccaggcctgtatgtccacaattctttcacacttctgcaatctcccctctgagacacacggaactcccagatcctctgctgtgttggatacagggcattggcagccaggaacactgattaagaaccgccctgcacagctccctcaaccagggctgcaccacgtctgacccaggkccacgccaaacccggaccttctctgggaggtttgtcttcatctcaggccacacacagaaggcagtccacaagccccaatattctcaggtcccccacacctacctgggaatatttatttctcacctgtccctgctctgaagtttgacccagtgagggtgacatggaggaagaaggaggctcacagcctcccctacctcccaagaagccaggaagagctgtcccattcctgctgttggggkatccctttgggtttcccaaaatgcttcctgtacagcttgcagaaccctgagcccaaatatacctccttttttaaataaattacccagcctcaggtatcactttatagcaatgcaaacggacaaacacaaagccctagcttaaagctatgcccaggcctccaagcttggtgctgctgatgcaaagagttgtttcataaatgtaacaaaaagcattttatctctacaaattaagctgtcaagaccatggtttcacgaaggccttttaaaagccacgcagtgacctctttgttccagaatcactcagtttcttttatgctttcttgaatatgaaagaaaggtgaggggtgacagctttcaaactcagtttttaaaataaccttagcagctcactgcaaaggtgaaccattgctcacgtgcaactcgtgaagaagaggtggtggatccctgaatccggtgataycccaaggccctcccagttctgccagtcagtggtggttatgacctagcaaaggagcaagatcaatatacaaacaactgcagtgtaaggcagggcccatcgagtgctacagaaaggtgcaagggcccttagaagtcgaacagagaagaggattcatcaattagagtgtgagttctcaacattttttttttagcctatgaccccagcaatgctttctcttgctgtctgaagtataattccattaatccagagcagtttgttaacctaacttttggcagtttatggacaaaaacaatagacatgttgagtatgacttttcaaactacacattttctcatgccacccacccaaccacaattcacacagattcagatgaagctcccgcaggaggaagagggttttgggtggattattaaagtcaggggaggcttcaggggtggtgttgaggcagggcttgagagatgagtgacatccaaacagataggagtgggagtttccaggcaaagggacccccagtaagtagatgggcaggggaggagaggggtggtgtgctggagtctggctggcagtggggtacacagaggggagcagtggaagatgagtccaggagggtcggtcttggatcccagtctggggaatctgtacctggagctgaaaggtgctctgaagactgactcggggctgagcagggagagtttgcccagctgagtggaaagggcctgaccttccagaatgtggattctctggccttttactcctccctccttccctccccctaccagcctgaccctggggactgagttaagcttctgggagaggagttcatctgaagcccagtcttcccctggaaccctgcccaacgcaggcctgcagatacactctgcaaaagctttcacgaggcctgtagctgaaagaacagaaggaatcaaatgtaaagatattatactgtccactgtatataacagaaaatcaaactcaaaattacttaaccaataggaaatctattgactcatgaaattggaatccccaggggaaatgtcagcttcaggaggagtttcacccagaggttggtaatgtctcataatccttggctacattkctttgtgattctctccactctccttttctmatgtatcaggcccattctcagattgaattccctcacaatagcaaaatgtgtgctagcacctccggggtcacatgcttcctttttcataaccacggaggtttaaaaggcttttcttactcccaacttttaccacaaatcccaactttctctctgattggaccaacttacatcacraggtagctctcaagccaatcaccatggccaagagaatcctatgcattgattggcttggtgctgggttatatgccttttccttacccaatcactgaggccagggaaggtaagaatactgtcattggcttagcccattagggaccaacccagaagttgagtcctgctcaggtaacatggctgctctgcagtgagagaggggtgaatggatgctggggaagtagacaacactgcagtccaacacagatgtctattttgcttttctcatgaaaggctgggtgagcgagagaagagattagaattagacttagactgtggagagtaatttgaaggccacccatagacttaactctcccatatccccaaggtcacacaaaattgtgggttggctataatatattctttcatctttccttctctttcctttttctcttcaatctctcttttccctcccttttccccctctagtgtttccttatcccctggcttgcctgacttcttttcttttttccattccttcccatctctctgtcatcacagtgctgtattgcccctcaatcctgaatgtctccaccgcctgggtcttttatctcaggctcatccttccctccctgcgcacatctccagccaccctctcctgatgcctctgagttcaatttcatctcctccaaattgctttattggttctacagaaaaacaaggctagctagagccattatgggtgcatacggtgtgcattagactcaaaaaaatatttaaggaaaatactgtggtaaatggaatcaataaactccacatcacactttcaccaggaagagggagaaggctacctccagctaagtgcgccaggaaactgctcaccattcagcagcaagagctggaggctgcttcactgcccctcccacagtgcacattggtctgagcaagctgtggactcctagtactccagcctccctctttcccagctgcacctggctctgaccacacctcgcctctcccctccccgtcctcacttctcctctctgctgctgaagatcccaatggcttccgcacgaacccccttcccccagagtgtagtcgatcagcggtgctgatgaagaaagggacacgatgatgaggagagagggaagaggactgggggaacagaggcatttgcattgtggtgtttttagacccaatggtgaaatctttcataattgtaattttttcttgaaagaaaatgagagtttgatgggtggtgcttgtgccctacctcctctttgtgctctccctgcaacagacagggaagacaagaggaaagagcaacacagaaaagagaggagagcaaatcagasgggaatttgtcctacaaaactggggtctccaagagccttccacctgcccccaaagctttggtatggtggatttcaggaaggwtgaactgaggctaaggtcacactgggaatctgggctgtctcccaagcactgggtcgccctggagtcctgtttgctatgagagagggaagaacatgactataggaatcagcttcctttaacaacacttttatcacatccctagtctatccaagtgctttcgcatactctccagtgccttttggattaaaaagcagctagtactcccaggtcctgcaggagaaggatcccttcctccagaagggtatccccttctgggccttccacctactgatattcccccaaaacctctcaggaaccttattctaccccgtgcaacttaatgagctgaccttcccccacaccatgtcctgtgagagtgctgcctctcacacaaaacacagcggcaggactccacccaggagagctctagggggagaggggaggagcaagtggggagaagcagcaaaccagagggcaagacacctgaaacagagccctaactctaccaccaactgcatgaatttaaacaaccactaccaatgaagacctcagttttcccaaattacaataaaggggtgaatagatcaaaggattttaggctaggatccagggatcccctgaatttgcactgttgtttgtaagtgtgcttttctggtaacaggcttcattgcaacctcaaaggggtctaagagcccaaaaagttgagagagagccatagagggtgctastggccaagtttacatgtggctcaagtgttctaagccttcccaaatccccaggtgggatagctgctcagagtcctggctttrtaccctgaagatgtaccttggaatgccctccytaatgcccacgtgtcacctttacaggactgctgtgtcacctttctctgcagctgataccagcatactcttccttttagtatagtttaggcaggctccttttattacaataaatcttattgaaaatgaataaaacaaaaataacattaagttggtcaggttctcaaaaatcctaccaattccactcaaagtagcaaagctgctgagttggagtccaaattacctcttcctagagtgactgctatcttcacagatgggccaacatcttcataggcactagttttggtcatttcccatcaaacgacctttgtccccaaaccagcctctaattcccatcatcataggctccaggtgccatgttgccyctgggcacccagacactaaactccctaaacatcttgcctcattcaaggrcaaacattttctttaaaactaagactttcacctgggtacagtggtgcatgcctgtaatcccagctacttgggactatggggtggaaggatagcttgagcccaggaggtcaagaccagcttaagcaacatagcaagaccctgtctctaaaaattaaaaaaaaaaaaatgaagactcttcattttctgatcaaatgccaattacagtgactcaagcctcttaggtgctcaaaaaatagatattgaatkgataagtaagtgaacaaatgaatcaatttgtaaattagtgaagtaaatgaatgaaagcttcacttctgttactctcccaaatcccatttctcctaggctagagacctctggctcaattcccatataggcccagtgatttgcgagtcatttctgacccctctgagccagtgaatggctgaaccctcctgtgtctggtacagatcaatccaccactgaacccttcttgaacaataaactgatgtctttcctctgtaatagaaaatttaaatatttcttccacctggttttctctctctcttctttctcctttcatctgagacttcaattaaatatacgctaggctttctcattttgtcctccttgtcttttaccctcttttctgtattttccatctttttttctcagtgctacactgaacagtttcatctgaccttaattccaattcagtaattttctctttagctgtgtttaatctgctttaaaactcacccatcaatttcttaattttagctattgcattttagttctagaattccttttttaaaaatttgttatgtatttaatagttttcagttccctgctgaagttttcaagctggtgttttttatttctttgaacatagtaagcatagttattttatagtctatgtctgataattccaatatctgaagcctgcatgactctgtttctattgtctattgtttctactggtacttggtcaaagtgtcttgttcccttatgtgttggtcatcttagaatgtgtgtatgacrttcacctcaccccagctactatgtccctaatctcctcagagaactttgaggatggaggacataamttcaacgggctgctattcctgtcaggatgccatttcacattgttgttccaagtccagttggaaaactactcaaagaggtctgaaactgggacccactcttgtcaatacctgtcccactcttggaaagtactgaagtgtgcttgagggttgtgggggcagtggggatggaggagcggtaaggtaagagacttctgggagacttcttcccacttcatcacaaacaccaaaccatggtcccacccaaaggcatcagcatcacctcctgagcaaccatagaagaggagactttcaaccaagcttgcctggacaaggcaaggatgaaatcaggcttcagaggttgcaaaactgtcacctggcagagtaacattcagtctgttaatgtattttattcatgtattcatttgttgttttaaagtactgctcagaaccagcagatttagaccaacttttagaaatcaggaaatgtagcttctctttaaagatcagaggttctgataacactgagccctgataccaggaggtaacaattggctggagctgagaagcagccatccctgagaagcaagtgctcttcaggagctgcatttaccaccactcaggcaacaaacraatttgcacttattctgcccacttcacttaattactgcctrgccctgtaagaatttaatttttcagtccttgacctagagaaaagacagtgtgtaattccgatccctaggagtttccaagactgagacagacagcacacagtcagtagagcaagagatcagagaggcaggggaaatctcagaggctcctgctgaccctgggggaatgtgccacagggtccgcccggcccctccccaggttcctggcaaggcctccctgcctaggccaggtgactgtgtctaatgcagcctggccatttcctgtgagaccaaccttgggcaaatcatttaacgtctctaagcctctatttcctcatctgtaaaatgagaatggtcatagttccagatccataggattgttgtgaagttcaatgaggtaatggatgaaaaagccctagcataacatcccatagataacagggatgtctgctgcttctccccrccctgcctactctcaccctccctgggtgccctcagtatcagagactgcaagggccagagtcaccatcatcctctttgatgtataaatgatgaaatcaaggcccagagagagggaggttcccctagatgctgcagtgtgagcatccacccttggtccaaagatacgaatctgtccaggccaacttaggctcaaagaagggaccaatcacagccaggactgaggtgaggtaggaaggaaggcttcctggaggtggcgaactctaagcaggatttggaaggaaatgtggaactcagattggcaaggaaaggggttttcttatatgctgctccccataacccacattttgagtcaccaaaactgaaagcattttactgtctttgagctccaaacaatagtccctaaccccatccttacccaactgccctgtcccaacaaatggactcaaaatacccttacctgctctcctagttctaactagaactaggagacagacagacagacacacacacacacacacacacacacacacacacacacacacasagagagagagagagatgtttgtcttctcctcttgtgggaccctttcaccaccagctcatttttccagtggagaatccgcaaactgatacaaactcaagacattccatatcagaattaagttttctctgaggcagtgatcaaagcgatcttatttaccaaggaaattaagaaggctccaggaggaattgccatctagaaccaaactcatcaaactcaggtgctttcctttgtttttttctaatgagttttaagctgggctccccttgrgacaccgagcaaagcctgccgcttcctgaagttccttccttcccacttcctaccactcttcagccaggctctcaggaccctctcagtcaacccaccctctccctgcacctcccagagagctcccctcaccttccagacttctccttgggctgctgtctccttaccatctcctcgactgcttcagctgccaccaccaacatgcacacacacacacgtgcacacacacacgtgcacacacacmygtgcatgcacacacgtgcacacacgygcgcacacacatgtgcacgcacacacgtgcacgcacacacgtgcasacacacaggcacacacatacgtgcatgcacacacactctgcgttcgccactcgtggggttctctctctgcctttgtggcaatatggcttccctcttcccttccactggaaccactatggcccaagccatggtcagttctctgtccttatcttctctgacctctcagtggcctttgacccaagagaacccccttccttctggaaacactctctcctctgggcttccctaacctccactggcctggttctcccctctccaactccttctcagtcccgttgtcagacatctttccctgacctcaaaatgctggaacrggaggttctcaggctaactgcagttttaccacatcctcaccaacactgcatcttatttttatttttaaaaatctttgctaatctgaaggcaaaatactgttttgttgtttaaatttctatttctttcctgtaggatgactcgctagggccttgctgtaggccatggcaaaaagtttgggctttcttcagaactccaacagaggagtcgcataattcaattttcatcttcacaagtccctctggctggcgagaggaggctggactgaaaggagacaaggacagcagtgccggcaagagaggagagtcgcatgggctggggaggcagtgcaaggctgagaaacggagggacctgcatgggatggcagcragggtgctggaatgaggggagggggaatcagggatgacccttgggttttcagccttagtaaccggaaaagtagtaacagctaccacttacaggggatggccgtgcatcagatgctgctgcacgggttatgcatgttttcatccacttctgctcctccactctggggaacaggcgctgttggcttcccaagccatggtcggttctctaaatatatgcccaatgtcaaggttgctgtattttttggtggtctatcaagaaggatgaagaggtgctgaagaagaactgcctgcatatcgtcgtggggactccaggccgtatcctagccctggctggarataagagcctcaacctcaaacacataaaacactttatttcaaatgaatgtgataagacgtttgaacagctcaacatgtgtcgggatgtccagggaatttttcgcatgaccccaccgtgaaaagccggtcatgatgttcagggctaccttgagcaaagagatccgtccagtctgccacaagttcatgcaagatccagtggagatcttcrtggataatgagatgaagttgatgctgcatgggttgcagcagtactacatgaaactgaaggacaaccagaagaactggaagcgctatgaccttctgaatgtccttgagttcaaccaggtgatgatctttttgaagtctgtgcagcggcgcattgcctcagcccagctactgggtggagcagaacatcccagccattgccatccaccrcgggatgccccagggcagaggctgtctcagtatcagcagtttaaagattttcaatggtgaattattgtggctaccaacctatttggccaaggaatggacattgagcgggtgaacattgcttttaattatgacatgcctgaggattctgacacctacctgcattgggtggccagagccagccggtttggcaccaagrgcttggctatcacatttgtgtctgacgagaatgatgccaagatcctcaawgacatgcaggatcgctttgaggtcaatcgtagtgatctgcctgatgagagagacatcttctcctgctttgaaaagacmtggtaaaggacatggtagaggacacattgcagaatatgaccgtctgtccttcaggagaggacacatcagggtgggggtgaaggagacaccagtgcccccacccctgacagcccccaccccatggcttccttcttttgcatcaccaccactcctgaacccccatttctgatttgtcagaatggttttttaacaaaactaaaaacaaaaaatatatatagataatattatatattatacttatttattatatgctatataatatacatatatatatattagactcatattatatacggtaaatatttcatagttgagggcactgagcccagcaaggccgtgccagagccagaattccaaccctgggggtctggctccagaatccacactccccgtagcgacactaatggcctctattgaaaggtttgagcacttagtgagatggagaagactaggggtggaggggggtggtcccagggtgggaacccccagggtcggggcccaggcatctgcattcttcagcctcccagtggcctaaccacaggcagggtgtgcataatactcatactattgagggcttccagaaacatgcaaagaggcaggggaacagaagaggaagatctgagctggttttaggaagcttcttcaagggcaggagggtcttaagctgagacggggagctctgtctacacagagatgcagatttaacactcactttgtctaaccctttcctcctccacatgccttcctttctcactcacacacctgccccttgcctctttgagagagatttactttattaattaaaaaataactatgcttttttttttgatggagcctcactctgtcgcccaggctggagtgcagtggtgtgatctcagctcactgtaacctctgcttcccaggttcaagtgattctcctacctcaacctcccaagtagctgagatgataggcataaaaaataactgttttcttaattataaaagtagatgcttgttagacatttgagaaacactgaaatgtaggaaaaaattcaaataacccacagttcacccagagagttgcygctgacatttccgtgtttattttagatagaaaaacaccacttttttcaaccagcatcataatatacattgagttttgtgtcctgatttttttcacttaagatacaatgtaaacatcttcctgtgttgttcaatattcttctaaaacaacaattcgcataactacatggcacccctggtctgtgggcgccatcatttaaccagccctctcgtggtgaacatttatgttgtttccagggttttgtctttataactaagcccgtaatgaattccgtgtgtatgtaaactgctgcatgcatttgattatctcctggagtggccttgctcatcctgacttttgtaaggtgtttgatgcacgtcccttgccaaagccctcatcccagcccctgtcacctctcaccttccctgctgccataggcacccacctgtccttcctgcttcctctattaaccgcccctggcaagtcatggcaagaggactccttgagctcaggaagttcaagactagactgagcaacatggcaaaaccctgtctctacaaaaaatacaaaaactagccaagcatggtggcacacacctatagtcccagctacttgggaggctgaggtatgaggattgcttgagcacagaaagcagaggttacagtaagcggagattgcaccactgcacacctgggcgacacagtgagactctgtctcaaaaaaaaaaaagagtggggtcaggggagagcattagggaaaagagctaatgcatgtggggcttaatacctaagtgatgggttgataggtgcagcaaaccaccatggcacacgtttacctatgtcatgaacctgcacatcctgtgcatgtactctggaacttaaaaaaataataatttttaaaaaaagatttaaaggttctagagatctactgtacaacattgtgcagttaacaatactatactgtatacttaaaatttttaaagagggtagatctcatgttatatgtttttaaaataacaataaataataattttacaaaacggcggcagttttcaaaaaaaaaagcagtaagggcagattgtgtgtgctgcccctgctgaaaacccaggagggcccccaacacccgaggcaagtcagcatttgcaatgcatcgcccacctgccaatttctcctactgcttcccgtcatgctcccctcacccgctctgcctctctggcctcttctcagctcaccaaaaatctctgccactgcaggacctttgcacatgctgttccatctgccagtgacatcttattctcttcctgtggcttgtttcttctctagtatttgtgactcagctcaaagctgcctccttggaaaagccttcgctgacctcccttcactcaccctctcccctcagctccgtgtgtgtgtgtgtgtgtgtgtgtgtgtgtgtgtgtgggtgagagagagagagagtgaatgtttaaggcattttttttttttgagatggagtcttgctctgtcacttaggatggagtgcagtggcacaacctccacctcccaggttcaagcgattttcctgcctcaacctcctgagtggctgggactacagttgcgtgccactaggcccagctaatttttgtatttccaatagagacagagtttcaccacactggccaggctggtctcgaacttctgacatcagacaatctgcctgccttgacctcccaaagtgctgggattacaggcgtgagccacgatgcccagctccttcttaaggctctttacattttgtaaatatttagttgcattttgatgtgttaatttcaagtttcccctgataaatggtacaatctgtgggggcaaggacttagtttcagtcgatgctatcctcccaggttctaacctagtgcttggcaaaaagtaggttctcagaaaacatcatccaattgtcttctaaaaaggttgcactcacctacccttccgccaggaatgcatgagaatgcagtttcactaaatcctcaccagcatcaggcatgatgctttaaaagcaatctttgctaatctgatggcaaaaataatagctgactatttagatttgcattattttgactattagtgaggttgaacatttttaatgtttaccagtcttctttcgtgatcaataataaaaaggcctgttcatgacctcattcttaaagctgttccagaaaagggcctcagcttctgaactcttctagaagtaagcatttattcctgaagtctaacctcaatccttcctgctgctgtttccttttttagcttcctcttattgagctccttgtggggctggcgagaaagcacataaatgccctgtcattcggcatccctctcttgcctcttctgcccagcatggtggagcaaagcctgcatgtgtccccctcccaacacccccaagctctgagtggcaaattaaacgattcgattcaagaagacaggctgctctggtgagatgcaatcgtctctgactaaaatctctttctcagatatataatggtctaatcaatattaatagagaggcttatctgttttcctcatctcctatgtccttaagagtagataaaatgcttgtaaaatagggtcctattcagcatatactgattgcttccaaaacgcattttcytgagatctgtcatcaagtgagagtcattactgagcagctaggcccagcaccaccgttgacaaatatggggaagattctttgattatttggcccaacatgtgatttaagggctgcagcttctttggcttccaaatttgttcttgtctgtcctacagggggatcttggaagctggacgagttttagataaatggaggttgagaggaggggaggcttaggagcaggctctggaactgaagtgccatcttgccttcttgagaggagaccacagggccttgggaggtgagtaagtgccctgtccctggcggtaaggaaggagcagtgaacagacacccctggtatcccatatcggaggcccatctccacggggaggagaagccagaagaggacaggaaagcttcagaatttgggtggctggggaggtcagttgggccatgggcagggttgtgttgagagcagaggcctggacttggcatcccaaggcacgtgtcgtgatcggctttgccactaattaactgtgtgagcctgggtaagtcacccagactctttgagccgttttgtttgtccttaatctaggaagagcccagtgccttccagactcaagttctcatccctcactcaccccaattttcataacggtgcaactcagcaagtggttcatacagtgtgcataaaaaatcatcagagtagcaaaacagaaaattagaaccaactttaaaatccacaaatgactaagcaagctgcaaacatgtggtctgacccagtttatcacatatgacatgcataacatgtaatccagtgcaaccatttacatggaggtctatatgtaccgacacaaaaagtccaccaagtcatattgctgggtggaaaagcaagttgcagaatgactcatacactgtgagggatggggagaaacagaacacagtgcatgcatgtctgcaaatgcttaaagaaagtctgaaaggatgtaaaaagctgataacagcggttacttctgagttaccccctgcagggaaggggaaatgatcaagatgggcagagagggtcaaagggatttttagcattctctgtaattctttgaatttttaaaagggggaaggcattcatccatttcttgtataaatagtaattgttaataaagacacttaggtaaattgagtttccacatggaaagatgtttatcttcatcccctatcccacatcatcaacaacaacaaaaaatcccagatggatcacagacttaagtgtcaaaggcctaataatgaagcttttagaaggaaacggaatgttttcaagaggtggtggtagggaaaaaaaaatttgaacaggatctaaaaagcattaactagaaagaaaaaagccaataagttagattatgttaaaattaagaaatcttcaaagagaagattcctactcccagtgtaaagctgatggccgactggcaaccgtgggaggagagccagagttggaaaatcatcgttctggaacgatcgcagtaaagatcggttcaggcaagaatcatcagtggatgctaaatccagaggacattttgatgagaagcagaatatttgcatggcctcaacctgcacatccccactggttgcttattagtttcaagggaaaaaaattgtaactatacaatggaaaaacgacaccaccttgacaggctgattaaaattaacatcagtcatgagggacattgtgtggctccaggtgtccgaccctaagaaggacatatcatttatatattattccattcagcaatgcagtattacctctaatcataataaaatatcagacaaacaaaaagaggaatgttctatttaaaagggaagtgggggagagactgcattcttcaaaatgtcaatgtcataaaagacaaagaaaggctatgatgtgttcccaattaaaggagactaaggaggcatgacaactaagtccaatacctgatcctagataggattctgtattggaagggaaaatgataaagtacattattagatcaactgaaaaaaattggaacacagaagatcagatcaaagtattgtatcaatgtgaaattgactgaagctgataactgtagtatggtcacataagaaaatattcctaagaaatgtatatttacatgctgacctatttgggagtaaagagttgccatgtatgcaacttactctgcaatggttcagaaaaacgtgagtgtgtgtgtgtgtgtgtttgtgtgtgtgtgtatagagagacaggtatggaaagagggtacaaataataaagcaaatggtgtaaaatggtaacaaaaggtgaatctgagttaaggctattata

SEQ ID NO: 93307 - DNA, 201071 bp, Homo sapiens
ttagacagagaatcatgggcttctctgaactctctctcaagaccccacaattgttagatatggcctcatgaagcattgaagagtgcatatggaggaaaattatgaaaaattatcctagaacagatgactgaaaagatgaattttggaaaaaatctaggttattataacatattttaatttgtactaattttgacaccccctcagaggaatttttatgtttttgaaacaagaattatttctgtttttatctacacacagagttcattttataagtgcttggaacccaacagagcttaatgaattgaataggatgttcttgggaaagagagtatagataatacgcttcaatagttaagacatcaggtgagaaagccattaattttagttaaaattaccattttaattagtcattttatgataacatagacaatggaagatgattaagaaaaatgaagaatcagcatttcttgattcttcaatagacacttgaaaaactacaacacaaggaaaacccactgtttgatggtctaagatcctatcccactatgctgacatttgtcaaaacacttaaattgtttggtttaaagaaactcctttttatccctgctactaatacaaagaatatacttgtgtttgttcattgaagagtttctaagtattagaatttcagcaacaggaaattcatttctcaacttgtattcttcacacaaaaggcatcaaattgctcatgagttaataggttgacagctattgtcatttcctggtgggaaactttcatagttagaggaaaagaaggctgaacaccagatgctgttcatcatgtattttgggatatgttcttgaaggtctgagatttacactgaatttataaagcaatgccattgagtcaagtagagaagaatctagattatagaacaaggctgtgaagtcagatggttgtgccaacagtgtctgctgtgcagaacctttagctcccacttctctctcacatgcactgagtcagaaaatgctattttgtaggctgtagctacttgtcaggtttatgactcaacaaactgaaatattagccaaatgaaatattgttgtgcaattcagggtgctcactcatagcacatacagtgttgaatataatcatctatagcttcaaatgtgctggtcatgagtccactaagaaatgcagaaaagaagcaagaggagaaacagtctgaccttagctgcaaagggcaccaggatgccagcatgctagagtcatgctggtttcccccttcatggaagtgacaggcccatgacaaatttacgcaaatatgacatggaaaataatttcttgaagaaaacttcttttgccatatgtttcctggttttcttctggtttggcctgtgaatggtatcagtttattttcgagtctagtatccaatattcctggaagctagggctgaggaatgttcatttcacaggatggccaaggtctgatatgcaaggctgggattgagtgaggccccagggcaggctgagaacaggaagcggtttcactgacattccattcctttctctccctgaccactcccatctcagagtggccaaggatcactgaagaaatagtaattgtcatctaaacctcataacaggggtgtctggcacttgagagttgacccacttcaatttattcaagctcccactcaaaaaaactctccttgacttacaggatatgaataccaattccctaaagcaaagcatagtgagaatttcagtaaaagaaaagaaacgaaaaccccagaaaaagtattcagtaattgaagagtcaccatcccgagggtcctataggagctcacccttggtcggtgagaactactcagtcagcctcacttacctcattgctctggccagctcatacaggcttacaagagcaggttattaaatggtcaggaattttgatagccagttattcattgttggaagcataaatttgaccacagtgggagtgtttatggaaatcagcaaatgctacaaatctgatttttttttaaatttgaaagctgttttaccaacacaccgcggcttatagctctgcataaacataatctgtatcaactttatcctctttttcctccccttactatagcctctgtcctctgccctcattatcctctgctgggatctcttgaatattttttcccctttagctggttttctctttcactcattgatttgtcctgggtttcatcatctaggcaactctcacgcacagaaaattcttgggagttgttctcactagactgatagcaataccacttttatttattattattattattattattattttgaaacaagcaaaggctctaggaatgaaatactagaagatgaaggatttttttcttctggatcataaatctgggcatcccatgcctacatgttctgggactcatgaggcattctattgatccccaaattgctattaatagataccaagtgaaaatttggtatctcttcccatcagccctaatctcagaatgcattatcttttctaagcaacaactgaagcctgtgtgcactagcagttaaatgtgtatctgcaggaggtttaaatattcctaagtgaatgtgggaagtggtagtgtattttggaattcaagggatcttagaaataatgtagtctaatttgctcattagtctggtgagtaaacagagtttcagacagattagcagttagtggtagaatcagtactagaattcagatccctggcttcctcttctgggcattttcaaatctgcaacaatgtctatcttaattaacattataattaggaccaagataatcttcattcaactcaacaaatattttttgactaccagatatatttctatgtgcacttattttatactaggtactgttccagkagttgagactaccaagaagttctctactttttagagcattcttttgagaactaacattatttgtattagtatgacttaactctttgttccaggaaattcttacatagaaaataaaactaagctcatggagaactttgccatttgcttgaggaaattcttctaagtcagtttattcaggacatcagtttgcacatctgagccagcagatcactcctcagacaagttcgctttttctagcaagaccctcacctgttttgtccactaactctattatgtcaacaactgtgcccaattccagtccattccctaccttgtcagatcagttttaaacattttgagtccaattctctgaacatcctccttctgagacactaaaatgctgtcagagcattgttcctcctgttgagtaattctaataaatttaacgtttcctgattgaaggggttttttgttgttgttgttggtagtatttctgatgaattggcagttgatatgttctattggagactagaacataagaatggggaaggtgatacttataataatctatctgggtatagttaggatcttcacatgccacactatgtagtgacataatttgacctggaaatagctggtcacattggctatattgatagcaacaggagatagacaaattcttaggcagacagggatgcgtccctggtaaaacctgatctccaagccaaagacagcctgaagactgaaaactgagctgccagttcggggtagagcccatgaccagagtgagaatttcctcgatgccttttagccaatataatgatgctttttccaggcccacccatggaccaatcagcatacactcccccattctgaacccataaaaaccccaaactcagccttacagacagccacctgcttttgggcctcctctcacacagaggaccatccacttcaagtcccctcttgtgttgagagcttttctgccactcaggaaaattcttctctgctttgctcactctccggtgtctgtgtacgtcattcttcctggtcacaggacaagaacccggaacatgccaaaagggtgtaacacatactcctgctcactgagttacaggagtgaaaaaaaccactgggtgccgcatgcccctatttagcaggtacaaatgagctgtaacacaacacacccccatcctccaagctgcaggcagcagggagagctgtaacatgcctccatcctccgagctgcaggctcaaagaagtgaagcagttaggcactattccctcctggccagcttgctgaactacaaaagctgcaacatttcttgggagcttagacctcaggattccccaggcgagagctgtaacatcacctggggctccacagttgctggcatctctgagttttcaggtgccactgcattcccctcatctagactccggctcccaatgcaaaagctgcctgtggcatgccaagtttagccacaggcaaaacacagagtccctgttcagatgtgggatccaagcaggtagcacaagctgagtacagctcatcaggctgagtgggaagagtgagcccagcaggccttggcaagactacaggcagaggtcacagcagccacagagatttccagctggtgaagcagcactgaaggagtcctgtaacagtatgttagtctacaaacttggtaaattctcattctctgttttctgtgacattttgattttaaaaattttattctccaatacatcgcaaggactggatatcctgccctctattttgaaagtatggtgtccaaattcataggagaaggcaagggtaggtgactcagaaggcacacacacaaaaaagagtcattggaggaacaacccaggaagccatagaagaatgttatcccaaactagatggaaaagttttgtttttatgtaatttagaaaaacattcttattatttatttgcttaaagtttgtcaccattttttcaaattttttttatagaatgccatcctatttaaactactatccacaacatgaaatatagttaccacaaacataaaaatagccaagtggtggaatggggaggagggaccctgaagcagggtcctgatagcaacaggagatagacctggaggtggcctctggtaagcctcaccataccttgatgaaagagccctcaaaactctccatctcctttgactttaattctgtacaatcttctaatttagatactgatatagtttggatgtttgtccactccaaatctcatgtggaaatgtgattcccaatgttggaggtggggtctggtgggaggggaatggatcttggggacagattccttatgaatcgcttagcaccattccccttggtgataagtgagttcttgctcagttagctcatgtgagatctggttgtagagtctgggaccttccctcttctctcttttgatctctctctcaccatgtgacaatcactgctctccctttttcttttgccgtgattgtaagtttcctgaggccctcaccagaagcagttgctgaagtcatgcttgcatagcctgcagaaccatgagccaattaaacctctttcctttataagttacccagtcatggttattcctttatagtgctttatagtcctttatagtgactcataaatggcccaatacaggtacttagccttttggttaaaagataccaacacataggtgactagattgcagatcattggcattttgaattgttttttaagtacccatattactgtggtttacgccaaattgaatctattatgtagaaatatgcctataaaactactttcaaatttgtacaaatatcagtttctcaaagcgtatatatatatatatatgcatgcatgtgtatgtgtctgtttaaaatacacctgctggggattagcattgagctgaaagacaaggtcctgcccttgccctagaagagtttgcagtgtagatggagaccacctgacacctcacctgatccctgatagcaattccaggccaactttcctaagcactatgggaattcagactaagggccagatcaccgttgcctgagattccattgtgatgttagaattcacattctcattcttattcaatagaactgactcgttcaccagagcacctactatgttccaggtggtatcataagaacttgggagacatcactaaacaaaatagaaaaatccctgcccttatggagctgacattctagtgggggcttggtttttttccttgggtactgggtttgtttttccatgatgagcatatcctatgatgcactatagcactcaagcaagatgcctgaagcaaaggaggtgagtcaccatcactgggataaaaaaacaggtcagagaagtagaagttattttctcttataattttaaattttgccttaagctcttcttttgaaatgttctaggccaaagtaatgattcatggattcagcacactttcctttgttgaaaagcactgcttgttccccctcaaagctatgtgagaggctgtgtaggagagagtggagagcaggtagcctaccggacctacagttcaccatttcagccctgtaattgaccagctgtgggacctcaggtaagctggctaacctctctcttaccaatggtagatgactatgaaagctccaaactctctcacaaacataggagattattagcatacaaattaatgtctaggtttgtgggtcttgaggcttcagtggaggtcatgggcaaagctgcaaagagcatgggaattaaaatacatgctccaggataggcagtgtgctggctttttctatggattaattcatttgattctcacaccaacctcaaaaagaaggattattagcccttgatagatgaggtaactgggactcagagaagttgtggagccaggattctagatcaaagcattaagtctttgcttctgtgctctttcaccttggccaggcagctgcccttgcccagtaaatggtacatcacagtaagtgttttattaaaatgccatttccctgaaacaaagaaatgatggtattagggggagggcaagggagacattttgagaatatttaagtatatatgatgactatttcttcttcaaatatctatctggtataaaactactattctgttactctaattattttttgaccataggagagactgcgacagaaattccattagtggatttgagattgagtttagaatatttatttaagtagagctaagtgtggcaatatctgtcatatctattagtttggagaaatgaagaagcttttttagttatagatccagacaccaatgctaataccaaatactacagccagtgttcttctgtcgccatagttgttacaagtatgacagcctcccaagtcatttattgattcaactccctttttgttttaatgttgacacactagtttgtatgaacaatgagcacactagctcagaagaggacaacaagaattagcgcggatggttcttccccttgagggggtgctctgtcagtatgaacatgccttcatgggcagaaattaggagcccactagctgttaatgaagagtgctttgctttcctttcagacagcagtttccaaagttcctcttctcctttaatggcattgccctttagtgtgtgttaacctgtggtttgaaagaaatactcgtgtatattagcaatgtaaatataagtgattaaattaaattacatttatcaataaaaatagctattatcgatagctgaatgcataaagtatgcagcatcacatacggatgaactcrccgtttgtcgtgctactacaggtacatgctctacaaacacagaaattctgatattctatgaaacattattaaattccaattgaacatgatcattccaatcaaataaggggaaaaaatataaagtatttgtaatcaaagaccctgtattgttgagtatattcctgaaggggaggggtttgttttgtctaggattgatataaagtgaattatctgcttatgatttttcactctgattattggaataatattctccacactagctcctggatctgtgcatttcaaccttgtctcttccatacctgcatcattttggtattgtgtatattaggacacattctgatttctgcatcagaacgctgagtgagtgtgcacagtaagcaaaggagtatacctgggagccagtctcacaccaggatggctagtaaaaacagaaccattcataacataactgtcaaccaataaaatacatatcactaaagctaaactaaattcgagtaccctcaactcaacttcccccagccacatctcaaaaacatgactagctactccaacatcacccaatataaggagaactgtaaagaaataaagtcagagtgagagaaaaaaaagcagtcctaatcaacttgattaaatatatgacttcacagcaaattgcataaaactatatgaccacatgagcacattcctaggccctcccaaggccctgaaaaaagcctgaactagggaggggctctaattagcttaatgatacacttacctatgattgtggttatgtcttgatttatctgattggcattgttttttaaattatctaaaagtgttcatccttatttttaggttagcaactgtgaccctagtgactagtaacagtaacaaatgaaagaagatgctcttgtatggccaaaacgatgaaacagacctacatgattttatgaaaagttttccttggctttggttcaaagagatttttctttccttgacactaaagtggtagtttgcactaggcatatagataccgttctatctttctggttctccacttaaatgacactcatgtctgctacattaaaattagcttgttaggttttatttcaccaagtttataaagtaaaccacatatcgttttctcttttgtagatgctgaaagcaaagttcatgtgggaaatgtttggcaatagctgatttatcctcagggtaacaatattctataactcctttgatcttgaggcctctgtgatggaaatgcttggagaaagggattttaaagggagattctgaagtccttgggaaagtccacaagtggacggggcttcatagccatgacaacaaatgacattgtctaggaaacagtgagtcatggcatgctgagcttagaatggagccaacagaaggaacctggcctcggacacagaatcttttggctgctgacccagaatgactgtgaaagactaacactgtttagcagatttttcttgagtgtttactatgtgtgaggttcctgggattcagattcagctactattgttaagaggaaatcaaccaggaagtcagttaagaaaaggtacagtgggttttcaggctgcagggtacagaaatgttcccaggcctggagaacaaaccttcagatcttaatctgtacagggaggtggagggtgaaagaatgatctttcaggaagcgttcaagtagggctgctgcttggattgaattttaaagaatgcataggttatatgcaggatctatatatagatcaatagcttccctgagcacatgttcaaaggttcaaacatttggggtcatttctttgcaagaagagtcactcagtggcctgaaagtccatgcagcaacttccctcatgagagctgcttccgcagcaggcccagggtttctaaaggagagagcacacagatgtaaacactctgtggttctgaggactgtcacctcttcttttcacccatcacttttgtcttaagaactctatgctcaaccctaattctcagtctctatatcaattcccaccaaacagatgcaaagtcctgtccatttgcttccatgaactctgtacttatcgatgatataatactctgctgactacattttacttgccacttcatatcctcactagactgaaagacctataagggaagagatatcttatttatatatctttcttatatatctttcccatatatcctatttactgttgtacttacaactcctacaaccgtgcttggtacatagggtgttgaaaaagtatttatgaaattatgaataacactgattctattaaataacattattaagttaatgaacaaataattaagcttagtaaaatatcaaaagttaaagatatcaaaaactaaacacttatagaataaaagtttgcttttcttgtctagtgagcacattaatacagattttaaccctcttttgtcctctcctgattcacacgaaaaaatacataggcctcagctgttcattggtgccagataaaaataaagtactttttaattgtaattactgcaaaggctcttcaacagtgcacagtataccaggaactgaaacttttcttataaaacaaaataaatatcagtagaaacagagcaaaggcatttcattaagtattatggactgaattgcattccctgtaaatgtgttaaagtctgaactctcagtacacctcagaatataactgtatttagaaatagggcctttaaagaggtagttaagattaaatgagatcatgtggattggtcttaatctaagatgactggtgtcattataagaagaggagaagacaccagagatgcaaccrcacagagaaaaggtcatgtgagcagggatccccaaaccctgagccaagaactgacagtggtccatggcttgttaggaaccatgccacacagcaggaggtgagccaaaggcaagggagcaaagcttcatctgtatttatagccgctccccattgctcacattacctcctgagctctgcctcctgtcggatcagtggtggcattagattctcataggagtgcacaccctattgtgaactgcgcatgagagggatctagattgcatgctccttataaagtctaatgcctgatgatctgaggtggagctgaggtggtgatgctagctctgaggagtggttgcaaacacagattaacattagcagagaggtttgactgcccagagaccataataaatcagttgcctgcagacgcatatcaaaaccctgtcagtgagtggcaggtgataattcagctgcatctggtggctggctttatagtggcaagtgcgttgatgtacttcaactgtacagctgcatctggttgctggctttatagtggcaagtgagttgatgtacttcaactgtacagctgcatctggtggcaggctttaagtcagaatctgacacttattttagtccatgtgtgtcctgcccattattttatttgtcacttccatccgcacctctttcctgcactgcacacttgtctcaatcagttttggtaagcccacaagctaaccctagccaaaatgaataaaaacaatcatcactggagagtttctttgaaaagtgggaaagaaccaatgatgagacagcagaagactctaagactgccaacaaaaagaaagctgcatttaaaagaaaatactggccrggcgcggtggctcatgcctgtaatcccaggactttgggaggccgaggcgggcggatcacgaggtcaggagattgagaccatcctggctaacaaggtgaaaccccgtctctactaaaaatacaaaaaattagccgggcatggtggcgggtgtctgtagtcccagctactcaggaggctgaagcaggagaatggcgtgaacctgagaggcagagcttccagtgagccgagatcgtgccactgcactccagcctgggtgacagagcgagactccatctcaaaaaaaaacaaaaaaaacaaaataccatgagtcctacttaaattacagggtcattgcaccagataattcacattctccaagccctctttttataatatgtggtggttggctatgcaatgaagccatgaaaccttcagaactgcttcactgcatggaaaccaagcaccctgtgttaaacaagactttggagtttttcaaaagaaaaaaaaaagatgaacaagaagaacagaagcaattattgaaggccaccattttatcaaatgtgtctgtactgacagcatcatatcattcgtagtggctaaccacattgctaaagttaagaagccctttgctattggtgaagagttgattttgcctgctgctaagggtatatgtcatgaactttcaggagaggctgcagttcaaaaggtggcatgtgtttctcatttggctagcacataactaaatgattagatgaaatagcagagaatgttgaggtacaattgttacagagagttaatgagccaccgcagtacatgattcaggttgatgagtctaccaatgttggtaaggcaacaatgcttacttttgtgcaatatatttttcagaagatgtgcatgaggatatgttatgtgcacttttgttgccaactaataccatagctgcagaactattcaagtctttgaatgattgcatatcaggaaaactcaattggtcattttgtgtcagtatatgcatggacggaccgactgccatgactggacagctttctggtttcactacttgggtcaatgaggtcacttctgaatgtaactcttcacactgtgtcatccgtagagaaatgtcggctagccaaaaaatgtcacctaaatttaacaatgttttgcaaggtgtgattaaaattattaaccacattaaagtgcatgcccttaactcatatctgttcacacagctctgcaaggagatggacacagagcacacagtcttctcttatatacataagtgagatggctttctaaaggtagatcactggccagagtgtttgagttatgagagccactccagagacttcttttagaaaaacagacaccactggcagcacatttcagtgacacagaatgggttaaaaaacttgcttacttgtgtgacatattcaacctgttcagggaattcaatctttcacttcagaggaaaatgacagctgtgttcaagttggcagatagaggggctgcattcaaagccaaagtggaattatgggggcaacaagtgaacagtgagatttttgacatgttccaaaattagcaaagattttgaaaaagactgagccatggccttctttctcccagctagtgcatgatcacctgtctcagctttcaaaagagtttaagcattattttctaactacaaaagaccctagaactgggaaggaatgaatctgtgacccatttgtgaataagccaagtgaactgactttgtccatcctagaagaggatcaactgcttgagatggcaaatgacaatgcccttaaaagtatgtttgagacaacttcaaatctccatacattctggattaaagtcaaggtggaatatcctgagattgccacaaaagtactgaaaatcctgcttccatttccaatatcctatctttgtgaagtagggttttctgcagcgacagcaaccacaatgagattatggagtagactggacataagcaatatactgcaggtgtcactgcctcccatcacctgcacatgggactatctagttgcaggaaaacaagcttagggctctcactgattctacattatggtgagttgtataattatttaattatatataattaattatttaattatatataattaattatttaattatacatatataattatatataattaaatatatatttaattatataatatataaaaatatataattatttaattatatatatggcgagttgtataattatatattataaatgtaataataatagaaataaagtatacaataaatgtaaatgcacttgaattatccctaaagcatccccttatcccaatccacagaaaaatagtcttctatgaaattggtccctggtgccaaaaaggttgggggccattgcatgtgaggacacaatgagaaggcaactatcttcaagccaaggagagagtcctcagaaaaatatcaaacctgttgaaaccttgatcttggacttccagcctctagaactgtgagaaaataaattcctgttgtgtaagccacccagtctgtggcattttgttacagcagccctagcaaactaatatattcagcaattcttttttttttctaggacataaacatattttaatgtcctacttcctggggagaaatccttttaattattttkgtgtatttggaaataggggttgtattccaaattgtagtctaccataaagaactacctgaggctgggtaatttataaggaaaagaggtttaattgactcacaattctgcaggctgtacaggaagcatggctggaaagccacaggaaacttataatcatggtagaaggtgaaggggaaacaagcacatcttcacatggtgacaggagagagagagagtgaatggggaagtgccacacacttttacaccaccagatctcatgataattcactgtcatgagaagagcaagggggaaatccatccccatgacttaatcacctcacaccaggtacctcccccaacactgggaattacaattcaacttgggatttgggtggggacacagagccaaccataacagggatatattataataaaacgtactgagaggtacacaacagcaccctggaatattgctgccaaaaatggacctaatcataaggaaacatcagataaattcaaattgaggaattgttccagaataaacaagactaaagcaacatgacaactaaatgcaatacttgaatctgcattggatcctgaaacagttttatctatctatccatccatttatccacccataacggtaaaggatattattgggataattgtcataatttgaataaaatctatagattaggtattagcattacatcaccattaatttcctagttttgatagttgtattctgcttttataagagaattttcttgttcttaggaaatactggataatctgggcaaaaaaattctggaattctttagactcttctttcaacttttccatataagttttaagtttatttcaaagtatgaatgctataaaattaggaattcaaacaaaaataatcaaattgagaggtgtgtacatttaacaaaacagttatattaaatcaggttaaattttaagcatgctgaaaatttgctgagacctgggagtgtttgtttctgccagtgttagtttcaaagtgcatagtggcatattgaattttgtgtaatttccagtaacatagtgcaaggatgagtagccacacacatttagtgttgcaataatataaaaagcctcaggagcactccagccagcacaacaagtccccagggacagctaagcactccagtgtctagggactgtgggaaactggaaagaaacaatccagtgtaaatatgacttctaagctggctgttgctctactgctttcttggcagttgcatgctttctgtagcactgtgtgaaggtaggctcatctttctaatcaatagagttttcttttgtctaaatatgattctccgaaagcaaggctatccaaaatgctttgagatttgcttattaaaacaaaaaaaaatccccatttgcattcatttgatgttgtcatgagtacaaaataacttttgtgggccttagacatttttacctttgtgggactcttcagccatcataatatcaatacttaaaatttttttatgtaacttagaatgcttcaacattttttctgttttaggtaaaatttaggggatttttatgggccctaaaaatttctttatttctgttgtgagaaaaaaataacactttcttagattctaaaacttcatgtttttcttccgactttaaaggcaattaaaacaatttcatgggcttctaaaattattgtgggccctaggcactatgcctactggccctaatgcataagttacccctaatttgcattaaatttggaattatttaggttctatctctatacctctcagaaaagtgtaatatttgcattgatgtagacatttagttgctaaaattcacaacttgtcctataacacatatatcactatatatacttatattcatttataatttatattatattccattggggggcacagttggttaatattgcctgttaaaattgaactaggtaaccacgtatttttactcagtgttctgctgacaaaggcttagacagtaatcattttctgcctgctttgaagagttttgatgggccctagaccatcttaagatcctgctatataacaaatagtgtgtttttagcatgcgttttctgtatttgctttttcgttttatcagcattaaaagtttttttttaaaaaaaatacaagtcatctctgtaaaatagtcatgtttctgtttattctttctgaaggtgatatatctgttgataagatcattgtttatctcctataaataacattatagcatcatgaagaatactgcaaaatcaaatagaagaatggccatatggatataaaatattaattttaataaatttatagttttatgtatttatatatttatatattagtttttatattgacattcaaaatagtcagtgagaatcattttgaaagaaaggaaattaatttcaagggttggtctaaaactagtctttctatttgtagcaacctgtttcgttaagacatttctcatggtcctaaaaatcatcatattcaaatttaaagggtatctagcagagttgtgccctttgatgaaagcagtccttacttccttgctatgttcactgcttccattgtgccaagtattagtacagtaccacaatgccagtgcatgaggacacattttatacctttgcatcccaaatttattaaagaactcagaattattcagagtggattatattataaaaattaagaaatcatgtaagtactttcaaaagttcttagttattttgcttctgtacatgtagactgtttaggtgctgagagtacaatggtaaacagaacagcaaaaaaaaaaaattctgtctttacaaataacwtggtactgacatctggttagttttagctattgtgtctcccttgcttctgaattccagagcaatactttcatttttkgatataagcaaattctaaaacacattgtggggaggtagataatctgacattttgcagagttaaagtaattagagaagcacaagaaagtttcgaaaatgataattaaatttgaaataggaattagcatgagtgaagcaactccaggtacatgktgattaacccaagtaatatgactccaggtatcctgggaattcctttcactgtgaaagctgcaatcagtggcctttggaaaagtaagtggggttcctgcagctcccagaaaattgtgaaaaaatcctgttgggatcatttccatttaccactgagccaaatgaccatgatttccaactgcaaagggatatctaaaaccagataagtaatttacctaagtagtctttttcactctttagtgtgaagcttattcatgaagagacctctgcctgaacatacagcaaatttaagaaggttgtgcagatagtctgaaggaggtgagttagtttttcccactttctcaaatttctcaaatttcatttgtcatgaaactaataggaaagattcacaaatgtcagtttaagagttttacctaatggaatctcacttttatttatttttttgcttctatttaaaagcttttttttcaatgatagaaaaaatgctagcgatagtaatttgcttttttaataatggaaaatgtagagcaatatagcaaacctcaaagagtattgatttctcaaaacaaaagcataacaaaatttgtttattctcttttaatttatggttttaaaaattttacttgtatttagaaataaggaaaaatgaataagaaaaaattaaagagcattcttccatggtttccaagaatttcttattaaatatgttaacaaaactcraagtgaataaaagttagagctatagcctatgctattggatacccacccatatcatctgatctgcaccacttcaatgctcactgttttgtcttccaagggctttctctggttaccagcgtccactatactagcaaggcccaggttggaaatattggaaaattaatggccttgggcgcagtctttaactaatgacccactaaagcagtgtactgtaagtcctcacttaacctcatcaataaattcttggaaactgtgactttaaatgaaatgaatagcaaaacagattttattataacttatttgatagaaataatagttaagtttctaaggcatatttctagtcacaaaacatcatcaaactgccaaataaagatcaaaataattctaatattaaacactgaaatatatgtgaactatatatacatttcggaaagattaataaaaagaagataattactcaatttttggtgaatctgtgagtgacaaaggtcatagtagtggtgggtgatgtggggagggatgtttactccttatcctagtgaggagtaaacatgagtcttccaatatccacaccttgctgtccatcatcaaatctcttaaaatatctagttttgtttctaatgtcacactttttctctggtgtgtgtgtgtgtggccatagacgtaagaagaggtggatagtgcaactttaaagtttattacaacaaagttaagtcagggaatgaatatgtaagaagcaccccctaccagtatataattcaaaaacaaacataaaaaatatggtgccctccctgagctcatacgatatcttttattgtcatgtacttgtatgattattgtatactttatatttttttattttttcattaatacataatagatgtacatattttggggatacttgtgataatctgatacattcatgatatggtttggctgtttccccatccaaatctcatcttgaatttcagttcccataatccccatgtgtcgaggaagggacccggtgggaggtaattgaatcatgggggcgatttcccccatgtcgttctcctgatagtgaatgagttatcatgaggtctgatggttttacaagaggcttcccctttgacttggcactcattctctgtcctgccgctccgtgaagaggtgcattctgccatgattgtaagtttcctgaggcctccccggccctgccgaactgtgagtcaattatgcctcttttctttataaattgcccagtttgggggcagttttttatagcagtgtgagactgaattaatacaatcaaatcagggtaattgggatgtacatcaccttaaatacttttctttgtgccaggaacatttgaattattctcttctagctattttgaaatgtacaatagattgacttaccctactgaactatggaacacaatgtcttatttctttcaattaactgtatagttgtcctcactattcaatctctgttcttcctcctcacttccaacaattcttggccttggtaaccatcaatctactctctatcttcatgatatctacttttgtgtctcccacatatgagtgagaataggccatatttgtctctctgtgcttggcttatttcacttaacataatgacctccagttccatctatgttgctgcaaatgacaggattgcattagttgttgtggctgaaaaatattcaattatgtatatataccacagtttctttatacactcatccattgatggacacttaggttgattacatattttgtctattgtgaatagtgctgcaataaatatgggattgcagatacctctttgatataccgattttctttcttttggatatatacccagtagttaattgctgggtcatgtgtagttctattttcagtttttggaggaacctccataccgtttttcatagtggtcattttaatttactttcccaccaacatgtatgagggtttccctttctctccatcctcgccagcatctgttattacctgtcattttgataaaggccattgtaagtggggttagatgatatctcattgtggtttggatttgcatttttctggtgactagtgatgttgagtatttttttcatataactgttggccatttgtatgccttcatttgagaaatgtctgttcagatctgttgtccgttttaaaatcagattattttgttttgcgctattgaattgttggagctccttatatattcttgttactaatacttgtgaaatggatagtttataaaaattttctcccattctgtctctttactttggtgattgtttttcttgctgtgcagaagctttttagctttatgtaatctcaattgtcaatttttgttcttattgcctgtgctttgcccagcccaatgtcctagaatgtttccccaatgttttcttctagtagcttcatagtttcaggtcttagatttaagtctttaattcattttgattacatttttgtatagcctgagacataggggtctaatttcactctatgcatatggttatccagttttcccagcaccatttatgaaagagactgcccttcccccattgtctattcttggtgtctttgtaaaaaatgacttggctataaatgtgtttattgatatctgggttctctattctattccattagtgtacatgtctgtttttctaccaaccatgctaatttggttaccatacctttgtagtatgttttaaagttggatagtgtgatgcttccagctttgtgttttttactcaggattgctttggctattcagggaattttttagtgtgtggttctatgtaaatttgagaatttttttctatttatgggaagaaagtcagaattttgacagggattgcattgaatctctaaattgcttgtcattcttgaaggcagcatgtacttgggtcttgtttctttatccattcagcacctctataactttcaattggagaattgagaccatttgtattcagtgctatcattgacaagtaaggacttactactgacaatttgtttcttgttttctggttgttctgagactcttctcttcctttattaccatcttccttagtggttaagtgattttctctgacagtaagcttttaattcattgtttttttatttttactgtaatattataggtttttgcattgtggttaccttgaggcttacaataaacatcttttaaatataacaagttattttaaggagatgacaacttagatcacaaatgaaatagaaataaaagagaaaactaaaaaacaaaactgttcacaagaatattcaggacttgaactcagctctggctcaagcagacctaatagacatccacagaactctccacccaaaatcaacagaatacacattcttctcagccccacatcatccttattctaaaattgaccacataattggaataaaacactcttcagcaaatgcaaaagaacagtaatcataataaacagactcttggaccacagtgcaatcaaattagaactcaggattaagaaactcactcaaaaccacacaactacatggaaactgaacaatctgctcccggataactaaatgaaacaaaggcataaataaataagttatttaaaaccaattagaagaaagacacaacataccagaatctctgggacacagctaaagaagtgtttagaggaaaatttatagcactaaatgcccacaggagaaagtgggaaagatctaaaatcgacatcctaacattacaattaagagaactggagaagcaacagtaaacaaattcaaaagctagcagaagacaagaaataactaagatcagaatagaactgaaggagacagagacacgaaaaacccttcaaaaaaatgaatgaatcctggagctgttttttttgaaaagattaacaaaatagatagaccactagcctgactaataaagaagaaaagaaagaagaatcaaatagacacaataaaaaatgaccaaggggatatcaccactgatcccacagaaatacaaactaccatcagagaatactataaacacctctacacaaataaaatagaaaatctagaagaaatggacaaattcctggacacatacaccctcccaagactaaaccaggaagaagtcgaatccctgaatagaccaataacaagttctgaaattgaggcagtaattaatagcctaccaaccaagaaaagcccaggaccagacaaattcacagccgaattctaccagaggtacaaagaggagatggtaccattccttctgaaactattccaaacaatagaaaaagagagactcctccctaactcattttatgaggtcatcatcaccctgataccaaaacctggcagagacacaacaaaaaaaagaaaacttcaggccaatatccctgatgaacattgatgcgaaaatcctccataaaatactggcaaacctaatccagcagcacatgaaaaagcttatccaccatgatcatgtccgcttcattcctgagatgcaaggctggttcaagatatgcaaaaaaataaatgtaattcatcacataaacagaaccaatgacaaaaaccacacgattatctcaatagatgcagaaaaggccttcaataaaattctgcacccttcctgctaaaaactctcaatacactaggtcttgatggaacaaatttaaaaacaataagagctatttatgacaaacccacagccaatatcatactgattgggcaaaagctggaagcattccctttgaaaaccggcacaggacaaggatgccctctctcaccactcctattcaacatagtattggaagttctggccagggcaatcaggcaagagaaagaaataaagggtattcaaataggaatagagggagtcaaattgtctctatttgcaaatgacatgattatatattcagaaaaccccatcatatcagcccaaaatctccttaagctttatcagcaacttcagcaaagtctcaggatacaaaatcaatgtgcgaaaatcacaagcattcctatacaccaataatagacaaacagagaactaaatcctgagtgaactcccattcacaattgctacaaaaagaataaaatacctaggaatacaacttacaagggatgtgaaggacccttcaagaagaactacaaaccgctgctcaaggaaatgagaggacacaaacaaatggaaaaacattctatgctcattgataggaagaatcaatattgtgaaaaaggccatactgcccaaagtaatttatagattcaatgctatcccatcaagctaccattgactttcttcacagaattagaaaaagctactttaaatttcatgtggaaacaaaaaagagcccatatagcccagacaatcctaaacaaacagaaaaatgctgcaagcatcatgctacctgacttcaaactatattacaagtccacagtaatcaaaacagcatggtactggtaacaaaatagatatacagaccaatggaacagaacataggcctcagaaataacaccactcatctacaaccatctgatctttgacaaacgataaaaataagcaatagggaaaggattccttatttaataagtggtgttaggaaaactggctagccatatgcagaaaactgaaactggaccccttcctcacaccttaaacaaaaattaactcaagatggattaaatacttaaacataaggcctaaagctataaatgcccaagaagaaaacctaggcagtaccattcaggacacaggcatgggcaaagtcttcatgactaaaacaccaaaagcaatggcagcaaaagccaaaattgacaaatgggatctaattaacctaaggagcttctgcacagcaaaagaaactatcatcagagtgaacaggcaacctatagaatgagagaaaaattttgcaatctatccatctgacaaagggctaatatccaggatctacaaagaacttaaacaaatttacaagaaaaacaaacaaacatgcccatcaaaaagtgggtgaaggatgtgaacagacacttcttaaaagaagacatttatgcggccaaaaaaacatatataaaaagaaagctcattatcactggtcattagagaaatgcaaatcaaaaccacaatgagataccatctcacactagttagaatggcaatcattaaaaagtcaggaaacaacagatactgaagaggaagtggagaaatagggatgcttttatattgttggtgggagaataaattagttcagccattatggaagacaatgtagcgattcctcaaggatctagaaccagaaataccatttgaccagcaatctcattactggatatatacccaaaggattataaatcattctactataatcacacatgcacaggtatgtttcttgcagcactatagcaatagcaaagatgtcaaaccaacccaaatacccatcaatgatagattggataaagaaaatgtggcacatatacaccatggaatactatgcagccataaaaaaggatgagttcacatcctttgcagagacatgggtgaagctagaaaccatcattctcagcaaactaacacaagaacagaaaaccaaacaccacatgttctcactcataagtgggagttgaacaatgagaacacatggacacagggaggggaacatcacacaccagggcctgtcagagggtggggcgctaagggagggacaccattaggagaagtacctaatgtagatgacgggttgatgggtgcagcaaaccaccatagcacatgtatacctatgtaacaaacctgcacattctgcacatgtatctcagaacttaaagtataataataatgaaaaaaatgctctacactttaattccacacctcccacaaacactttgaatttttattatatcagttcgcatattttaaaaatatctattttgaacaggttgttgtcgctattattgtttttgatagatttgtctttataagcttcttactagagttatgattggattgcacaccacaattaaattattagcatattctggggttgtgttcatacttaattttaccagtgggttttataccttgaaatattttcttttagttagtacactaatatgttagcattttttaatttcaggttgaagaattccctttagcatttcttgcaagacgggtctagtagtggtgaattctcttagcttttgtctgtgaaagacaatttctctttgttaatgctgccctatttccttctggcctacatggtttccattgtgaagtctgttgccagatgaactggagttgctttgttattttactcttttgctgctttctggatcttctctttgtctttgatatttgaaagttcaattattatatgccttggttagtgttacttgggttgaatctgtttggtgttccctgacctttctatatctagatatttctgtctttcatgagttttggaaagtgctctgttattatttcttaggataagcttttctccccttgctcttgctcagctcccccttaaacaccaataatttttagatttggtcttttgaggtaattttctatattttaaaggtggccttcatttctttttattgtttttttcttttctttctttggactgtattttcttaatagccagtctttgagctcactgattcttttctctaacccattctgttattgagatcctctaaagagtgtttcaattcagcraatgtggttctccgttccaagatttctgtttcatttttaaattattatttcaattttcttgttaaatttctctgataagtatctgaattgtttttctatgttatcttgtaggtcactgagtttccttaaaattgctattttgaattcttagttataaagttcacatatcggttttctaatcccaaaatggcagcatagaagcaagcttgcttctctcccctccaccagaaaccaaaaagaaatacacagcagcaagatcttcaccagcagcaacccagagatcctgtatgaggatgagacagttcctgtaggtacagagaagtggaaacattctgagcagatggtaggagaaccagattctacatccatgaggcctcttccctgcattacaccaggcatcagcagtatgaaaaatctgccctcaactcatggtttctgcaytgaaaaacgtgaaattgagattgtcaaccagctttcccatcttcttcggtttcctgccaggagacctgcctttgccttaaaccacaggtagcactgtgactgccyggagggagaaatgtctgtgaaggctggcaaagacaaatagggaagccaggactaccatcctcagccgtaaaaactccttgtaacttgaccaaaggagatgccaaatcagtagaaatcatgtagcaagtatgttccacaagtcccctgggaacacacccgtggccggccttcccacagtgctagggtaatccctttggtcctcctccttatgggacaggcagtgccatggccatttgcaaaagtcaaggtaaacataggcttatggcgccatctagagccgaaaacaaggcagcaagctggcagttaagattcataagcaactgtattcaataaaaaccaaaccaaactagacagataaagctggactaaataattattaatacaaatacatagatgtatacccacaagaaacaacagcaaacatggaaccataaccttctagacaaagcaaagttccagcgactgaccctcctgagatggcgatttgtgaactctctgaccaagaattcaaaacagctgttttaaggaaactttgttatctctaagataacacagaaaagcaactcagatatttatcagagaaatttaacaaggaaattgaaataatgataagcagaaatcttgtaactaagaactacatttgctgaactaagaaactcttcaggggatctcaaccacagaataggtcaagcagagaagagaatcaatgagctcaaagactggctgttaaaaaataaacagaggagagaaaagaaaaaaagaatgaaaatgagagaaggccacttacaagatatagaaaattacctcaaagacaaaatctaaaaattattgatgttcaagagagagcagagcaggagcaagggtagaaagcttattcaaagaaataataagagaatactttccaaaacatgagaaagatataaatattcaggtacaggaaggccttagagcatcacattagtcaaataagactaatgaaggtatttactaatcaaactgtcaaagatcaagcataaagataaaactgtaatggcagcaagagaaaagaagcaagcagcatataaaggagctccaaatcatctttagccagaataagaaaaaaagagagaagacccmaataaataaaagtaggaacaaaaatggacacatgacaactgagacctcagaaatactaagaatcattagaaacaattaggaaccattacatgccaacaaattggaaaatatagaagaaatggataaattcctggacacatgcaacctaccaatattgaaccatcaacaaatagaaaacctcaataagccaataatgagttatgaaatcaaagccataataaaaagtctcccatcaaagaaaagctcacggcctgataacttcactgctaagttctaccaaacatttaaagaactaataccaattctattcaaatacttcaaaacgattaaagaggagagagggaatactttcaaactcattctacaaggccagtgttactgtgataccaaaaccagacaaggacacatttttttttttaaagaagctagaggccaatatcaccagtgaacacagatgtaaaaatcttcagcaaaatactcatttaccattgtcaagtagaattcattccagagatacaggatggttcaacatatgmaaatcaatacatgttatacacgacattaacagaatcgagaatgagaatcatataattatttcaatagatgccataaaggtaaaggcatttgataaaattcaacattcctttatgataaaaatcctcaacaaactgggcatagaagaaacatacctgaaaataataaaagccatctatgacaaacccatagctaacaacacacttaacaaggaaaaattgaaggcctttcctctaaagkctagaccaagataagaatgcccactttcactattattttgctgttattcaatataatactggaagtcctggccagagcaattaggtaagaaaaagaaatgaaggaaaaccaaattggaaaggtagaagtcaaattagctttgttcatcttatatgcagaaaaayctaaagactctaccaaaaaaaactgttataactcatacaggaatttagtaaagttgtaggatacaaaatcaatgtacaaaaattagtagtgtttctacacaccaagactgatctagccaaaaatgaagtcaagaaggcaatctcatttaaaactacaaagaatatgcaatacctgggaatcaattgaaaccaaagatgtgaaagacctacacaagaaaaactataaaactctggtgaaagaaatagaagaaagcaccaaaaaattggaaaaatattctccgctcatggattggaagacttaatattgttaatatgacaatactaccccaaacaatttccagactcactgcaatccccatcaaaattccaatgacattcttcacagaaatgttttaaaaatctgaaattcatatggaactgcaaaagatcctaaatagccaaagcaatcctgaacaaaaagaacaaagctgtatacatcacactacctgacttcaaatctattacaaagctatagtaaccaaaacagtatggtactggcataaaaacagacagataaataaaacagaataataatctggaaataaatccatgcatttgcagccaattcatcttcagcaaaggcattaagagcctaaaatggggaaaggtcagccttttcaataggtggtgctgagaaaattggataactatatgcagaagaaagaaactagacccctatctctcaccatacacaaaaattaaatcaaaatgaattaaagacttgaatctaagacctaaaaccatgaactactagaataaaactctgaggaaatacttcaggacaatgatctggacaaagatttcttgtgtaacctctaaagcacaggcaaccaaagcaaaaatagacaattgggattacatcaaactataaaacttttgaatagcaaaggaaacaatcaacagagtgaagaaacaacccagaatgggaaaaaacaattgcaagctatttatctgacaagggattaataactagagtatatagaaatctcaaacaattcaataggaaaaaaatgtaaaccttaatttaaaaatggacaacatgtctgaatagacacctctcaaaaggaaatatacaaatgactaacagctatattaaagtaatgctcaacagtactatatatcagagaaatgcaaattaaaaccacaatgagatatcatcycatcccagttaaaatggcttgtatcaaaaagatagataataacagatgccggcaaggatgtggagaaaggggaattctcatacacagttggtgggaattagtacagccagtacagaagattgtacagaggttcttcaaaaaactgaaaatagaactaccatatgatctagctatttcactactgggtatatayatttaaaaaatcaatatatcaagaagatatctgcaytcccatgtttactgctgcattattcacaataggcaaaatatagaatcaatttaagtgcccataaatggaggaatggataaagaaaacgtggtacatatacacaatggaatattattcaatcataagacgtatgaaagcctgtcatgttcagcaacatggatggaacttgagatcactatgttaagagaaataagccaagcacagrcaaacaaatatggcatgttcttgctcttgtgtgggagctaaaaaaagtggatatcatgaagatacagattgatggttaccagagaccaagaatggcagtgggaatgagggaaataagagaggggggaaaaataatataaatatatttattaccaatgagctttacacttaacaatggtaaattttatacataaattttatatatatatatatacacatacacttttttattttaagaaaaataaataaataagtaaattcggccttacctttcaaaaaaaagttgacatatctctgtcttgttagggttagacaatggttccttgctttgtctgtttgggttggtcatggctcctcctttgctattatttcttttcgatgtacatctatgtctttgcattgaagtatcaaatattccagtcttctctgtctggctttgttacaggcgggtctttgttgttagagctcccaagatgtggcaggcagctcccaagatgggggcgggctgctcccaatacggcagcaaaccttttgtcctctgacctggggttcttggcctcacggattccaaggaatggaaccttgggccatgcggtgagtgttacaactctattagaagtcatgggtcatggtagagaactgtggaacccagcgactagtgttaagctcaattaggacaaacctgggcacttaaccatgcaggaacaatggcgagcctttagcccgatccagagcggcaatgggaacctcgctggatcaggagcgcagcagacaccctgctggatccggaggagtggaagtcaatggagggtctgggagggcagcaaacagcagtggtggatggtgagcaaaagctcagctcgagtgtaagaaacatggaccagaagagtgtkcagtagcaagatttaatggagtgaaaacagagctcccatacaatgggaggggacccaaagcgggttgccgctccctgctcaaatgcctgggtttatatcccaatcattgtccctccctctgtgctctcaggcgatatagatttgactatttctttacctcctactttagcctaatttgtattttagtgagccgtctttactacctgattggttgagtgtgagctgagttataagcccagtgtttaaaggtaggtgcagtcaccttccccagccaggattaggaattcttagttggcctaggaaatccagctagtcctgtctctcagcttgttttggtgtttattgggtatgtttgcatagacagtctttgtaatttacctgtagaatttcttatttgtttttccactaggtcactgtctcttatttggcagtagaatgtgtctgaagcccaggtttgccctagctctagaaaaagattaggaggacctgggaaggtcccaaaggtgataccctaggggatggctagtggggattcataaggagggaacctatggatggtacttcttacagcatggtgctgatgaatagctactctgatttggcatctcctttggccaagttgcacagcagagtatccagggctagggatggtagtgctgccttctccgtttgtgtctggctgtcctcaggggtatttctcccttcagacacttgtgatgcttcctgtaggttgaagcagtaactgatctcctgccagagagcccaagatggtggaaaagctggtagtccacctccatctcactcttcccatgagttgggggaaatgttccacaaacttggttccaggcagactgggaggaaagcagtcttggaaatggaaacttgagtctcttactgtctgctcaaagtttttttcacttctttgtggacctgggaactaactcattctcatatttgaattctgggatattgttggtgataaagcactgcttctgctgcactcccccaattttgacatgttctcttttaattttcctttgggtcaaaaatagtttctaatttctcttttcatgtctttttcatttcctagattagtaaatgtttgttgtcatttttaggtacaaaattaaactgcctttctcagaatttkggctataccacttactagatttgtaacttgggtcaagctccttaatgtctttgaagttcagttttatcacaggtaaaatagtaataagggactctatcttccagggcaattaaggagattaaatgaagtaatcagccagatgtggtggctcatgcccataattctaacactttaggaggcccaggtgggtggatggattgagctcaggagtttgagaccagcctgggcaacatctacaaaaaattaaaaaaaaaaatagctgacatggtggcacatgcctgtagtcctagctactcaggaggcagaggtgggaaagtcacctgagctcaggcaagtcaagactgtagtgagtcatgattacgccactacactccagcctgggcaacagagtgagatcctgtctcaaaagagaaaaatataaaagataaaaaaatgaagtaatctatgtaaagcacatagaagagtgtctggcataaagcaaacctacagaaactgctattattattggtaattttattagttttaattttatgtaattaattaacttaatccacacaaatactcctgtttttttagtatttaaattattttaattttctcaattatatatttttcactttgtgcacacctttttcatgttgtgcattattcatttaggctatactacaaaaaaggcaatataattcaaggacattttattagtccattctcacactgctataaggacataccagagactgggtaatttataaaggaaagaggtttaattgacccacagttccacagggccgggaggcctcaggaaacttacaatcatggcagaaggggaagcaaaagtgtccttcttcacatggcagcaggaagaagaatgagtgcccagtgaagggggaagccccttataaaaccattagctctcatgaagctaactcactatcatgagaacaggatggggtaaactgcccccacgattcaattttcttttcctggttcctcccacaaaacatggggattatgggaattacaaaatgagatttgagtgggaacgcagccaaaccacatcaggcatgaagatatttgtgggtttttaaatttatattgttagattaccttaccaaatatgacagtactcatattctcaaatttttatgctagtttttataatattttatgaatgtacttagtgtagcttgtttttgccctaacttcaaagatgaaaaccaaacttcattatgtgacaaattttctcatcttattagggtagtttactggtgctctaagtaataactgaaatatggcattttcaagaaggccaaagttgctcagcaagaatcgagataattggcttaagcagggttgattactactgtagaaaggattagagctaaataattatccataggataacatgagataacagatgaagtagtagtccaagcaaaattcactttcaaaggctgaggtacgaatgctagagaaagtcaggcctgctgccaaatgtgagttctcacattcagtgtgtcactagattctattgctcttacctccttaatgagtttaatctgtctcctccttgccattcacagtgacatagccttagttctgatgcttcttgtttctcgctttgattactaaaacagtcttctaaccctccaaggtcttccttcctttagtccatttactcattcattcattgagaaacactgacttgacacaaaatttctggctctactctcttgtcactcacttgatctcaagtaaattacctaaccttttagtgttttagtttcctcatccataaaataggataatttttgaaataatattattcttgtaactaaaggggaccaagaagttttaggacaagttcaagatttcatggagcagaaggaaataaggctgcccctaaaaagaacttggaggacagtggaaaaaaagaacaaagttgttttatgggattatcccatccattatagcttaattaggaaagcagttacacagttaaataaatatgtaatgaaatgatgtgtgttggctttcattatgaaaaaaaatcaacttagatgtgaaatgaaatatgtaaatgggagagtctcagcttgagcctaagctgggctcacattagaattcaggtatgtctaaaattcatggagtctctgcataaagaaccaacgattctcctatgaaaaactcaccgtaatatcccaaaaggctgaactgggtgaggaagtgaggtcattggctaagaatgtttgattggagagcatagctgcactacaaaatttccttgaagtcttatgttttaccttttaaaatatcccaaattttacacattttaaaaaatgctagttaatgttatgagctgaatatttgtgttcccccaaaattcatacattgaaatctaatccttattgtaacagtattttgaagtggggcctttgggaggtaattaggctatgagagtggagctctcataaatgcgattagttttcctctaagaacagaccagtgggctagcttgccctctttccactatgtgagaatacaacaagaagtcagaagtctgtaacctagaagaggactctcaccaaagcctaactacgctggcaacctgacttcagattttcagcctttataactgtgagaaataaatgcttgttatttaagccacccagtctgtcataatttgttttagcagcacaaactaagacatttaatatgttaaaatatttactatgaaataattgacatgtattatgggaaactgatgtatcaagataacaacatacttattccatggctccaagtacctcctttcacatttctgcaacccctaygtgcactccagttttagaagcaatgacatggtcctgcagaatgggagagccaagaggcttcttcaaggtattattcaaggataatgggtcagtcttggacaaaaaaatcccctgaatcttagtaaagattcttagtagattcttggtacactctgccactcgagtaatctttctgttccaaccaatgacataggtcttgaaaatttaaaaagtatcaatacctgaaaaaggtgttgtctgaaatcaccaatgatcatggaggatggatgcatgtgttactgattctaacagcttttgtatggtttcaggggttaaggtggtgataggagatgatgtctttggtgtagatgtccacactgtctatatattaccagcattaaggacctcttcaaatacaaaacaaaaacaaacaaacaaaaaaaacargcatcaacagggggtatcacagtaagttgggaaagaatgtaggaaaaattataggagcttaatggtgaccaagaggagctggaaagctacgtgcactgattcctcacagccttcagaacgatctggctagaatttgagtgtagaatggagttttcatatggctggtgacagtgaaggcaaagaaatatactctttgagaaaaatatttgtgaccttattctttttgtctaggctggtgcagcatggaaacacggatttgagctcattactccaattttcacgctgagtttggaagggtcctagagggtatgtggaactgtctcaggggccatggatggaaggggcagaagactaaacaagcacggttccctggaacccatgtcagccaaagcagctccattttctattttcctactttccttttatacatttgaagtaagatttttcatgtcaaatttggtttgaaaaatgaattttgctgcttagaaaagaaaatcatttaaaagttatcatactagaacattggtaagaaaatggatagagaagaaattttttgggttgtggaaaataagataagcaagaggagagtcaaaaattttgagccctagaagaatatcttaatattgttttgtgctcaataatatataacttatgagaagaaagagaaaagcattatgttcagataggataaggagaaacattyatatgaatatatttttaaacttctagtatgtaatttcagcaccaagttagaagctgtgcctagaattttgtttttgagtatgaaatgaaatgagaaggtagcaattggaaaagactaaatctaagaatcattcctggagaggtatggcagaataagctggccatatgccatgagtacatggatttgtgtatactgctctgtatcctgccattatgctaaactatcaataaatctgctgtccttatctgtattcctcagtacataagattttttattctctctggttgcttttaagaattgttagatggctgggtgcagtrgctcacacctgtaatcccagcattttgggaggctgaggcaggtggataacctgaggtcaggagttcgagaccagcctgaccaatatggtgaaaccctgtctctactaaaaatgcaaaaattagctgggcatggtggcaggcgcctgtagtcccagctgctcgggaggctgagacaggagaattgcttgaacccaggaggcagaggttgcaatgagctgagattgtgccactgcgctccagcctgaatgacaaggtgagactgtctcaaaaaacaaaaaaacaaaaaaacaagctaacaaacaaaaataattgttcactctattagtggtgctgggtaatttgattatgatatgctttggtatagttctctttatgtttcttgtgcttggcattcattgagattcttagatctgtaggtttgtacttttcatcaaatctggaaaatactttactattttttcttccaaaaattttttggtttccacctccccacttttaataactttagttacatgatatttggtgtcttggagatgtcccatggctcactgttggctttgttttttctctgtacatttcattttttataatttctatgtctacaagttcattaatctttatttctgtcatgtgaatctgcaagcacagtagcagatcaatacctatatagagacttcctataagaaagaagtagaattgtagataagaagamatgaatgaattaatagtaagtgctgtaagtggtataattttgattatccatagctaacagcaaagatatctgatcctcacctcacactgtgcattggaatcattaattagagatttaaataagaaagtcaaaactttaaaagctctagactaaattaataagaatatatcgatataatcttgaaatagagaaagattgcttcaacattgcagtaggttccaaccataaaagactgataaactagactacagtcaacattccatatttgaaaaaaaaaaaacccaaatcattctgtatttgcaggtttgcatcctcgaattcaaccaactaggggttgaaaatattttaaaaaggcaatcaaaataatacaaataaaaaatactgtacaactatttacatagcatatacattgtattgatattataagtaatctagagatgatttaaaatatacaggaggatgtgcataagttctatgcaaatacttcaccattttatataaaaagactttagtatccttgagatttggtatctgtcggggaggcagggaggtgatgtcctggagccagtctcccagaataccaagggatggctacactttccaattaggaaactctatttattagagacctgaaaggtaaataaaaataaactaagaaaaaaatacttgttacacatgcacctaacaatatattgacatttggacataaataattcctatagcaataacaaagttacaaactgatatggtttgggtttctgtccccacccaaatctcatgtcaaattgttactcccaatgttgaagatcaggcctggtgggaggtaactggatcatgggggcagagttctcatgaatggattagcaccatcccccacttagtacagtatagtgagttctcacaagatctggttgtttgaaagtttgcagcaccttttcccctgctctcttggtcctgcttctcctcctgctttgccttccaccataagtaaatgctctctgaggcctcccgagaagtcgaagctgctatgctccctatacagcctgcagaaccttgagccaagtaaacctcttttcttcataaattacccagtctcaggtatcgctttataagagtgggagaatgtactaatacacaaacccattgaaaaagacacatatttcatagaacaaaaaactaaaatggttaataaacagagagaaagatgcttcacacattagtagtcaggaaaatttaaattacgatttctgcaaatactatttgttcttcattaaattggctaaaatttaaaaagattgacaaatcaaaatattgctaaagatgtgactcaataatttatttcttgccactaggagtaaacatttctaagatattatcagacaagatctggtgtgttcagggtggtctatgactcctaagttattaaaaaattattactaatttttaaattttttaaattgtgataagttgtacataaaataaaattcaccatcatatcccttttaagaatttagtttaatactgttatgcacattcaaattaatttgtaatcaatctccagaactcttttcatcttgcaaaactgaaacactatatacacattaacaataaatccccatgcccctcttcccaagaacctgggagccaccattctactttctttatgaatttaactaccttgtaaaattaaatcataccatatttgtctttttatacaccttggggtagtcttattttggtcaaattcgtttggtgttctctgatattcctatrtctggatatttaatctttctcatatttgaaaagtttytgttatttcttttgataagctttctacccctttctcttgcgcaacttttgcttgaacagctgtaattccagattcggtcttttgaggtaattttttatatcttataggcaatcttcattgcttttcattctattttctttttcctcctctgactgtgttttttccaatagtctgtctttgagctcatttattatttcttctgcttgacctattctgctrttgagaacttctaatgaattcttcagttcagcaagtggatctctcagttttaggatttttaaatttcaatctctttgttaattttctttaatacatttctgaattgcttttctgtgctatcttggagaatactgagtttccttaaaaacggttccctgtttgctgttgtttcttgtggatgtacatctatgtatttgcattgaaggattagttatttattccagtcttctctgtctgatttctttgggtttgtgttggatatatttgcttggaagttcttttcttttttttctcccatgctcacctgggtagaggttctttaccagtaagtcattgtctcctttttggttctaggtcggctctttaagcccaggttccccttggctctaacaaactcagagccctgctcctgtctaatagaaggattccagaaggttatatcctggcagtgtgggaaggctggctaggggttcttgtctaggggatgtgtgtgaagaatcttctacagcttggtggtgctgaacagccactctaatttggcatctcctttgggcgagttacagagcagagtttctacttctccccttttgtctttggctgtcctcagggatatttctccattcaggcattcataatgcttcctgcaggttaagtcagggacatgtgtcctgccagggaatccaagatggagaaaaatctggttgtctacctcaatctcatctttccaatttctccacatcctcccaacacttgttattttgtttgtttgtttgtttgtttttgtagtagccatcctaayggacatgaggtggtataacattgcrctttggatttgcatttccttaataattagcgatgttgagcatcttttttttattggccatttggaaaaatgtcgatgtaagtcctttgcccaattttaattgagttgtttggtttttgttgagctataggagttttctttttaatatattctgaatattaaccttttatcaaatatataatttgcaaatattttttcctgttctcttgattgctttttcactctgttgattatgtcctctgctgcacagaagtttcttataatccatttctttgatccattttaagttgattttggtatggcataagggtccaacttcgttcttttggttatggatatccagttttcctaacaccatttattgaaaagactaccttttccacatcgaatgatattggcaccatgtcaaaaatcaattaatcatatatgcaaagctttatttttaagctctttggtctgtaagtcagcttctacttttgtatagggtagctttctgataagtttgaaatcataaagtgtgagacctccaacattgttcttttcatgatggttttggctatttgtggtccccccccttttttattgccttttcccacacattttatttatttatttatttatttatttatttatttatttatttatctatctatctatttagacagagttttgctctgttgcccaggctggagtgcagtggcgtggtttctgcttactgcaacctctacctcccaggttcaagtgattctcctgtctcagtctccccagtagctgagactacaggaacatgccaccatacccagccaatttttgtattttttgtagagatagggtttgaaattcttgggctcaagcgattcatccacctcagcctcccaaagtgctagcattatagtcccttaatattccatatgaattttaggagagtgctactaacttttaaaattgaatatgcacgtatcttatgaccctacaaatctacttacagagaaactcttgaataagtgcatcgagagtcataaacatgaatgctcacagccacatttttatttttactatcataaataaacggagaaatcactgggtctggcttgtttacatttagatttatcccattgcctttcccttacttagtcttttctgtatcccaaaaggctatatttcttaggcccctttgctttttggtttccaggtaggtttgaccaatgggaaacaatagccaaatwttggagtgtgagagaaggggaaacccagtgtatttttcttcttatctttctgctgtctcccttgtggacatagcttcctytgatcaatcattgcttagatagttccaggtcctgcaaggaagactttgccatgattccagctctcattagatagttttatcttctcaattctgatagtgccacttgctccatccagttgtctctccagatttagcagtttcagtggtttcctgctgttgggttattttgtatcctttttggcttctaagttcttccattatctacttaattaaatccctatattaaatttcctttatttgaaatacctacagtgttttctgtttcctcctagattctgcctaatacaaactcagacatctgttaataggctgctgaaaaactaaatgcccctatttaataatatttagcagaaaaaaatgaatgaattatagctacatgcaacaaaataaatatgttttggaaacacggagtaaaagggaaaaagcaagtgcttgaagactgcatccagctcaatatcatatgttaaactcaaataacaaaacaaaaaccaaggaagactgagcattatgttgttaaaagatgtatttgtgattaaattatttttaaatcaaaacgattaaactacaaaattcaagacaatgattacctctgataaaaaatttgggatatgaaagaagcacctagatttattcattgatatcagaaaggttctaattcccacgttgtgtggtaggttcaggaatattcttcttgttgttatgcttcataatttgcaagggtgttatgtgttgtggtaggtagaagagtgctccccccaaaaaatgtttatatcctaggtttcaaaacttgtgaatatatcaccttacatggcaaatggtactattacagatgtgattatggtttgtaactttgagatatggakattatcttgaattaacctagtgggctcaatcaaatcatgaggcctttagaatagagaccctcccctggctgtagtaagtaaaagagagagacagagaaagagagagaaataatggaagaagagtaagagagggatttcgacattcttggctttgaagatgggggaagggtgccaacaagccaaagaaagtgggtaggttgtctacagaacacgcaaaaaggaaggagatggattctccttagagcctccagaaggaatacaaccctaattgactatagccctgtgagactcacaccagacttctawcttaaagaaatgtaacaccataagtttttgttgttgttgtttgtttttgagacagagttttgctctttttgcccaggctggagtgcaatggtgcgatctcagctcactgcaacttccacytcccaggttcaagcgattctcctgccttagcctcctgagtagctgggattacaggcatgcgccaccatgcccagctaattttgtattttttagtagagacgrtgtttctctatgttggtcaggctggtctcaaactgccgacctcgggtgatccgcccgcctaggcttcccaaagtcctgggattacaggcgtaagccaccgtgcctggccaagtttgtattatttaaaccactaaatttgtgataatttattatagcagcaatcaaaagccaatgcatatatattatttgcatattattttctgctccaaacattatcccataacttaaaaaaattaacatatgttgttttaaatgacacacatcaaaacaaagtgaaacaaaatttaaatgtaaaaagatacaggtatacatgtgtatatgtatacgtgtgtgtgtgtatatatatataaatatatacatgtgacacttttcatattaaaactaaacaaggataggagtagcaatgtctaacaattaccatggaaaacaagaaggcttaacaaaataaagaaggccattatataaygataatagataaactatatggaatctgtaataatcattatcccatattcactgatgaaataatgctataatatgtagtaaaaaataaagaaaaattgggttctttacatcattcttagtctttaaaaagttgaacagaggaattagaaaaaagacaatcattgtaacattggttatatattgacatgtatatagatatatacagtatatatagttaacattatattctaaaccaggtgcactttttatacagttaatggtattataagaccacaaataaactatcaataagttattaaaatatgaaactggtagtcacattaattatcatgaaataaaacttggtaatcaatttttcaatagaatccaccattcattggaaaattaaaaattattttctccttattacacagattcaaatcaaaaatcaattttatagttacagaagattgtataaatgactaaaatgcagacattgggatgagttctctgtaccttagcgatgtagcatgcaaacttttccaggagaaccttagatttagaaaagcactgcagttagaagtgtgggcactggtttcacactacctgagacttgaactccactttcatcacttgatagctgtaggtcttggcaagttatctagcctattttacctgtttcctcatagcttcattgtggtaagggttaaaagaataacttctgaaaagtgttcagcacagccttggcacatagcaaattcagggaaacatatgctgttattattatattaaatcttcccccatttgactaaaaaactgagatattttattgggtattggattaatagattattttagtgaaagtcgacatatttacaatattaagcatcttggtctttctattaattcaagtctttgcatacattactcatcacagtcttaatgtttccttcataggttttccaaatttttattggaatgtccctacaggytcattgttaggaatgctattagctgttgatctgaaatatttttatatctagtttattaaatgttattaggaaaggttattgaattttatcaaatactctttctcttattttccatatttatgtgayatatkaactgacacacttccaatattatcctaattaacccatctttgtattatcgtttagttgtggtaaagtttttccttttataataccatcaaattatatcaacaatgttttctttcatatcctaataattacatttatcagttatattgttcaatagttttctttttttgtattcttttaaattgggtttgaatataataaaaatacctgggaaattccttctctatgatttggaaagatttttagtatgacttatcatattttgagggcataaaaaaactctgctttaggaagctttatagttgtatttgattagtagcttcttttccatttctgtctgttttggttttctacttcatgaatcaattttaataatttatataaatatcaggtttttaaaacacatatgctgtaaagttgtttatatttttattgagaattcccttacagaaaatatgatttggaagagctcatggaaaattttctttgacagacaagcacaatacttttttttttactttaagttctgggatacatgtgcagaacatgcaggtttgttatataggtatacatacaccatggtagtttgctgcacctatcaacccatcatctagattttaagtcctgcatgcattaggtatttatcctaatgctctcccttcccttgtctccaccccctgacaggccccagtgtgtgatgttcccctccctgtatccatgtgttctgatcgttcaactcgcgcttatgcatgagaacatgcagtgtttggttttctgttcctgaagtacaaacttctttaagagcagctagtgacaagcaggatacatcaatctcttagtttaatttaaaacaaaaacaaaaagaaaacactctgggacagaaaatataatgatcttaaaatatcctagggaacttgcctcttctagctgatgctgccaagctaagcttcttcagctcattagcttctgcttcatctcaggcagtagctacccatgttgtttattgctttggctccactcctggttttctggatccttgtttattccttggctgtgattttcccttgacatctcagtttcttagtaagcttatcttatgaatgggcttctttgctattctctggagtaagctatgcatctgtctgtcattatgcagtaccaactctggttgcctcacagcaacctactccaactttggtggcttttgatgccagtgctaactgttcacattctgataatcattttgaaacattttgttacaacaatgaatgctatatagtgaaaagataactgacgatataaatggagcctattaaataagatgccccaagcaatgtcatggacactacaaataattacatggacgcatatatctctgtggcataaaaatgtattgtactctttaaagcaacttccaaaattttcattggaacacttaaaataatcatgggagaaagtttttattccacattagcaactagctttctttctctgtaatttttaatcatcsctgatttaactcaaaggaattcaatatttgttgagtaggtattagaagcacattgaggattaaaacagggaaaatatatcagctttacctttttcagttcaggaggaaatattaataaataaattaataactacaaatagagcaataaataaaacttggataaagtccacctttaaagattctcttctggtattgattctaatatatacctaccctggctaratagacattttaaaaaatagactttattttatagaacagttttaaatttacggaaaaattcagaaaatagtactgagtttcccatatgtcacacatctagtttttccgattattaacatcttacattatatgataaaatgaatctatattgatacattactattaacaaaagtttatactttatttagatcttcttcgtttttctgtaatgctgtttctctgttccaggatccaatccaagatatcacattatatttagttgtcatgtttttctaggttcttcttacttgtgacagtttcttagactttccttgtttttgattgtctttacagttttgagacatactcttcgggtatattgtaggatgtccctctgttgggatttaattgtttttctcacgatcagactggggttacaggttttgcaggaagattgcagaggtaaagtacaattctcgccacattatatcaagtatccatcctatcagtatgatatattggtgttgatgttaatcctgatcactgtctgaggtagtgtttgtcaggtttctccataggtaagttactctcttttcccattttctaaactgaactctgaaaggaagtcactatcatcagttcccatttaagaagtgaagaattctactcctccttcagagtggagtatctacataaattttaggaattctgcatcatgtttcttctctcccatatttatttatttattcaatcacatatttatttatatgattatgggctcatggatattaattttatacttcgggttataatccaacactactttattttactactcaaattgttccatctttgggcatgaggaaccctttcagttggctcctgtccctgacatatccccatcaatgtgggatttatttgagttccttactttccagaattacacgatgctctaggatcatctaatatatttcctgagcctagaatcagcaatttttccaaggagtcctggttcctgttattgtagaatgacattagaaaccaatatctgggctgaaggtgtgcttatkgctttcgggtgttgttttaggcattctcagctggcaaagcaaataaatatatgtatgtaaactaactcctgaatattcatacatctataaatatttgtatatgtaaccatctgtatttgtattaagctaaaactgatgttcccaactctaatccattatcatatggattattctagcctcctcccattgcttatctgtaaattgccactccaaaaatgaggaacctggctcctatcatccacttccatttaaataactgtttaattctggtatacatgtatagtcatatcagaattggtaatgtaaatcaacaactttattaactagagcacagtgcctatgtgcagtttcttctattgttagatttttaaccttgcaattccagttatttaggtcagcaccttttccgcagtctttcccgtgagattgtttcatataagtgtaatacagttagattatcttgtcacaaccttcattccttcctggaaaccaccaacctgctaaataatgtattttttccattcctcacagcacatttatttcagtaattttgttatgtcggttcttagcatgagtacagtgttacatgattttcatgcatataatcacatccaaaacaagttctaaactttacactgtaaacattctcatcatatgtagaaatattttaattggtgtattaagttttgctaactgatcaaatttggaagatataaaataatgtctattctaaattgtgtagtgagaattgtttgttaattacatttctacaatgttaaataaagtaataggcaaatctgtcctgaaagcatgtcaaactttaggtaaaacattaaaaaagaaacaaatctgttaacaaatgaatgtctgcaataaagaacattagatttttaaaatctattatcatacaaaaatataaagggtaaatagaatctttgttgataaaatatgaggtagcatggattcacccctttattgtctgagaaatgcaacaggartaaagaatatttccttaccacaaataattttcaggatgatgtacatatttctttttgaaatacttgtttaaacaaatgtccctccactttttagtactgaaaaagccattccatgtgatttaaaaaaaaaaaaaacacttttacmcatctagataaaatgtgtaaaatgtttgtatgtatttagaacatacaaacaaaatttaatatcttatttttctatgcaagtcttgtggagaataaacagagtcttgattctgataacactgcagaaaacataattttccaatgtgaataatattttttaatatggtatactttgtttccctcttcstgttgtaaagttctgtaggttttgacaaatgcatagtgtcacgtgtctaacattacagtatcatacaaaatagtttcactgtcctaaaaaccctctgtgctacacactattcaaacctccaccctatcttcttaacctttggcaaccactgatcttttaactgactctataattttgccttttatagaatgccatataataaaaatcatgcagtatgtagccttttcagactaccttccttcacttatcagtatgtatttaagattcatctacgtctttttatggcttggtagcttgctccttttcactgatgaataatatcccattgtatgaatatttcaccgcttatttaagaacatcttggtttctggagaatatgaataaagatgctataaacattcatatggtggtttattgcagacatattttaaaatcagttgggtaaatacataggaacatggttgctggattgcatggttaaatgatatttagctttgtaagaatctgccaaactgtcttccaaagtgactgaatcatttttttattcaccaacaatgaatgagagttcctgttgccacacatccttgccagcatttcgtattatcaattttttggacttcagcggttctaatgggagtgtagtggtatctcactgttgttttaatttgtatttccttaatgataaatgatattgaatatttttccattttttttgacctctgtatrccttttttggtgggtgttttcagatcttttgctcacttttaactgagttgcttttcttttttctttaattgttgagtttcaagagttcttcgtatattttgggtgtaagtcttgtaaaaatgttttgcgaatattttctcccagtatgtgatttgtttctttattaacagtgtcttttgcatggcagaagtttaaattgtttttttcttttatgaattgtgatttaagtgttttatctaaagtctcattgccaaacccaaggtcacctagattttttcctgtattttcttctaggctgcttatttgtgtcaaatggatttagatcagccaggaaagagtagggtatcccattcttattgatatgattttaaagagcatattttctgacagtctatgattttaaaaaacaagttttctcagtaaaagtgcagctatgaaagacgttgttctgactcaacagcagcagcctgaccttgggagaaaagttgtttcctgttaacttcccagctggttttatctgtgactgttttttgtgtgtctgtcttaatttgcaaaatgaatggacagtctaatgttttactttttcagagggagcagatattttgcttcctcaccacacaagctcaccacacaatgcagggttcttagcctgcatcgacttgatcataactcaggaaaagacagatattggtcaatatttccttccaaaagtggagatgataaagtagaagtatagaaatcctaaagtccagaccttccttgttcagccaggttttgctccttctccacacacctttgttcttttctccaacttccaaggaatctcacaaaggaagtgggaaacaatgaacctattacttctttcctgctttaaatccaattccacgtagtcacggagactgttgggcaggatctctggcttggtggaaagtggggcgtgctgcctaaagtgatagtttggaggccttctctgtgccgtcgctatgggaatgccagctatatgttggctgggtgcggggcccagtcgccaggccacactgcacgcctccacatcctcagagggcccgggacttgggtcctggccccgccccctgcggacccggcactctgtcagttccgtccccggtcctgggaaccgctctttaycccactctgcgtgtctgccggaacctggctgggaagcgctacttgctgccctgccagcccgggtgagggcggagccaggcctccagccgcgaggactggagtcgcgggaggtggagccccagtccggaagccggggatccgcggccatgacggtgccggtccgcggcttctcgctgctccgcggccgccttggccgagcgccggcgttgggcagaagcacagcaccctccgtaagggcaccgggagagcccgggagtgcgttccggggctttcggagcagcggtgtgaggtacgagggctgcgggcgccgggtgcggagccgctggcggtgggaggtcggcgggggcgcgggcggcgctcgcgcgcgtggggcccaaggctcgtgggcggccgcgcggcggcgggctgggtcgaggacagccttgtctgtgaggtggccttgccggtcgcgcgggcgagtcgcagttgcctcagcttggggaacgaaaacgtgctctgctctgggctctcgcaccagaatgttccatctttgcagcaggtgcacttgatttaggaagacatttgaggcactaagaaaaggtagtataaaaacacgtggtcggcttggtcaaacatttgtttttactttggttattttagtgtttcgtaaataaaggagtaggcgttgtgcagatgacttactaatgtttgcgtttctgaattcctttgttaatagtgttgtctaagtcttttccaactctaaaattatttatggtttcacaaaaccaaatatcaatccagatttctcagtcttttcatgtatggctctccctccctaaacctctgtcaggtgatgagacttagattcattacatgtcttggttgctggcaagaaccatgcaaatacaacagggtacgcactcttctatcttatrctttaccagtcttagttgcaaaatccgtcttaacaagatgaaaatatatcttcttgacccagagcttgtgagtccagaagagcctctgttttcagactttcagggcttccagaaatgcgctttcattgccattttacgtccaaaattgtgtctcactcgagtttttgtatccgccagtgcccagcacaatccctagaaaagcaatgactggtaacgtggaaacttagatactgtttatttaatttaaatcagttaactccctattgtgtacatttagatcttagtctcgagtgtctgaatttaaaaattacttcctataggatttgctttggacataatttcttgtgactaggtcttccacaaggatatgtgagaaaataacagtgaatcagagttgtgtaagctgtagtaggttgggtaagaatgttccacttagtttggaactaccagctagatctactacctaggaaaagcagattctgtagaattctatttgttttaaagaattgaggaaattatttgccgtcactctaaattacttgtttgtatcattattttttgaatttcagttgttttaggggtgcttttcagggtgaggataacttgtttcaaatagtacaacttgattaatttccctgtcagcttgctgtaaacaactccatctccccatcttctccatgacctgcatacattgaatggaagtcattacaaacaacagttacaaccccaaaatttggttgtagccmcttgctttgtacacacacaccaactcatgtagaattcaaaacttttaagttacacataatgacctctttataatttaaaatagttgagtgcaaaggttttggaaagctattatccctatgcactgtaagagttactaatttcagcccggctgctttcagttccacttgatgcagattatagttataaaaaaagtaatatattttgatagtttttattttttaaagagggcactaggcaagttaagataaggcgggggttttgacgccctctttgtactgaataccatctctgaaggtgaggttggccccaaggttgagaaacacctgtggactggtgggtctcgggtggggaggaattcggacagtgtgttgatgcttattggtgtctcttttctcttctaggaccagcagagagaagagattccatcttccagaggttgccactgtctgcctccccacttgtccccatccacagtcatcttttttatatatataatgacacattagttgtctagttcttcatagttaatgtggtttaagtctgacatcttttcttttgccatgaaatttacaccttagtgttattctcactgaaaattgcctttgagtttgataaactcttatcccagtgatattgactgttttaaattaacagatttatcaccatttctgagctgtgtagggccttaattgaaaaartatctttgattattttttcacattttggccacatgcctataataatggaatatttacagtactttttagtggagaacttttttaagtagaatttcaataattaatgtttgatggagtttggaagttaccgtattttgaagtatcgtttaacattcttctctcaatgagttttcctttaaaatttgcagtgaatttgttttcctgtttatgcatgagaatttaggtcttattaattgggggaaattaatgttaaagtaatwaataagcccttgttgcagcttattgtttcttgaaatgaattaactatccaggcaaaaggttaaaaatgaaaaaaaaagtctttgtaactaaatttttcccattttgttgtggtatttgaggagtttacaaatcaaaatgtcctgggttaaaaggcatcacatgagtttgtgcccattgcttttcagtgtgaggagtctgatagcagcccatcccatttgggtgggaaggttatagaccttgcacattaatgccatgctcaaagcagatttgcaggtatcctgcaacacagggactttcacaaaacccgctttrgcttattctacctgaactacttattttaattaactaaatggatatcccaagcattccatgtttatcctgttgctcagtgaatcctcaaatcrttaatttggtagattctcttttttgtcttcatactattatttcttttagcttttaaaaaaattgtgtactgcctacaggtctttatggaagtttcacctttctttgtgtcgcactggcatcggctgtataatttttgcagctagaccacattttaaaaaaatctacatttttggaactagtaaaagatacttatttgtgttatttaagtattcacgtcttttacygtgggtagttaagtttaataatttaaaaagacacattttatcagtaacaatgttcattttatttttcagactcttccctctactacttactctgtatttctgtctcttctaatgactaggaaaggcagtttctcaaaatcatcttctatttagttggcaaatgtgataatgtgggtagtgttcctaccttcctgctgtatgtgttctactgaaatgagatataatagccatctggctacaattttgatttctaagaagttcttatgtcattttaaattcaaaaactaagtrtttcaacatttggtctctcatatcttaagttttattttctttgttccagctgttcagagatagtgtgttctaatatctccacaatcaagatttttgactaaaatggatcagtacatgaaaaagagggactagtattaattttagatcttgttagttaatcatggtcttactaataatttggcaagttctttaatgagccaaatctttgtatttcaaatgccttgaagttgttattctttcctattagtaccctgatgggaggatgaaaacagcagaaaggagcagcaccagatgatcttttcatgggcacgtactctttcaaggaatcccatggagctcagtgaaattacactttggcttagagataattaagttgtggaaggaggtttaagagaggagcttaggtgaaatttgagctgtaaatgagtatgctaaattaaagaaatgattagtaataaatgagatttgctattaagaaattcactttggatctgagacaacattttacatacaatgtagaaaactttatggtcagaacagaacacagtctgaacctaaattaacagtagtgttaaagaattcagggcgggatattatccaagaaggcctagccagctgctccacttaatgttacatcacaagtggtttctgtgttgctattgtttttattagcatttcaatgactgtgtcatattacattaaatcaattggctctaacttacctaaccatcttgctgctttttattgtctagttcttggaaaatatgtaataatttactctcagattgaggtcatgtccttgtcaatgtcataccaaccaggtttgttcactgcatcatctgaacgctatgtaggtttctataattaggctcattagagtgttcctagatccaaagactatctaaagatctaaagattcataattctaaagtgagggtgtgtgtatagtttacaacagatgttctctccccacttttttttttttttttttttgctgtttgtgattaactggaactgcaatgaatgccatcatgcttttaargaattcagttgtattgttgaaaaatacaattttcttaatatctaaggagctcttagtcagtggtaagcactttgctgagattttgcatatacagtatgtccttcgatcctcacaacaactaaaggaagtagatagacactattactattcccagttaacagattgagaaattgaggcttaaagaaattaaacttgtcaagttgacacagtaaatacatggtgaagacaaggcttgaacccacatcatctttccggtgttcttctctacaagcagtttataattattgacttatcttactttttcttctttttgaaacatttattaatattaaatctcatacaacttttgtgaatctagaaagctaattttgcatgtaaattttaaaattattttgttagattccctcagtttgagatgttcttaacctgggaccttatggatagaattcagaggatccataaacttggattggaggttactaacttctgataaattgagcatttttttttccattgttagtgttggcaacaaatacataatatcatcagtacatgtgacttgctaatataatttacaratatttcagtatcacaaagttgaggcagataccacaaaacatcatctgcacatcactattttgttatggtagttagacctaccactagatcctgttatttaatacttttaaaaaaaagcatttgataatatttcagtaaaactggttttccttgtaatctgtattttatattgaatgtttaaaaggattgttctgagaaagagtccacaggtttcagcagataggccaagagcttttgtggcacaaagcttagcatctaaggttctttctgacaaagttagtttgaaaacaatggatattgtttagtacagagtcagaaagttaactagttaaaaaactggatacgaagaagagtcatatataatgaaaaggtattttactttttattgatttgcagatgtaatttctagtaaaattacttyaagatgtgaatagggtacttggggtatgaaacaaatttttttaaagaggtcataaacttaacacttgcaggtattcatttattttaataacacacttcaaaagactccctatactggtgattggttttattccctatggaattttgccctgtttttggggggtttcayttctattgtacaaactcaagacatcgaagatatgccctaagatataaagcaattaaactgtatgttagggcctgggtagagcttggaattgttaatcwttctattaggatttttcgtctttttttgtttgtttgttttgttttttgtttgagacagagtcttgctctgtcacccaggctggagtgcaatagcacgatcttggctcactgcaaactctgcctcccgggttcatgccattctcctgcctcagtctcccaagtagctgggactacaggcgcccgccaccacgcccggctaattttttgtatttttagtagggacggggtttcaccgtgttagccaggatgygtcttgatctcctgacttcgtgatccgcccgcctcagcctcccaaagtgctgggattacaggcgtgagccaccatgcctggccaggttttttcaacattatagagataaaatggttcattgcagctctagttgaagtcgtgaataaagatgagattgaaactaagatatggatttgccaagtatacgaattaaataaactcttgatcttgactaggttttatttgttggtaagctacttttttgtggaagagtattttgatacatagaaataatcctccccctttgttattttgctctagtttattaaataaatcatttgattctaataagcgtagataaggtggttagtttattttctggaagtacaagtaaacaagcccatggaaacagcactaagtgctgaagactttctgctctcataatgtttctggttatcgaaatatgtctccatctgtaatttagcagaaactaagagaaagagccacttttgcaaaccagcccatgaacttttagccaaatcctcttatgtaatgtaaggtcaacaagagagtattcccattatatagatgaagaaattgcatgccgttgagagaagctaagtgacttgcctaactttattattgctactaatggtaacccagagctctgatgctcaggacttctaatttcaggtgagtagtttgtactacatagtgctgccctgctactcactagccaccacctcccttctttaatttttgcctcctgatgaagccacatttcgtggctagcccagcagtaggctgggcttttggaagggagggcaccttttcttgcctttrggggaaggtcatttctgcctttgtgggaaaccacctgagcaagtaatgacagggcacatcatgtaaacaatatctaaggggtcaaatggattttatttttgatatgcattaatggcaaggtcactatgtaatttttttggccaaactagcacattttttagagtaaaaaggggcacgaatgtaatgaaaattatatatttggaatatctattggcttacaaatatattagtgaacttatagaatagtttcagaccattttcaaaattaacattttaaaagataatttatatccttatgtgttaaaataaaaatttatattacatgaacattcagcatgaacaattattcctggtgcatattcacatgcttgaatcagtttcttagctgtatcttttaacaccttgatcctgataattttctgaaaaaagttaataagatcttatgctttgtttattttttttgagacagagtctttctctgtcacccaggctgagtgcaatggtgtgatcttggctcactgcaacctccgcctcctgggttcaagtgattctcctgcctcaacctcccgagtagctgggactacaggtgcatgccaccacgcccagctamtttttctatttttagtagagacggggtttcaccatattggtcaggctggtcttgaactcctgacctcgtgatccacccgcctcggcccctcaaagtgctggaattacaggcgtgagccactaggcccggcccttgtgcttaattttaaaattaaattttctgcaattttcttaacagttgcaaatagaatctttgctttagacaatggttattttagttttaaaggtactgtctctatagatgctgaaacaccacataaactgctaaatggaacagtcttaattctacattttgcacattgaaatgggaagatattttagcctaaatattttcacaggtgctatgttggtgtatcttttcaaagtacttttctttgacaaatatttagataaaagaaataagttgtttttgtgtatgattttaaaaatagtttaccatatttagataggggaaaattaaagtttttctcaattgtattccaatgttttacaaaatggtaatttattccaggaaattttattcaacaaaaaatatgagttccatcagaagattmttctcagacattgaactatttaaaattgctattatagatgtatttatttactaattctgctgtatacaaagttccacaaactagctagcttgaaacagcagaaatctgttttcacactggaaacagtggaaggaggctggaagtctgaaatcaaagtatctgtaggcccacactctgtcgactagcttctggttattgccagcagtccttggtgttcctaaggagtttgcagctgcataactccagtctttgcctctgttgttaaatggttgtcttccctctctgtcttcacttccctttttatgtgtctctgtgtcttctcttgtaaggacagaaattaaaattacttgtgcattgtttgagctatgattttttaaattagtttacttcttcccttccttttgaagagataaggtttctgtttgtaagctttggtttcactgattacaattcactaaaaactttaaatctgaaggtgtccctactcccatttggtctgtttgttgaatatgttgattaataatgaccaacaacttttgaaaaaaatgcaacaagtgttgcccatcccagtgccaggccagcccccacagacacagcttgtaggccagtccttgcagacccaggctctaggcctgcactaatgccagggcagcatccaaagattccagctgagcctctgcagacttaggcatcaggtagaaactcatggacccacactgtaagcctgccccagtaccaggtcagcttccattaattcaggtccaagcctatccccagggacccaaactctgcacccaaccccatggttctaggtaccaggtcttcccctgcagatctaggtaccagggccattccagaggaccctgggcaagcctagtccccacagacttgggaccagacccattccaatgccaggctggtccccatggactcaggctcaagacctaccccagtgccaggatggcccctatgaacctaggcttcaggtctgtatttgcagaccaaggctccaggactactcctatatacccagttgacagcccaccccagtggacccatgcaccggattagccccctgtgagttgaagcattaggcccaccacctgctgacctaggcatcacctgccaactaatccaagggctttagcagcaagcccacccatgggccatgccggatggcccatcaagaatctctagatccactgactggtgaagggctttccctgctgaagccagtttagaaagactggaataggcgcctacttcttcaagcgatagacagcaatgaaaggccacaggcttgtgaaccattagggaaacctggcaccacaaaaagaacaaaattaacaataattgacataaagaaatggagagctacaggctgcctatccagagaacacaggtagacaactagacaatatcagtgatttaaaatactacaaaagggtaaaaaccaggtactgtgggagctcacagcagattcccagggtacagggttgggaaaacatcacaagagtgttttataagctgagacttgagcaatgtgtgggacagacttkgcaaagtggttggagaggtgagaaagggaaggaagagtgtttcaggcagagggaatattatatctgaagatctggagagaacatggtgcagttcatgaattaaaatatgactggtgtgtagtgcgcgactcactaagcacagtgttctttaacagtgaggctaaagtagctcatgcagaagtgtgtaacccataggggattgggattttagttaactttttcccccaatttctcaggtcagaaatgttagagtcatgtttgccttctgtttttcyttttttcatatcctacacccaatctcagtaactcccaagggttccactctcaaaatagattcagaatcagactacttagcacctccatggctacccctttgcctaactccccatgatcccttgtttgttatactacactagcttcttagctggagtctccacttctccccttgatctcatagagtctatccttcatattttcaccagttattttaaaagtgaaagtcacgtcaaaatctctaaatggcttcgtgtctcacagtaaaagccaacatcctttcaaaggcctgcagggccttatataatctgatgtcccattccttctctgacttcatgtcttaccctagttcacttgttctttccactgcaaccattggcctcttgctattcctcaaagatttcaggtatgctccttgctaaaggcctccatacttgttcttcccttcccttggcctagaatgcttttcttccagaaatctacatgactcatttcattcatttctgcccacgtgtcacctgatttatcagagaagtgatatcttaacccacctatgtaaaataactctggccctcagataagtcctttctctgcctcatgttacacatattaaatacttgttgtttttcaatttgcttatatcttcttcaactagaatatagtttccataaaagtaggtaattgttttgtgccctattatttatattcccagtgcccaaaatagttttcagcacataggagactttcaatatatatttgttaagtgaataaacaatgagcatgtggtggggagttttaaccagggaggtgctgtaattaaattagaaaacaatcactctggctgcagtatggaaaatggattagaggagatcaagacaagccggagagaaattttaggagatgtattattcaggggctgaacatttgaattgttgctgatgtttaacctttttagcttttcaagaattttcatgttgaaaaatctaatttgtttatgcactaaagtaatgagaatgtgtgagttgactagttcttccagcacatggaccaatacaggcactctctcattggacctgcattaatttgaggttgcttcattttgcctcttacagtgactcctacagagctaggcttgctgagtctctacggtgactgatggagtcagttggaggggccagttgctactgaaaatgctcagagacctaactcctaatttacccataaacaccagctagccaggctgtatcatgtctgctgtaattagttagcgagctgacttagcacctcagtgctataatttaaagtaaaccctgaacagtcttagacttgagtatgcacggtacagttaagtttaatctgtatacaggttgtctctttggagtctgggaatcagtttatgctattggtcttctctgacaatctccaggtcacgcagatttgtactgtctaggacataattagcctagattatactcagtgattgccagcttcacagtggcctgtgaacaaattattttgtttaatgtgagtgaatcaataatgtgtcagcagtagsatcactactcacatgctataaaatgcaagacaragttcagatgtttttatattttaaaatagaatgtatattccttactgtgttaggtgattactagtttttttaacagatgaatctgcttctataatagtgttctaccccaagaaaatattgctgacacaaattgatttatggaaagttttatttgctactacytataaatgagttgtgctggaatttgttgctgtatctgcagttcttagtatttgctaatataaaagatccttgttatcttagtgccaaaaggctacttaaatgaattcataaaatatccttaccagaaattcataggaaacagtgaaaaaagtttgttactttactttgaaaaataaaaacctcaaaagttttattttattttaacttgatttgcttataattacatacaaagtattggaaggtacaaagcacaagctacaaaaatcactcaagaaatattagataacctgaattgccctctatrttaaggaatttaagtttgtaggtttaaaccttcccagaaagaaaaccccagaatcagatagcttcatgggtgaatcctaccaaacatttaagcgagaaaaaaatgccaattctttacacactcttccggaaatttgaagaggatagaattcttcctaactcattctatgaagctagcatcatcctggtatcaaagctacatgataacattataagaaaagaaaactacaaacacctcttatgcatgtagatgcaacaattttaacaaaatttcagatgaaatccatgatagtctggaaaggatagatacataataaccaactgggatgtatcccaggaatgcaagtttgatttaacatttgaagattgatcagttacgatattaacagactaacactcgagaaaaacatatgatcatctcaatagacataaaaaacacttggcagtagcctcatacaaattctcaccaaactaaaaatagacataaatcataaactgaatgtataacttaggcccataaaacatctagaagaaaacgctggagaaaacctttgtgaccttgaattaggcaaagatttcttttatacaacactaaaagcatggtccataaaaggaaaaaataataaattggagtacattaaaattaagaactgttctaaaaacatgagaataaaaaggcaaagcacagactgggagacaatatttcaaaccccatatctgataaaggacatgaatctaggatacacaaagaactttaaaaaaacccaaatgtccaacaacgaaagactggattaagaaaatgtagcacatatacaccatgggctactatgcagccataaaaaatgatgagttcrtgtcctttgtagggacatggatgaaactggaaaccatcattctcagcaaactatcgcaaggacaaaaaaccaaacactgcatgttctcactcataggtgggaattgaacaataagaacacatgcacacaggaaggggaacatcacactccggggactgttgtggggtggggggaggggggagggatagcattaggagatatacctaatgctaaatgacaagttaatgggtggagcacaccaacatggcacatgtatacatatgtaataaacctgcacattgtgcacatgtaccctaaaacttaaagtataataataataaaattaaaaaaattcaaaataggaaacaacctactaaacaatgggcaaaagacttaattatttaattcactaaagaagatcacagatggcaaataagcatatgaaaagatgttcaacatcagtattcrttaagggaatgcaaatttaaagcacagtgacataccaccatatgtccactaaaatgtcaacagttttaaaacctgaccatctgaagtgatgacaagtatatggagcaaccagaactcatatagtgtttgaaggaatgcaaagttgcaaagtggtacagtgtttttgtaacgtaacagtttttaacrtatttaaacatacacttacgatgtgacctagccattcccctttgagatatttgctcaaaagaaattaaagcggccaggagtggtggctcacacctgtagtcccagcattttgggaggccaagaggggcagatcacttgcagccaggagttcgagaccagcctggccaacatagcgaaaccccgtctctactaaatatacaaaaattagtcaggcatggtggcatatgtctgtaattccagctactctggaggctgaggcatcagaatcatttgaacccaggaggcggaggttgtagtgagccgagatcttgccactgaactgcagcctgggtgatggagaccctgtccsccacaaaaaaaatattttaaagcatatgtgtacaaaatatattaaagcatatgtgttataaaatgtttgtaacagctgtatttgtcatgatcaaaaactggaaagaacccgaatatccattaattacaatcgaatggataaacaaatattggtatatccatacaatgtaatactactcagcaataaaaaagaaatgaaccattcaaacatgcaactatgtgaatcaattaaaaaataattatgctgagtggaaatagctggccaaaaaagagtatgtagtatttgattcaatttttataaaattattcataatacaaaccaatatatactgaacaaaagaggtcaatggttkcctggaatggtgaattgaggagtggaatctggcagagacaggtggaatggcaaaattttaaaggtgcacctggaaagttttgggaatgatagacatgttcattttcttgactatagtgatggtttctcaggtatatacatatattaaaacttaaacttgtacatgttaaatatgtccagtttattatatgacaattatactgaataaatcttttacagaaataagacagcagaacaagattattatattgaattcatcatgacatttcatgtcttgaaagctattaaaattttaatgaagagtagacaaaattagaatcaaaagtagagtttacttagaatgtctagttgtgattgtattgtctaaccaatttgctcagttatttactcataaattatgattgttattaaaatacacttttatggtaaactaaagtggttttcaaacatggtcatacacaagaatcacatgtaggaaattattagacatgcagatttccaggtttttcccctgcccccaggaattctgaattgtagatgtggattgtggggtctgggaatctgcaatttcaggcagtttttgatgtgtgtatccatagaccacgcttggaattgcttcttagcagaacattgtttacatcaaaattgcatgaactgagatgaatgcagtggaagactggtgccatgctataatggtgtattttcgatcaagttctacctatacgtccacaaacctgctagagagagcagttgacttatttggaaggagcacaaagtttgcattttgtgtgttgtcggatatttatagcacccgccctcattagaaaattaaaagtgtacagataccacaaagaattaaggtttataagggcttcctttcctcctcctctttctcttctgcttcttactctttcccttttcctccttttcataatatttattkacctacatttgatgttttttgtagtaatcatgtttttaccgggccattcaataatgaaaggacaggggcagaaggaagaagggaccaccttctrctttatcagatacctttaaaaaaataaacacacagtaagagcaatgtaattcaccactttcaagtttgaggtcatggagagcagaaaagcctttctagaaagtatttctttgtgcctttccagagatagtttatatcatmtatcaaattatggcacttcttaccttctgaaatacttataaactgccaggaagtaatcttctgtggaaacttactccattagaaatgatgccattgcattgggaaggaactaaactatcggtttactgacctgatccccaccataatcagtgacaagcatggcaagactcacagctgttgtccggggccatgcctggggccatggaataacatttttctttgagtaagttaaaagagttgtgtagtatgaagctcatgacttcagagtcttgtgctggatatgctaaccaaaaacgaactgatttcgccttagggtcacaagattgtggggctacgtgtatacatagtggagtccagtcttcaagatggttgccagttttaactaggctgtgctgattgatctgcctctttagaaraaatagcagaactttaaatttaggcaatattatagtccagatcttgagtatgtggtttgataatttatatgaatacataaatgtgtgtatatgtatatacatatgtatgcatatgtgtatataatatatatgttttatatatgtatgtgaaagttgtgaagaaatgtacactgtcgttagcatcttagtctatttgagctgctataacagaatactgtacactggttggcttatacaaaaacaaatgwatttcttatagttttgtagactgggaagtccaaggtcagtacaccagaaggttcagtgtctggtgtgggcctgctttttggttaatagatagctgtcttcgtgctatgtcctcacatggcagaaggcacaagggagatctctggaatttcttaaaaggacactaataccacttatgagggctctatcctcatggtgtaatcaccacccaaaggacctacctcctaataccataacatttggggttaggatttcaacataggaattttgaagagacatacacattcattttatagcagatagattatactgtagaactaaataacagagttggaatccttcacaaaattataaaatatttatgaacctgaagagtaggtgtcactataattgaaaaaaaaatcaaattttgggtgcttggagaatcatggtggttttattgagttttgtaccttaaatttgtgcagttgagtgtttcttattttctttttagtatttattgttttgctttccacagacatgaagccattattatatcaggaaccgaaatggccaagcatatccagaaagaaatacagcgaggtgtggaatcatgggtttcccttggaaacagaagacctcacctcagtataattttagtgggagataacccagcaagccatacatatgtcaggaataagataagagctgcctctgctrtaggtgggtgtgtgttttagttgtaattactactaaatatgttttctgtttttacttcaaattgtgataattatgaatgataattatcaaataagtgccatttgaattgcatgtattattattaaagattattcagttaccaaagcttatgttaatttcatatgatttttcttcaaatttcttatagggttaattcagtgtgttttatattctatggcaagatatgcaaaggatagtttgcatctaaaaggcctgctttcattatatttgctttaatcaaataataaacctggcttgttcactctgttaaacttggcctaatagttgcatggtagtgatatttttattctcttcaaatctactaacagtagcttatctcaaacaagtacaaattgtcacctggcattccaggccaaagaatacatgtggatcaagaggaaacacctgtactattggagaaatccttcctgatgatgcatggaacatcagaacctttcacggcagtaggaacagtcccacactgtgtcagacactattgakgaaaaaccatattcagttagtcaagtgaccttctctacctgtttttcttctaggtatttgtagtgagctcattctaaaacctaaggatgtttctcaggaagaacttttggacgtaactgatcaattgaatatggacccaagagtcagcggtatattagttcagttaccactaccaggtacataatgctcctcttatttatctgattttgttaaaagtgaaacaaagggcatctttcaacatcatattatgatactgcaagtaatttataaaatacattcagaaggagactagctattttactagtaataggtgtaatagtgatttctgaatgatttgtgcttacatggacaaaatccttgaaagtgaaatataagcattggcaatacatacactccttgctttgcacagtagtatgggwctctaaaaatgacgatgtaagatgaaaccaggtaatgtgatcttaataatcaaaggtaaaaataacaatttttctgtggcctttaaaacttcttatccaagcattgaaaactctcctactgtggttcataaatgtatagggaaatgaataattagtaaaactaagctaatgttttttagtacactctaatttaaaacattagaaacattgagaaagtgtatgatatctttgcaaaagctcgtcaaaagtagttggagcagtgtttgtcttctgtctaattctataacttatcatatggaatgggcatcttttctatgtcttggtgaattgaactgttatattcctttcaaagtttagattagctcccagtattttgtctattctactttcaatgttgtgaaatttctctgagagttccttaacatttaaaggaatttcagtatgaagtttcacattggcgtcacttcatctgagatgttgttgtcttttttattacgatcactttcctcgtttgtgtgatggattcaccctcattaagttcctctggctgcgtaactacgtctctccaaaggattcagtgtcagcattctatggtcagctatttctcctacaactccatttacattaaattagattcctattgaaatgactttgttttttatgtttatcaggctttttcaacataagacttaccttcgcttcatgcgggcctaggtttctcttgtctttgtttgctgttgttcagatcttctacttacatccagtttccatcccagcattatcacattttgtttctttgctatactttcacttttataggctaatcccctctgtctgttatccacttttgtaaaatatcatgtgggtttatctctgggaaacatggagaaaacaacactttgccatckatgtttgatgattgtaaatgtgcagtgaccaatcatttgaaagaagtgctatgactggtcactgatcatcatctcatctgttatttctgtagtgatctgtggactaaagagctagcagctcttgtataattactatgaaatttgaaatgtgttattggaggactagtattatttaactgaattgttgttctgaaatttgtgcatatttaaactgcgcaaaatgaggactgcaggtatagtataggttacagtagctttgtagttttgagttctgtaagctttgattaacaatcgtgatgtgcaaaaagtaaasctatataatgctattatatgggatctttatgtggtattaatatttttctttatccagcaatataatgtaatatcttacttagcatatgttatagcttttgtgctgtttacattatatcaaaaattcatacttctaattcttttcctccaatatagctgcactgacaaaaatcatcaagttaataagaatctcagaagctatcagttttccccctgagaaaaatgctctggcagataatgcttacattaatgatgttaaagttagtatagtgatagtatcacttacctttaaaactagaaaaaaaattcaacacgtgcagcactcttatatcataggaaaatgagatctagagaagatcaggagtttattaacatcacaaatctgtccaaaaaattttaacagtgtttctcaattgtttgactcactcacaatgaatctcctgttggtactgtatttatcaagcaatcttcttatagtttgcagtttttgaaattttctctacttggcatttctaygacatttcaataactgtataaacatgtcacaacattaattcttaaaatgtccattctacacaaaatgacctgaaaagacatttcttaagagaagacatacaaatggccaacaggtatatgaaaatgataaacttcactaattatcagggaaaggcaaattaaaaccacaatgagatatcacctcacacctgttaggatggctgttatcaagaaaatgaggtaagtgtcaaggatgtagagaaaaggaacccttgctcactgctgtttagaatgtaaatyggtacagtcattttagaaaacagcatgacagttcctcaaaaaattaaaaatagaataccgtatgatcaaaaaattccatttctgtatatatatccaaatgtcatgatatcagtatgtcaaagagatatctgcactcctaaagtaatgctgcacattgcagcattactttaagatacataatcaactttagtgtctatcagtggctgaatggataaagtaaatgttgttgtatatatacactatgaaataagaatcaactttttaaaagaatgaaatcctgtcatttgctataacatggaacctgaagtgtattatactaagtagaatgagctaggcacaaaaagaaaaacctgcatgatcttacctgtagaatttttaaaagtaaactcatggaaacatagagttaatggtggttaccagggactgaggactggagaggggattgtggagatgttggttaaaggatacaaaattttagttagacaggaataagttgtggaggtctattgtacaacatggtgacttagctaataacaacatactatatacttgcaaattgctgagaaagtagattttaaatgttctcaccacaaaaatacatatcttgacttagctgtttcataatgtatacatatgtcaaaacattgtacaccacacatatctacaaatttttctttgttaatttaaaagtattaaaatagtcatagttttcaaagtacattacatttagtttgtcacagatttctaactacgttggattttatatctgtagaaattttaccccttttgagcaacattccttatttggtgaatttattagcagctcgctgctagatggcactggtgatttgtctgtattaaatactaaattgcctgagtcctgtgctagagactaaattgtttgagtgtctcaaacagagagtgtgagaagcatagagctaaagtgaccacagtgattaaaaaaaaaaatctggatgttctgagaaagggcagttttctatgtagccaaaaagccaataatgccaaaattgtggctaacatttattacattatgacacttttgtatgccatttatattacaaatggcactttgtatttattaacccattggatcctcacaataatcctgtgaagctggagctattatatattttttactgatgagaaatttgaggcgtgaagagggtaagtaacttcttccaagttcatrgagttgctaagtaactgagttgggatttgaatccgggcagactggcccccatgccaagaatactcttaccgattatgttagcaccctcactggcacatcagtgttatctagtgagtcatgtgtgcttactatgtggcaggcactcccttacctggattattttattgaatcctacaaacacccttatatgataagaattaacttcttcattttatagttaaagagactgagacacagggaggttaagtgaattgaccagtattacctgttagtaaatggtagagccaagacccaaacccagatcaactgatttcagagcctgccttttaaacttcttgttacgttttactgtctctcagaacatagtaaggcataacgtaagcacatatatttcaaacattcacatacaagttcctagcacatgtaaccaccaagttgctgatcgtttggtttccctgtttccatacttataacctatattttttacgatttttaccttgctcaataatggtattcctatttttattcataatttctttttggtaaggtttaaaaatgatagcaatgggattaaagacatattaaatatactattcctttcaaagtagcctccattttagtaattgcactttggtacatttttgctagcagaagatattattcaaatatgggtatatacagtctgaatttataatgtggctttgtgatttactgacygttacttaactttgatgagtcttactttcctcataaaaagagaattgaaaatcgatcttttatactacatattgggaacatatagtttgttagttaatagaaaaagttggttaaagtagaaaattgtaaaacaatgcatatgtaccttaaacattgtgttatgtaataaataatttaaatattcattcatcaatctttaacatagattaaaagctttctggagcccactgattggacttctgcatcatcttctggcattaataatacttataattcattgcctgtaattttcaggttgcggtgtaacagtgaaaattcatctagattttcaaaatgtctcccagtcttcaaagtcgccttgctgttacctaagtcatactaatgctttttagttcttgagagtctttccagatcattcagcttagttttcttacaaataagaactgttcccttttgcactccattgtcatttatttatatcatttttacctatgttatagaatttactatgaaaaaactggcaaagacaggctgggaaatacaaaaattgtctcttggttatgaaactcaactgatagggttaggaatagtttattaactattctctgatatgtccagcaagggctggrcatcagccttcatgttttacagaataaatggagctcattagttattttgatagattggctgtatagaagtagatgaatacagcctctcctatgtatatctcataagactgttataatgaacaaattaaacaataagcaaatgaaaaaatgaatgagtctagttgattacaccttcaagcttaataatataaaattattttctataatttggttagtaaatgtgtatttcaaattattttatcattagaaatctgagatttctcacaattatggcaatgtcttgagtaaaataaattccaagttagaattataattctaatgtttgaagacaggtttgcataagaattaaacagaatgtgcagggagtttccatgcmtctcatttgagcaacaagcaaagaaatgagatagaattctgtcctgtttaatggtactgggrctgtcacaagctaagccttgtttatgttcagaagctgtgcaactttgttcaggatttgaaatgctcgggatataagagtacacaggcttgctstttgtccagtagctgaccctaaagctaaggagaaataaaaatgaccgaatgcagatgctttcctactcctgtsctgaccgtgcagagattcttatcaataagtggtcactttgtcgaggtaagaaaggggtctgttatttatgttatattctttttttcttctaagtaggcattttattttatttttttttagcttttattgagttatctgtattaaactgatatcatattaaaagttaaatttttggagtatgtatctttgtatagagtaaagtaattagaaaaatagtcttttaaaactgggaaccagtggcatccttttcaaactagaataataaragggaaattataatattcacaaacttgaagcacactggaattctgctataaatgtttgttatagaatagaatttggtgcagggtgaatttgatttaagagggtttaaattatatgaactgtgtgaaaacatttagatctaaggctgaaaacaattatcaactcaatgaaattttaatatggtatttcacaactgtgacttcatgacagctgttacaagtgtcaggaatggtaaatatgtactatttactaatgccaacactgtacagaagtgctttatatacaataaatcatttattactcacagcaatccttaccagtagatgctatttctatctgaggtttgtggttaaggaaaaagagtgaactgagtaactggtgtgagttcactcagtgagtaagtaccagagcgttgtcaagagaaccaagtgtagcatccttcgtaccatagtcacagtcctacagcagaaatttaagagagcatcaagagagatgcttgcttacccgctttgtatttacttgctctctgagaagtctacttctcatttatttctggaacacaattaggtaaactctatctatttcaaatgttctcttcagttgtctagtttgaagcctttgaggattagcaccttccagtttattcaagggaattggacaaagaaatgagaatgaactataggattaaaggataaaactaaagaaggtgagttagaagagtttgagttcatggcgcagatttaacataaaataatcgaataattagtaggcataaaaaggtggatatcgacctaactagtaagcatggagatatgtgtatttgtctaaaactcatttcttcatttggggaaaaaaagtattgctataattacttttcatgagaaattatcaaatttatgtatccagaacactgattattattaaaatgtttgaccagagtgggaatttttttttatcattctgaactctttcctattttattctgtttaattcaagatggtttctaaattttaattttactttgttttagaatttatatttcctttctctatrggagaaaccccagttctgtgtttgagtgtatagaataattccacatagggagaattgcagtaaacattataaccctgtaatctgccttgtatctgttagacaattagtgaatgctgttgaagaaatgagtgaatcctgtagtttttcagcaccacttttttgtgtgttaagtctcatccttctgcatatgtttctacatgtaagagattagtgcataaacaatttaactgatcaagattggtgaagatcttgtgcccgcacccatgaaagttttctatagctatatagtatctattgtatacaggccacgttaggaatgcatattttataacttgaataatgtgttagcctcttacctcttcactatattggttacctttcaaacatacaagggctgagttctttctccctttagatcttagcgtaaatgtcactgctttggggaagcttttccagcccatgcccctaagttgttttcattctgttgttctctatttggaacctcctttttttctgtgacagagacaatttaagttctccaaatatccacatgtcctcttatattttggggcttctctttgcaattagattgagcccatgtgactactggacaatagattgtaaaaggaagagacatttttggaaccacttccagactgagatggttaaaagctgttgtgccctcctccttcacttctgtttctgttgcattgttcttggaaactaggtattacagatggttgtaaattacaaaaagtagggcagtagaattcttattggacttgacatgaataagaaataaatacccttttataaatgactgggatttcagatttttttaaacctataaactcacagatcaaagaagctcaccaaactctcaagctcatgaaacatgaagaaaactatgccaaagaacaccataatcaaattattcaaaaccactgatagaaaaaaatcttaaaagcaataagggggttgggggagggcattacatacaaaggaacaaagaggacagtgacagaatatttattgatagaaacaatgcaagcaagaagacaatagaacaatatctttaagtattaagaggaaaaaaaacacctgtaaacccaaawttctatacctagtgaaaataccttcaaaaacaaaggcaaaaagtcttttatgagacatgtgaggaagagagctcaaaactaaaaacaattatttactagcagacctatgatctaagaaatactaaaaggcccrggtgtggtggctcatgcctgtaatccctgcccttgtgggtggatcacttgaggtcaggagttcaagaccagcctggccaacatcgggaaaccccatctctactgaaaatacaaaaatcagctgggcattgtggtgcacacctgtaatcacagctactcaggaggttgagacaggaggattgcttggacctgggaagtggaggttggagtgagccaagatcatgccactggactccagcctgggcaacagagcaagactccatctcaacaaccacaacaaaaaagagatattaaaggaagtccttcacctagatggaaatgatactagatggaaatatggatctgtccaaggaattaagagctctggaagtggtaactacctgaataaatatatattattcatgtatatatatgttataatatattgttcttattcattcagattattttagaagataattaatgtttaaccaaagccaaaaacaatgtagtttgtggtttgtaacatacaattaaaatgtatggcaacaatagcacaaaagtttgtatggaagaaatggtggaatattatcgtttgattcctgtaatatatgtgaaatgacataatattacttaaagttagcctgtgataagttaaacatgtataatatgaaaccgaaagcaaccatgaaaataacacaacaaagagttatagctaataagccaacagataagaaaaagtagaatgatcacagatattcagttaatctaaaggaatatagaacaatggagaaaagacgacaaagatgttaaatttattcctagaaaatgtaatgtaaataatccaattaaacatcagaggttgtcaaattggttaaaaatcaagtcccaactgtatgttgcttacatgaaactacaccttaactataaggacacagggaggttaaagcaaaagattgggaaatatatgccattctaacatgaatcaaatgaaagctggaagagctatttaatatgaaagtatatttcagagcagaaaatattacttgggataaagaggtcatttcataataattaaagagttggtttatcaaaagtaaataacaaccttaatatcttatatacctaataagaaaacttcaaattacatgaaccaaaagctaatataattgcaaggaaaaataatcaaataaaaaattatagccatgtttcaaaacttcttaataatggagaaaacaagtagacagaaaatcagtaaagaatatagaatacttgtagtatgatatcaaccaatttgacataattaaaatttatagaatactctcccccaaatggcagataataccctttcttcaagttaatgtagaatatttaccagtatataccacatgctaggccataaaactaatctcaattttaagagaattcatgtcacacaaaacatgttctctgaccacaatggaattaaattaaaaatgagtaacaaaaccttctggaaggctgtgcacagtggctcatgcctataatcccagaactttaggaggccaagatgggcagatcaggagattagtagatcgagaccgtcctggctaacacggtgaaaccccgtctctactaaaaatacaaaaaaaaattagctgggcgtggtagcagatgcctgtaggcccagctactcgggaggctgaggcaggagaatgtcctgaacctgggaggcggagcttgcagtgagccgagattaagccactgcactctagcctgggcgacagagcgagactccatctcaaaaaaaaaaaaaaaaaaaaaaaaaaaatctggaaaatccctaaatatttgaaaagtaaatagcatacctctaaataacccctgtgtcaaataagaaaatgaaagagaaatttgaaattgttttgaactttttgtgaaaatgtaacacatcaaagtttgtgggattctattaaagcagtacttaagggaaatacacagcactaaacacatatcttagaaaagaaaaaaaggtcagaaatcagtaatctcatcttatactttaagatggtaggaacatcagagcaaattaaacacaacataaaaacaaaaaaagaaataataaagaacagagtagaaattaatgaaatgtaaaatagaaaattcataaaaatcagtaaaaccaaagctagacctatcaaggaaaagaatagatacaactgaccaataccaggacttagggtggtaatatcactacagattctacagatattaaaagggcagtaagggaatattctcagtaacattatcccaatttgacaagttaaatgaaatggacaacttccttgaaagatatacattaccaaagctcactcaaaaagaaatgtcttaatagctctgttaagcaattgactttgtagttcaaatccattccacaatgaaagctctatgtccagatggcatccctggtgaattttaccaaatatttaaggaagaatagtgataaagaagagggaatgctttctaacacatttgaagccagcattactctgttactaaaaaccttgcaaagacattacaagaaaggagaattatgagtcggtatccttcatgaagatagattcaaaaggtattaacaaaacattaacaaatcaaatccaacaatttagaaaacaattcatcatgaccaaatgtgttttctttcaggaatccaatacaatttaacattagaacagtaaacaatgtattttaccatattaacaagctaaaaatgaaaatcatataatcatttccatagatacagataaagtattggataaatttcatcattaattcctgatgagaaactttcaagtaactaataatagaagagaactctttcaagctgataaagggaatgtatgaaaaatctataggcaacatcataattgattatgaaacactgagtgttttcctcttacaatcaagaaagtcaaggatgtccactattaccatgtctatttaacatttcactggaaattctaactagcacaataagacaagaaaagcagatgacatgattgtcccatggaaaattcaagggaatccatgaaaaaaaaaaaaaaaaaaaaacagctactagtactaataagtgagtttagcaagattgaaggatacaagcttaatatagaggaatcgatttttattctgtatactttcaaccagatattgaaattttaaatatacatttataatagcatcaaaaatatgaaatccttaggcataaatttgacaaaagatggggaaaacctatatatattaaaaactacagaacatttctgagacaaactaaaggaggcctaaataaatggattaataaaccatgtttatggatcagaagactaaatactgttaaaataccaattttcctccaactgatttgtaggttcaaggtgacctttggtaaaaacttgggagaaactgaataaaattcatatggaactgcaaatgacctaaaatggtccaaacaattttgaaaatgagtaacrtggaggattaacattgcctgatgtcaaaatgagttataaagctacagtaagcaaagcaatgtagtattggaatcaagatagaaaawcagatcaatgaaacaaaatagaaagtccagaaagagattcacacttatattgataactgatttctgacaaaagtggaaaggcaaataagtacagaaaagaatgcgattttcaacacatagtactggctggaacaatcagatattcaaatgcaaaagaatatctagaaaagaaatgctagaaattaaaaacactctaacagaaatgaagaatgctttgatgggctcaactgtagactggaaatggccaggaaaagaatcagtaagcttgaagttatgccagtagaaatttctcaaaataaaacacaaagaggaaaaaaacccaaaccrctccagaatagaatgtcaaagaactgtgggatattttcaaaaggtacatgcatttggaatagcaggagaagagaaaacaggacagaaaaaacttttgaaataatcatygctgaaactttctaaaaataatgacagagagaatarcaagagcaaaaatggtaaaagtatttgaacagacacttcaaagaagaaatacaaatggtaaataagcatatgaatagatgttcaacatcattagtcattagggaaattcaaatgaaaagtattaacaagatactactgcaaacccattagaatggctgaaattaaaatatcaactgactatactatgtgttggtgatgatgtggagggatagtaaccatcatgttctcctgtagtggagatgcaaaatggtacattttggaaaactggaaaatagtttggcagtatcttaaaacgttaaatacacacacacacacacacacacacacacacacacactggtccagccattcygtgcctgtgtatttacacacacacacacacacacacattggtccagccattccgtgcctgtgtatttccccaaaagaaaatgaaacataagtccatacaagtatttgtatatgaatgttcatagaacctttatttgtgataactaaaaactagaaacaacccaaatgttcattagcaggtcaatggataaataaactgtgatattccatacaatagaatactactcagcaatattaaggaacaaaatattgatgcatattacaatatagattaatctcaaagtaattatgctgagtgaaagtatctagacaagagtatatactctgtgatttcatttaaataaaattatatgaaatgaaaactaatgaattgacagcatatccgtggtgtattagtctgcttcatctatcataagaaaataccatggaatgagaggcttaaacagcagaaatgtattttctcacagtctggaggctgaaagtgtgcaatcacggtgccagcatggttgggttctagtgagaagtttcttcctagcttgcagacagagccttctcattgtgtcctcacatgatgaagaaagcaagttttctggtttctcttcttataaggacactaaatcatatcacaagggccctaccctcatgaactcatctaaatctaattggcctcagaagtcctatctctaaatacaatcacattaagtgttacagctttaatayatgaatttcggggggacataattcagtccataacaaatgtttatagatagttggagctgaggggataggaaagagaggaaaggattatgaagagagtaggaggaaagttttcagaatggtaaatatgttcattatcttgactaggattctggttttataggtatatatatatatgtgtatgcatatgtatatatatgggtatatatatatgtgtatacatatgtatatatatgggtatatatatatgtgtatacatatgtatatatatgggtatatatatatgtgtatacatatgtatatatatgggtatatatatgtgtatacatatgtatatatatgggtatatatatatgtgtatacatatgtatatatatgggtatatatatatgtgtatacatatgtatatatatgggtatatatatatgtgtatacatatgtatatatatgggtatatatatatcaaaacctatcaaattgtactctctaaatgtatgcagtctattatattcaaatattcttcaataaagctgtttatcaaaaatgcaaatctactagaaatagaaaaaatacaataaaactatatagtaaaggactcaaaagaatgacaggcacaggactcaggatgaaatttacatctgtttggagcaggayggagaatggactaattgggtagactataaggttaaatatagattaaggttaaatatagatcaaggcgataacttttgtttggggtagtagatttgcatatgcctaatttattatgaaaaactaatttaaattgcattgtgtttggaccaatattgaggttgtgtcacaagcccatgaattatgattaatccaatttctgcacttgaagttcattcaaagaaaaaatacccaatattttgtttcaaattctttttgacattatttgtttagtcacatagaagcaaagccatcctcacacaatattatttatccaacttaaaaagaaaaactttctcagagggaggtttatatcaaagagcttatgagcaaggggaagaaaagtgaagaccactctcttgcatgtaaagtatgttaaccacatgatggcagcattgagcaagcagtgtttttcttcccttttttttttttttttttttttaaagattaatggtttacactggaaggtgagtaaatcactgagatataatttacatagcagtgggattggttggtgtctatagccacttatgtctctctctctcattcatattcatgtggaaaccatgcccagagatttttagtggctcaaatctatagaattacatctttttgaacagttattatcaaaaatttgttatatcatctaacttgagatgatttgcttttcacaatatcttcaaaatcatgaattttttgaacaagttacttttttatttttttctttaccattatatcctcatctgtttttgagtgtattcagcttgaaatgatgacaaagcatttaccaaaatcaaaaggccctatggaagatggatatttctctgtggaaagtattttaaaatatctagttatatgatagttttctgaccctcatcattcatttaccaggtcaacgaatatttacctagaatttatgtaactctgtactaggtacccggggaaaaggtaccttttagtcagggtactgaccaaatagtcagaaagcaatttgagaataaatcattgtccttgaaaagtttgcaagcaagattcccaaaaaaacatcttttctttctccttgtgtgtttaaaagaagcttattagaattggcctgttcactaatctaagtgttttcttctatagaatacactatttcaaggacagtactgtatatttgacagaagttaccaagggctcaataaaccaaggtgtccttaacattgcytacaagaacaaggtaattttaggatctccatatactcttcaggtcacttaagataattatatagggtaaaggttagcaacctttgcgtgatgtgtaggttccaacttcattaatttttattttttatttttttacatcctatgaagtaagcctgcctgaggacatcctggggcagttttcgtggctgtaggagaggctcagaagggtggagaaccagacccacctttttccggcctagagaactccttccagtctacctccaagctccactgtgttctcagaatttggggtggagtagctcagcgaggttagagtgtgttcccattccttttctgtccccttgtcccttgatgttgaaacaactcttaaataatattgggaaagtggtaggcatctgataagtatttgctgtcttgaaatcttgatgtagatcccagagggtgtaacttaaatatttattggcttgagaacagtgaacacagtttccaaaagtatctcttatttactcttagaaaataaatcattgagagactataggtagtttgagtaggcagacatttattccattaaaatataaattccagaggcaagaattttgtctgtttgcctcacttatatattcatttttgttttttgtttttttgagacagagtctcgctgtattgcccaggctggagtgcagtggtgtgatcttggctcactgtaacctctgcctcctgggttcaagtgattctcctgactcagcttcctgagtagctgggagtacaggtgccggccaccatgcccatctaattttagtatttttactagagatggggtttcaccatgttggccagactggtctcaaacttctaaccccaggtgatccttcaacctcagcctcctgaagtgttgggattacagcttcctgaagtgttgacgtgagccactgtgcctggccctcacttatatattctaaacccctactggtaatatggtagacattcagtaaatatttgttgagtaaataaatgattgaattttcaagggcattgtatacacactcaggatgtggactttgatctattagcataaaactttacctggtygtttttttttttcatrtccagaaaggaagaagtaaatgaaaaacaagaaacatgaatctttcaccttaaatttatgttggaggatgtaatagtaccagatagtcaataaggtagatgcaacaatatgaaaaattatgatttttaacataagccacctttggtttttctttatatttttatttttatttatttattaatttattttgagatggagtctcgcactgttgcctgggctggagtgcattggcttgatctcagctcactgcaaccttcgcttcccgggttcaagcagttctcctgcctcagcctcccgagtagctgggattacaggcacctgccaccacgcccaggtaattttttgtatttttagggttttgtatttttagggtttcaccatgttggccaggctggtctcaaactcctgacctcatgattcacctgcctcagcctcccaaagtgctaggattacaggcatgagccaccgtgcctgacctctttgtatttttaaaaggaggatgttagaggatatggaaggatcagacatattttccttatggcagcctgttcttcttactgtgtccagctgcccactaattttgtctcagtttcttcatctataaattagggttaatagtagccatttattcaataaatatttattgagtgcctctatggtccaggcactattatttgtactgtggatcagtgaaaaagaaaaagacagaaatttctgtccttttgagtagcagaggaggcggttaaaaaatatatataataaataaacaaatatatttactagatgttgatatgctatcggaaaaaggaagaagtagatcatggtaggagggataggatgttggaggacaggttgtatttttatctgaccgcctcccaacatattgttataaaaaattcaaacatacaggaaaactaaaagactggtacaatgaacactcatatgccttcaaactagattctgtagttgttaacattatgctatatttgttttgtcacatacctatccatttgttccttcacccgtccattttatttttgaagcatttaaaggtaagaacacttaatatacccctaaaactttagtgtatacatcattaaggttcattatttatgttatgtgaaatttacatgcattgaaatgtacacatcttatatgtattattccataagttttgaaaaatgcaaactctcatgtaatctaaacccctatcatattatggaacatttttgtcaactgagtttcttcatgccacttcccagacagtcgctatctctttcatcctcacactcaggtaaccactgttctgatttttttcgtatacatattccatttcaatrtcttactttgtaaagtggctgtttaaaatgtttaaaatgttattttaaaatgttatttattaaaaatattatttatcttttaatgatttaactttgagtgcttttttttatatatctggttacaagttctttaactgataggtgttttgcaaatattttctcccagtctttggcttacctgtacattttcttaatggtgccttttgatgagcataagattttaatttttcttaagtttaattggtggtatttttattttatgctttatgtgttttgtgttatttttaagaaaccttttcttacacccagcatacaatgatattcttctaaattttcacctagaaactatataattttaacttttatgtttagatttctaattgatttctagttaatttttctgtgtagtatgaaatagtcatcatagtaagttttgccaccccaccccctacaatatagctgcctagctgttcaagtactatttgttgaaaacactttgctttcgcattgaattactatggcatttttgtggcattcacattctataagtgtgactctaaagctgggctctcttttcttgttccattgatctatttgtctgttcttatgcctgtatcacactgtctagattactgtagctttgtagcaagtcttgaagtcaggtattataaatcttctaactctgttttcaagattgctttggatattctaagtcctttaaatcttcatatacatttaagaatctaacaaaaaacgacataggattatgattgagatgattgcaatgactctataaatcagtttgggaattgacatcttaccatcattgagtcttccaatctatgaacatggtatgccttttatttatttacgtcatttgtcagcagtcttttgtagttcttattatagatgttattctcaaattttaaacaatttactcctaagcattttatgatttgtcagctattgtaaagagtatttgtaaaatttcatttttctgatagttactacttgtatcaggaattcaattgttttcttatattgactttgtaatcttgcttaattcactttattagttctattaattgttttataaatttttaagcatgctctgcataaacaactatgccatctgtgatcagagaattttacttattctattctgatctctatgcctctttatttttttgttatcttattacacccactaggcctgccaacaaagcattaactagaaattgtgggagtggaccttattcagatcttgagggaaaaggttcagtatttcactattaagtaggatgttaattgtaaagttttttataaatgcctgtatcagattggggacttaaagatttgcttctcctctggtgaaccacaggtacaatctctggtaagttatcttatccttagatgagcttcttggggtttgtttcctgtgtgtttgttcaggggtcattcagagatacagaatttgtatacaatgtatgggactcctttctgtggctttctcctttcctggatatatcgcttcaattttcaactacggtgttagccccaaacttcatcttttgatctcttaagcaagtaggactgaatatttctatccaaattctagctgtcctgtggctagaaaagcttttaaagtggagaactctttcagtgatttttttttctttaagctatctactttcctctacatctgtttgtttttagtgactttccatttttttcagatagttgtttttgtattttttcaaatgattttactgaagtttgcagttgttttctgtaagaagtttagtccaatataagctacttcacaatcactagaaactgaacctacatttttaaatagtgtggtcagaattgtcctcactgatgttaatcaagtttagcctaaagctgcctccttacatatttaagattagcctaaaggtttttctgtatattgtgaactataacaagtagaggtgtaaaccaatcgtggcccacacctgtgccaatcactgagttttggccaatcaagtgtagccagctgctcgaaccatgttcaaataaggcaaacactgagctgtaaccaatccagttgtttctgtacctcacttctgatttctgtgtgttgtgtccytttttttgtctacaaatcttcttctaccacrtggctgttctggagtctctctgaatctgctgtgattctggggggctgcccaattcgttaattgttcattgctcaattaaacatctttaaatttaatttggctgaagtttttcttttaacagtgagaatgtggtatttaagaaaacatttgaaagaaggtagggatttagcctaggtgacagttcttttttaggaaagccttccaggcagatagaaagctatagctaaggtggcaaaatgcctcatgttttcaaggaacatcaaggggaccagcttgatgctcacagattgagagaagacgagagtaaccagtgatgggattagacacatagctatggttttggtgcagtaaaaatcatgtagagccttgtttgcaatttttaaggtaataacattgcagggttttgagaaaagcaatgtgatcaaatatgtacttcaaaggtataactctattgctgttttgtgaataaattgtatggttgcacatatagaagaaggaaamtaattaggaggctgtttcaagaattgacaggaagaataatgttcactcaaagtagagtagtatcatgaacatggtgagactgataaagtgctagatatattattatgaagaaagtcaacagattttccaatggtttggatgttaggtgtgagagaaagagggatatttaagatgactccaggttttcttggcaagtagcacagaaggatgggtttcccattatgaaccctgaaaatctgagacaaatgtcagtttattttgccaaggttgaagacatgcacccattagacagcctcagagtcctgaaaacatgtgcccaaggtagttgggccacagcttggttttatacattttagggagtcgtgagacatcaatcaacatatgtaagaagtacactggttccatccagaaaggcggggacaacttgaagcaggggaggagtcttccaggtcacaggtaggtgagagacaaatggttgtattcttttgagtttctgataagcctttccaaaagaggcaatcagaacattcctctatctcagtgagcagaaggatgactttgaatagaatgggaggcagatttgctctgagcagttcccagcttgaattttccctttagcttagtgattttgggggcccaagattttttttttcacaccatcaactgagatggagtagttataagtgaatcagtttaagacagactgtgtcctaaaaggctcacattcataaatgatagagataattaaacaactaatatcattaactgaactagtgtgctaagtattttttatagcagttccatgggaaagcagaggaaaaaaatattgtttcaatttgtgatcatttcaacagggggcaattgatcaatgcattgaagaatgaataggatgtgaaaaaaactgagaagaaaggattagtagtgaaaaaaatcatcatgagcaatagcaatgcagaagttaatgctaagggcttggggaaaggacatggtttggtgtgactagagtggagggcatgtgatgatgatggttggtaaaggtatggaacacacagagaagagactataggaaaaataagctaaaggacacaatgtttactatacggatgagcttgcacttatccaacagatgtgggggaagtggaaggtggcatttttaaacagtaatgttgtaaaaatctataggtggaaaataagccagtaatttgtttgttcctttttttttctgttcattgtccaaagrcaattaagcatattataaatacatcgcaaaaatatgtattcagtggccaggctcagtggctcatgcctgtaatcccagcactttgggaggccgaggtggtggatcacgaggtcaggagtttgagaccagcctggccaatatggtgaaaycccatctgtactaaaaatacaaaaattaaccaggcatggtggcacatgcctatagtcccagctactggggaggctgaggcagaagaatctactgaacccaggaggcggaggttgcagtgacctgagatcataccactgcactccagcctggggaacagaatgagactctgtctcaaaaaaaaaaaaaaaaaacccatacaaaacatatattcattcaatatagtaaatctacagtgtcctaaaggcattatctgagctgttttattacagtggttcagattttgatttgatgacttctgtttttcctagcatgatttaatgacttctcataactttaaatagaaggggggaaaacacaaagtgaataaaaccagttttatcattcatttgggtaagatattaaatggttggttgtttaccaatgtatcctgtgaatcaaacatgttgtataactgctgtgagaaaattgatgctattaagtctcacgattgttttttctgttcaagttatgtgccccaagggtgagattttgggagacttttagtagcagtcagtcacaaacaggaaatgtatttatttctcttactcatataacaaaaggaagtaggattacctgtaatcctaaatgtaaaatgtttgatgcttttttgcatgtgcttagacaagtattacttaatctaggaatagtgttatatttggagccctaggagaaacaatacatttcttgggatattttagagttatcaaatgtcttattaggagttgggagggaggcctctgtgattttaatttttaatggtatttaaaatgattaatatttattatgacttctgtatgatacaaaaggaaaaactgatcttagaacaaaaagatatggatttaaattctggattcttagtagtgatttgagattgactctaactccttgaacttgtctttaaaatgggcatgatcatacctttcctacttttatccccagtaactatgaagattaaaaggaaattgatgtaaaggtaatataatcattgtaaagcactttttaaatgtagatagagtagttcacattattgctatatactgtatactacatagtaataggtagatctctcctggaaaaagatatatgttagatttaatacactgctgagatagcagagttacataaaaatgataaatgaattggttttctggatttttatgatcttcacttttttcatctactcatatggagctcttttcctkttagattcaggttttatgaatctgctatacattttgtatgtccattcatctgtcttttaaactagtaatacttaaatatttaagacaaaccaaaatggtgatctgaattatgatctgagttgaagttggcatatgcaagaggacagatctgtaaccaccagtctctagttctggcttccagattttcagatgcttacatttcttctcaagtatttcagctggtgtgtgaactgaaatatttgttacagctttaatgttattttcagtgaatgggagcgcaaaaaatggtagatggcaacatacagtgtaattgaggcttattgtttggagaatggttcttaaaatctacaaagagtccttgttgagttctttttaatcagtagcccagcccatgcatatattagccagttttgaacttagaaataaactaatttgagtcctagctaaaaatagatactccaaatatagttgtttttcttttcatctataaagcttttcatttcattgtaaaaaatatccatgtcatgaagcttccgcgtgagtggtaggtgatttaaaaatgacttatcatcatcatcacctagattttttttaaaaaagaaccagtatttttaccctcatgtaataagttaaatatgtattcttttaaaagtttgactagaatctatatgatgatctccaagctatagagaaaatagatggaggccctgctaaaacattctagactgaatgcagttattaaaagtgaaaaactattgaatggagagactttccaaagactcagtttctatttgaatatgattcagatgaatacttttatatatttcaaggacttttgtaatctaattatggttaattagcttgacttaaagtaaggtagcagtagcacacttttagaatacaaaagatataaaacccaaggcatagctttctgaaaagtttgaacttggacttttataatgttttaaagaattatgtctaaatcgcattatataatggccgaataaacttttacatagaaaatatacttttagtatattaggcatatgggttaattgttaggttagtgataatttaaactactctgcatagagtaataggagcctattttatatttctatacttacttttaaaaaatgagatgattggcatcccatatttcatttgattactttattactcaggttgtgttctttttcttccatatagcaaatcatagtaatattttttatttcactgtgacaatgctttagagaaaagatgtgtgtgtgtgcgtgtgtgttttatattagattttttgttatgtcatttaagaggaagctaagaactcatgatgttatgactattcttaacactaacaaaccccttttaatctccaatattcgaagtatttaatagaagcctattaggagaactgtcttgtgtcatagaaatgtggattcaaaccctgtaaatatacaaacttactgaaacaaagacatgacacctggctattaccagatctcattggtattgtttaattcacaattttttttctttcaccggtccagccacttttggctctggaatagcatatactccaactgcagttcattacagccatcagtcaagagcactttggcttactattttggtggcaaataataataataataataataatgactttacaccttttttagagccgaattataagtgatgtggctttagattctcagatttcatttttcaggctaccaaataaataacaattttaaaattagacaaattttatttatttttcagaccacgttgatgagcgaacaatatgcaatggaattgccccagaaaaagatgtagatggatttcatattatcaatattggaagattgtgccttgatcagcattctctcatacctgccactgccagtgctgtttgggaaataataaaaagaacaggttggtaatttgtggtctgcaggacatggatgctaggtgctgagctgagcctttgtgcactgagacttgatgggactacctcagtcctatagagtgacagaaaatcataatccataaaacgtcagtgtacagagagatataaaattgtagaagtcaaaacataatacaatcctggctaacacagtaaaaccctgtctctactaaaaatacaaaaaattagccaggtgtggtggcgggcacctgtagtcccagctacctcggaggctgaggaaggagaatggcatgaacctgggaggcggagcttgcagtgagccgagatcatgccactgcacttcagcctgggcgacagagcaagactctgtctcaaaaacaaaacaaaacaaacaaaacaaacagaaaaaaaaatccaaaataaaatgaaacgaagagcattagccagattatagataactgcagttgcaacttataggaagtgaattttccacatagtagtggtatatgtcggcctttaaaatgtaaacttcatgcattttgatgaaaacttttctaaaatatatttttctgtacctttaaaaatatgttctgatcacatagttatcatttctattggcttgggttttaattttaaacatttacccttgtactgtactggatacggtaatgctctcacagactcttacaaaagaagttttctttctgagaaagaaaaacttccaagggaaaacagatcctagaatcatactcctacactgttagtattggaaaatccttagttctaacttctttgctttacttatgaagaaactgagtccaaaagaagtagaaggttctacaggctttatttttttacatctttctaagtctgtaagtttagtgcttctttcctatggagtaaaatgcatgagctttgtgaaaaatgcctcttttcttacttgttttgttccagcrttgctcaaaatttgattgccaattaagttcgacattgttgtactttgctttttttataagcagttaatatatgttaaaactctactcttctaactcttaatgtgactctcaatgtttaaaagcaacttaatgtcaacttaagaatgtctgtggtttttaatgagtacataatcagagaagaagtgacaaatcaaagaagcataaaatgaattatttataaataatgaatgtgctcatattatagataagccacataataattcagatttaattagaaatttttaaaagaatgtttcagttggctgtacaaatgtttaatttacttcttgttgtcaattctgcatttaaaccgaactctgtatyttaaggaattcaaacatttggaaaaaatgtggttgtggctggaagatccaagaacgtagggatgcctattgccatgcttttacacactgatggagagcatgaacggccaggaggtaggtagaaccttgcagattctacactctctcgcagtattcttacttcttacatcatcaagtaaacacttttgataatgcagcttattatatttgtgggtttatgcagttcaaagtctcctttattcctcatttagtgatgtgagagtcttgaaagtgactgtaggaattactgaaaatatgtggccattttctctatttttttttttttggctatatgcactttgtttaaataattaacaatyagacattaagaaaggtgcaaagctactagatacaaaagattcacatgccctcaggaaatacaaaacaagacatctcttggatgtagaattcctrtagtggcaaggtcttagcactttagaaatcagctagttagtttattttacagacaagaaagctgaggcttagagttgttatctgattatataggttaaacaaatagtcattgtcctatgagtagtagtgacactccaagtcactgacaaagcccaggaagatgtgttagccttagagaacatgcagccattccaggtgttggtcatctgaacatcatcccaagaccttggtttcttcagcagtctaatagctagatacagaatagctccccagaaatttgcaggggtctgtcccacagaccctgacccaacgatggatgaataaagtacactgacacacagatattctgctttaccagtccagctgagcatytgggccgcttacagactccacgcacagtgctgtaaacagttgygactatggtctcaatcagtcagcaagacttatgtttattcagtaaagattaattgacaaaggcttgggtcaacaccactagagtgtaattgacattgtggacttcccaagtagaaagcaattaagcacccatggtagatcaaaggttagtcttaggaccacacgagtaaacaagctagttaggtaaactctccacattcctttatttctactctagtttatttaactaaagataaggggactaggctgccttcagactgatttattactgaagttatgcaaaccctcagaccttccaacaaggtttgtggctattaaaactaaaatttttcccaccagcctgactgaaccaccacagaaatggaaatggagatggaatgaaaaggaaatacagcaaaggggtgatggggcattgttcgtggttgtctgagccagtgctgtgggaggagggcacaagggttattcagcgtatcactgtctgctaaattctgcatcttgttctaatctaggtaaaacaccaagttttcatgttcttaatagaagtagttattggtttatctatgtgttagagacgtgttgtactttgtttaycatttattacttctaatctttctccccctaatttttgatacagtacttcattggtttctctaattccaaagaagaggatgggctactttgctgcttgctttctaatatttaaccagaatgatagacacctatgtgctcatcatgtacagcacacgcacacatgcacacatgcatgcacacacacagcatatatatatagatttcttattattaaccttgttgaattcgagtttcctgatctcaaactttcaataatacttgttttaggatcttgattgacatgatacttatgacataatttttaaaacacaaagctctatggaaaaataatcccagtattaacttatctaaaatgatgaatgatgacacttttgaataatattttccctttctatgcctaaagaattaaatattgccagaaatcaatacatatatatatgtgaatcacagtaaattaagacttgataatgactccagataactttaaaaagccttagttttgaagagctcttagcccaaatccagtggtatgacagttttcatggtacccatctccaaagttgcattcctagtttcactgttcacttctagcttagtctattgctgcttatctctttctctctctctctgtaaataaagatagtgattcttatttgcctttatgtaataatttctgtgtcttacctaagcaaggtgtattagtctgttcttgcattgctgtaaagaaatacctaagactgggtaatttctaaagaaaagaggcttaatttgctcacggttctgcgggctgtactagaagcatggaggcatctcctaggcctttacgaaggcctcaggaaatgtataattgtggcagaaggcaaaggtggagccagcatttctcatggctggagcaggaagaagagatgggggaggtgccatacacttttaaacaaccagatatcatgagaactcactgttgcaacaatagcaccaagggagatggtgttaaatcatgagaaagtgctcccatgatccagttacctcccaccaggccccacctccaacactggggattacaattgaaagtgagatttaggtgagattcctgttccagccatatcacaagataaaacaatcagtaatgtttacctaagtatactatttcttcttggaaaattttgaccaagagccaatttgcagttttttttttttcatttgcaatgttgtttttatctgtaacataacaagcaacagtgtattgctccgtgatttgctcagtactttctcttaaaccatcctcattaattctcagtaatcctagcatatattaatgttattcccattttacagctaaaggaaatgagctttagagacttcagaggactcatctaaggccatgcaaggaaacaggcattctggggagctgggttctgactttgtggttaagaggatagacatggagtcaggccccctccattaccaagccctgtgatctcgggcaagtcatttaatctgtgtaggcctccgctttcctcatctctaaaatgacaataatattaatatctcctcaacttggttattgtgaaaagtaaatgaaatattaatgtaaatcactaattactgtgcctaacatatagtaagttaagtaagctattggtgcatgtagctgtggcattattacacttaagtcaataataatctgtagccattctaactatcatgtgtgaagtaacatgatctgagattaatgatgtgatttttacctttatttggattttattttcttctggtggattttgtttttgcattttttggatcatatctgatcttttctgtaaaaatttgaataaactcagaatttataaaagtttataaagtatttgattagaaataggacatcataattctccaaatagtactttacaatatatttttaataggtatcaatatattgcatgctaatttcttgataaatttcaatcttgaattatatatttgtctataaaatacctatcaaaatttatttacctcttttatatgcaattttaaactaggttatcctgtgaattaaacattttaatttattttttatcatgtatgatttatttatagatgcatacatatgcagtaaaagcagtaaaggaagcatgagaaagataaacacaaattgatggtggcagtgacctctggggaaagaattataggataaaaacaaaaacatatatactttaaaaagtatacttcgtgttatgaaatattctcatttgaatgcatgttaaaatggaataaaagtagaataagttataatactggttacttagaaaccagataattaaacttacctttattatagtggtacctgggtgccgttagaattacagtaactaaaaggtaacaaattatactaaaaatgatattggaagatttgcaacatgggtggtttttagtctcatgcatatttaagaggagtatgatgacatgtattattaatataatgaatcattgagagctgcttactgaaggtttggagtctgtgggaaagttaatatttcaaacatgcgtgtctgttagggcaataattatgggcagtgactccatgtgcattgttagctaatgaagataatgaaggaggactaactcggcaaatgcatatctatagaacttgttctaatgacactcaatgttgagcattcagctcatgccgtgtatttatttcttttccagaagacatgcagaaccctagtgattcgtttttgtcttaaagccaaagataattgtactagaagaaaaatgaccatactgtaatttagcttgattaatatgtgtctacctatggctagcttttagttttgttattaaggacatggatcctagctgtttcttgagtattttttttaattccccaagggcttgaaatatttagaggaatgagaatgtgctaaaatcttaaagtaaagggatagtgctgacactcaatacaacaaggaagcaaggaaggagttaccttctggtgagaacagaccatcacagaaggctttgcagaggatatagcactttagctgctatgtagtttataaagagtaggtgagagatggttcctgtcctcccagagctatagtcttggtggtggtgatgggggaacaaggggatatgatatacaagtatgggtaatttaaattttaaatagtcagtggcacaaaataaaatttggtatccctaaataaacattytatatgcttctcaaaactcatggctaattgaggtgacatgaagagaatgagctccactaattattagaatgtttgagtaccrttgtgaccacctgtagatcattgtatatttgtaaccaaacacgagtccagatgctctctgcttgtgtagttcaacaagagcaaggcctggtagaaagacagtaactttattaaccaaaactagtaaaaaaaaaaaaaagggaagcagccagatttctatccaaagtaactcctttgatttggggcagggtggtggtggaaggcagaggtttaaaaagggaaaacttgataaagaaggcatgtaagaattgggtggagtaaatgtctgtgtgtcttgttctggtggctaacttgggtcgcagtccagctggagtgtgggctgatgtcatctcaacaacggctgggttgttaaccaggggccttgaagtaatctctggaattttgtggctgggtctccagacttagtctgtctgtctcaagattagctcctggaacttctaagaaggcacataattagatactagcatacggttagatagatatgaggggagtatatactgtgagaaagggagagatgtggagtcttttttaaggctaaggaaagtcttctgtaatttgcctcaaggttgtatcttgaaacccaagagaaagaaaaaaaaagttgaaaatgcattttgaagttaagctgcccagttacatttttttttttacttatttgtatgtagtcatctaccagtttcactttctttcagaatgaaaactgaataccattggttttagcatagtgtctttatttttagatttacaatgaggaagtaaagtttccaatttctctaaaacatttatttttccttcaagattacaaattgtcataatgactaaggcattatggttactaactgtcataagaggatatagaatcagattttatttcatattcttttattttaattttgaatttttacttttgagacagggcctcacgctgtcacccagactagagttcagtggcatgatcacggctcactgcagcctcaacttcctggacacaggtgatcctcctgttgggagcacggttgttgggaccacaggcacacaccaccacacccagataattttttgtatttttcgtagagatgggggtctccttatgttgcccaggctggtctcgaactcctgagctcaagcaatctgcctgcctccacctctcaaaatgttgagattacagacgtgagccactgcacccagyctcatattcttagagtaagtttctcttggcatacttttatttctaagtaggacatatcttctaattaggtgagatttccctaatcagccacaacatggagttgtatgccgctcctttgactaaaaggttctggcatcattggagtaatattgatgctggctgatttttaaagagtattttgacagggccagcaaccagctggttttgcttagagtccagtgggtctggtgtttttcttgatttcattcagccaatactcatctagtacttattatctgggaaacactgtgggatactactgcatcccacagaaaaagacttagtcctgtctctccaaaagttgacagtctgaatcatcaggattcatctttgcagtgggtgttttccgaaggcactgcctctgcattggcattcagttttcacactcaagctgtgctgctgcagcaacttactgtatctcaggtagtttttcttcaagaggcaccctatctaaatggaaaatgacaatgatttttgccagttgaatgccttccctttgtgagaattaaccccagttgtgaaraagaacttttttttttttttttgccagcctggaagttttatctcccacctacaggacataataacacagtagtggatgcttgaggcagtgcaacgtgatgtgagtggtatgtgtgattaagctcagcctggtggcaggttgagccaagctcttttaggtttcaaagagaggagccaaataggaacgcctaggaatgcaggagtcatgcaaagtgatcacaccrctgagactgacactcttagtcttattggcagtggagtggcttgggatgtttgctgcctctggggaaggaaccattgtctaactgggacaggggatggcaggtatttagtctctgccactctcatcccactacccccagcttagaaggaaaagatgttggggatattatgttttgtgatgtctctacattgattagactttactgaattacatatttgaatttgggtagtggaagactgtagaaaagagcaaatgatagttctattctcattttctaaattgaataataggagcactgtttcattttcagtgtcttctaaattcagtgtcttctaaatttcagtgtcttctaaattctaaatttcattttcagtgtcttctaaattcagccatttagtatctgcacagcactgcacttggaaattatacattattatcagacaactggsactatcacactgttgaaaagaacagtaaagcttattttaaatggagagtgaagtccgaatctttttctttcaattcctctctttctccatgacctcatagtgttgtaggacatttttctaagttcagctaaaagccgagttcttgtcatacaaccaggaaaaattaggtttgtggacacataaaagggtgagaaaaatggaatttattgggtgaaaaggaaaaactcagtaaagtgagaaggattccggttaacaggcccaaatctcaccaactgaatcccagattaccacccaggaacaggaaaggccaggctcctaccatggcaaatggcatgaatttccatggctccaacccattctctcagagcgccacccagtcagaagttctctgaggagccctttttgcttggctgtctcatttcgccctctaaagaagtacatctaactgccattagaataaggattgtgataaggacaaagaccaatcttaactgcttgctgctgacagagggtgctgttttggggaaatgtcagtccagtctccctcagaagcctatctaagggtccccggcagaaggggtcattgtctgaggctccagttgcttgaccatttggagtatgatggcctgcaggtgagaagagacaaactggattattagaaaacatgtatcaaaacaaaacaagttggggcaaggacagctcaaaaatcctagaccttttaycagtttgcacagggagagtgaggccaaaagcctgactggttaaaaaacaaaaaaacaaaacaaaacaagaaaaacgtttaagttctgggatacatgtgcagaacgtgcaggtttgttacataggtatacatgggccatggtggtttgcygcacccatcaacctgtcatctaccgtaggtatttctcctaatgttatccctccccttgctccccaccacccaacaggcccaggtgtgtgtgatgttcccctccctgtgtccatgtgttctcgttgttcaactcccacttatgaatgggaacatgtggtgtttggttttccgttcctgtgttagtttgctgacaatgatggtttctagcttcatccatgtccctgcaaagagcatgaactcattcttttttatgggggcatagtattccatggtgtatatgtgctacattttcttaatccaktatattattgatgggcatttgggttggttccaagtctttgctgttgtgaatagtgctgcaataaacatatgtgtgcatgtgtctttataatagaatgatttataattctttgggtatatacccagtaatgggattgctgggtcaaatgatatttctggtcctagatccttgaggaattgccatgctgtcttccacaatggttgaactaatttacactcccaccaacagtgtaaaagcattcctatttctccacatcttctccagcatctgttgtttcctgactttttaatgatctccattctaactggcatgagattggtatctcattgtggttttgatttgcatttctctaatgaccagtgatgatgagcttttttaaatatgtttgttggctgcataaatgtcttcttttaaaaagtgtctgttcatatccttcacccactttttgatgggcttgttttttctttcttttaaatttaagtttcttgtagattccagatattagccctttgccagatggatagattgcaaattttttctcccattctgtaggttgctgttcattctgatgatattttcttttgctgtgcagaagctctttagtttaattacatcccatttatcaattttggcttttgttgccattgcttttgatgtttcagtcacgaagatattgcccatgcctatgtcccaaatggtattgcctaggttttcttctatggcttttatggttttaggccttttgtttaaggctttaatccatcttgagttaatttttgtatgagatgtaaggaaaggttccagtttcagttttctgcatatggctagccagttttcccaacaccattgattaaatagggaatcctttccccattacttttttttgtgtcaggtttgtcatagatcagatggttgtagatgtgtggtggtatttctgaggcctctgttctattccattggtctatatatctgtttcggtaccagtaccatgctgtttttattactgtggccttgtagtatagtttgaagacaggtagcatgatgcctctagctttgttctttttgtttaggattgtcttggctataygggctttttgttggttccatatgaaatatatttttttctaattttgtgaaaaaagtcagtggtagcttgatggggatagcattgactctttaaattactttgggcagtatggccattttcatgatattgattcttcctgtccatgagcatggaatatttttccatttgtttgtgtcctctcttatttccttgagcagtggtttgtagttctccttgaagaggtccttcatatccctttaagttgtattcctaggtattttattctctttgaagcaattgtcaatgggagttcactcatgatttggctgtttttctgttattggtgtataggaatgcttgttatttttacacattgattttgtgtcctgagactttgctgaagttgctcatcagcttaaggagattttgggctgtggtgacagggttttctaaatatacaatcatgtcatctgcaaacagagacaatatgacttcctctctccctatttgaataccctttatttttttctcttgcctgattgccctggccagaacttgcaatattatattgaataggaatggtgagaggaggggatccttgtcttgtgctggttttcaaagggaaggtttccagcttttgcccaatcactatgatattggctatgggtttgtcataaatagctcttatkattttgagrtacgttccatcaatatctagtttattgagagtgtttagtatgaaggggtgttgaattttattgaaggccttttccgcatctattgagataatcatgtggtttttgtctttggttctgtttatgtgatggattccgtttgttgatttgcatgtattgaaccagccttgcatcccagggaggaagccaacttgattgtgccagttaagctttttcatgtgctgctggattttgtttgccagtattttactgaggactttcacattgatgttaatcagggatgttggcctgaaattttctttttttgttgtgtctctgccaggttttggtatcaggatgatgctggcctcataaaatgagttaagggggagtccctctttttctattgtgtggaatagtttcagaaggaatgataccagctgctctttgtacttatggtagaattgggctgtgaatccatctggtcctgttttttttttgggttggtaggctattaatcactgccttaatttcagaacttgttattggtctattgagggatttggcttcttcctggtttagtgttgggagggtgtatgtgtccaggaatgtatccatttcttctagattttctagtttatttgtgtagaggtgtttatagtatattcttctggtagtttgtatttctgtgggatcagtggcaatatcccctttatcattttttgttgtatctatttgattcttctctctttgcttctttattagtctggctagtggtcaatttattttgttaatcttaaaaaaaatagcattttttaatactcctgcattccttgattttttgaagggttttttgtctctatctccttcagttctgccctgatcttagttatttcttgtcttctgctagcttttgaatttgtttattgttgcttctctagttattttaattgtgatgttagggtgtcgattttagatctgtcccactttctcctgtgggtatttagtgctataaattttcctctaaagaccacattagctgtgtcccagagattctgttacattgtgtctttgttctcattggtttcaaataacttatttatttctgcctttatttcgttatttacccagtagtcattcaggagcagattgttcagttttcatgtagttgtgtgtttttgagtgagtttcttaatcctgagctccaatttgattgcactggggtctgagatacagttttttatgatttccattcttttatatttgctgaggagtgttttacttccaattatgtgctcaattttagaataagtgtgatgtggtgtcgagaagaatgtatattctgttgatctggggtggaaagttttgtagatgtctattaggtccgcttgctccagagctgagttcaagtcctgaacatccttgttaattttttgtctcattgatctgtctaatattgacagtgtggtgttaaaktctcccactattattgtgtgggagtctaactctctctgtaggtctctaaaaacttgcttatgaatctgggtgctcctgtattgggtgcatatatatttaggatagttagctcttcctatttcattgatccctttgctattatgtaatgcccttctttgtcttttgtgatctttgttggtttaaagtctgttttatcagagactaggattgcaacccctgctttttttttttgctttccatttgcttggtaaatattcctccatccttttattttgagtctatgtgtgtctttgcacgtgagatgggtctcctgaatacagcacactgatgggtcttgactctttatccaatttgccagtctgtgccttttaattggggcatttagcctgtttacatttaagtttaatattgttatgtgtgaatttgatcctgtcattatgatgctagctggttattttgccccattagttgatgcagtttcttcatagtttccatggtctttacaatttggtatgtttttgcagtgggtgatatcagtttttactttycatatttagtgctttcttcaggagctcttgtaaggcgggcctggtggtgacaaaatctctcagcatttgcttatctgtaaaggattttatttttccttctcttatgaagcttagtttggctggatatgaaattctggattgaaaatttttttctctaagaatgttgaatatttgcccctactctcttctggcctgtagtgtttctgcagagagatctgttgttagtctgatgggcttccctttgtgcctttgtgggtaacctgacctttctctctggctgcccttaacattttttccttcattttaaccttggtgaatgtgacggttatgtgtcttgttgttgctcttctcatggagtatctttgtggtgttctctgtgtttcctgaatttgaatgttggcctgtcttgctaggttggggaagttctcctggataatatcctgaagagtgttttccaacttggttccattctccctgtcacttttaggtacaccagtcaaacataggttttggtcttttcacatagtcccatatttcttggaggctttgttccttccttttcattcttttttctctaatcttgtcttctttctttatttaattaagttgatcttcaatgtctgatatcctttcttccacttgatcaattctgctattgattcttgtgtatggttcacaaagttctcgtgctgtgtttttcagctccatcaggtcatttatgtttgtctctaaactggttattctagttagcaattcctgtaacctcttttcaaggttcttatcttccttgcattgggtcagaacatgctcctttakctcagaagagtttgttattacccaccttctgaagcctacttctgtcaattcatcaaactcatccttcatctagttttgttcccttggtggtgaggaattgtgatcctttggagtagaagaggcgttctggtttttggaattttcagcctttttgtgctggtttttcctcatcttcgtggatttatttacctttggtctttgatgttggtgtccttcggatggggtttttgtgtggacgtcctgtttgttggtgttgatgctactcctttctgtttggtagttttccttctaacaggcccctctgctgcaggtctgctggagtttgctggaggtccactccaatccttctttgcctaggtatcaccagtggaggctgcagaacagcaaagatttctgcctgttctttcctctggaagcttcatcccagaggggcccccgccagatgccagccacagctctcctgtatgaggtgtctattgacccctgctgcaaggtgtctcccagtcaggaggcacaggggtcagggatccacttgaggaggcagtctgtcccttagcagagctcgaatgctgtgctgggagatccactgctctcttaagagctggcaagcaggaatgtttgtctgctgaagctgcgcccacagccgccccttcccccaggtgctctgtcctagggaatgagagttttatctataagcccctgacaggggctgctgcctttctttcagaggtgccctgcccagtgaggaggaatctagtgagacagtctggctacagcagctttgttggctccgcctccttcaaacttcctggtggctttgtttacactgtgaggggaaaactgcctactcaagcctcagtaaatggtggactgcccccctgccaccctgaacaagctcaagcatcccaggycgacttcagactgctatgctggcagtgagaatttcaagctagtgggtcttagcttgctgggctctgtagggtgggatccgctgaactagaccacttggctccctggcttcagccccccagagtgaacggttctgtctcactgatgttccaagcgacactgggatatgagaaaaaaactcctgcagctagcttggtgtctgtccaaacagccacccaattttgtgcttgaaacccagggccctagtggcgtaggcacccgagggaatctcctggtctgcaggttgcgaagactgtgggaaaagcgtagtatctgggctggaatrcatcgtccctcacatcacagtttctcacagctttccttggctaggggagggaattcctctaccccttgttcttcctgggtgaggtgatgccccaccctgcttcagttcgccctctgtaggctgtacccactgtctaaccagtcccaatgagatgagccaagtaccttagttggaaatgcagaaatcacccaccttctgcattgatctcgctgggagctgcagactggagctgctcctatttggccatcttgccagtcaccttcttgttactattcttaacttaaaactaaaaattccaccctcacgagcagatagcaatgtataaaacacaatgcaaatgagaatagtgaagaaaaaggggaggagagggctggaactaaaaatagagccmaagacttttactaaatataggcatattattaggtctgcatagatacattcctactgtcaagcatactgcattttatataatggtgctgaatgtacgtttggtgaatttatttaattgagtttgaactagatgtgctatgattgggtcactaattttatcctgagagcttgttagcaggaaaaaaaaaaatgacagttatccaatgaattgtctttaagattaaaaagaaacatgtgctcaataaaaataaaacatttttctaatattaaaactaaagtatttctcctaagggattttataaacagaaaactataaaataaattgaataatattcataaaatgcttgttaacaaaagggccacattttatagggcaatttcctttatcatttaagcacagattaaagctaccattggcaacattactyttccttccctaaacatttcttctcattctctgtttctgggacattcttttcctcccaacttttaaaccagcagttctcaactttagctgcccactagaatcatcaggaggctttaaaaatagagctacctatgcccaacacagataaaaattaaatcagaatcattagaagtagaacytgagtgtcagcaagtatattttagaaggctccatggaaaaatcccagtgtggtcagtgttgagaatgatttctcaaggaaacattggaatgayaccaggacttttttattcatagccagtccctcagtgggcctttgcagccctatagctttaaatatcatttctatctcctgtatactttagaccatataaccactatgcacttgagaactccagttgcatgtctaatacccatctcaatcttatatgcaaaccttcactcctaattttactccccttagttttccccatcttagttgagtggtaccatcagtttttctgattgatcagtcaatccttgacttctctctttctcttacatcctttgtctaatattagcaatctgtgtaaaatatgcctatgatatcaccacctggactaataagatcctagttaagaaaacttctatttctcacttggaacactgaaatatttatgaactagtttccctgcatccacccttgtcccatctttcattcacagtctgttttccacatcataggtcttgatcacccatgtcttcctgtaacacccatgacaacatgacaccagaataacatccaggttccttaccacgatatgcaagaccttatatgatctgtccctgggctgtatctcctaactcacttcctaccattctcatgccccatcactgacccctgccctagccatatctgctttcctggaatatgtcttatgtgcttatttctcagtgtcttttcacctggtttcctttcttcctgaaatgctttttttcctcaagttacttacataatgtatttcctcacttccttcaggtttttgtccaaatgttacctagggttgcccctgaccaccttaccaaaattgcatttagtgtctatagagtttctctgtagaaaggttatttttagtttgtttttataatttatgtattcattgcttaaagatgcaatagtagcttgcagagataaagaaatattcaaatctagaatcttttggcttcatttgtctaaaagagatctcaggcttctttttttccattgctgttctgtgcatgattactgagttttccttcctgtgattttctctcagtgatttctcctttaaaccacaccgtgacatgaactaatatattgggaatgactcagattttccgtatcccgagaaagtgacaaagcaaaactctatatgtgaggttctagytcagattggtttgccattttgctttacctgctgattcaggatcaggcagatgtttgaagatttgcctcatgggaaaggaagttgagacttattttgtgtttctgttgaagacagatctagaatcatggtagaagcagcaaaaaggtagactttagctcttatcatgaaatttcttacagtcaagactaagtaatatgctctcctcatatttttttggaaagtggtttatcagtgggaaaggatacaaaaagcrtatttaaaggggaattgaagcagaagygaaagaaatttgtactcacattaacaatctgtcttccctgacaccttcacctgccccatgcccttctcagatggagtaaataatgatgctcttgacaacactgtaacttctacctccttctaacatggaacctagcacactgtattgtgaktcttatttgtgtacctgctttccatatgagaatagagaattgtgtattctcattgcctagcatgattctggtatgttttctatacattttttttttagtcatgatttttagttctttattcttcaataaaatgaattattttccagagacaatagttagaatgcttgtgaaatctttctataagtaaaacagaagaatcwtgttttcagtgatggctgtagagttgcataggaaaacatcttactataggagtaaaagacacagaatccagagttgaaagctggcacatggacagtgctactcattgccagtcttaccgggaacattccatagggtctggttttttagcttactcagcaaataactatttcattctgctcagagtgaggctagagagccactgaaaaagtatatgcaagttttgcaagggcgcggccaagacacaaccagagaatcctgtttaagggatttataggatcatttattgattattgaataaatgaaggtagggaatggcccggaaatgtccaagaacagtgaattcctcattaaggtaatttcaagccccccccccaccaccaaaaaaatgatactaacaaatgaagcacattgtgctgtttgttctagctttgtttttttataaatagcaaatattatttgcttcaaattggcattctgtgctaatgactaacaactgtttgctagttagaaaactgctcaggtgggtcctagttgataattcttggttgaatctagatttttacacaataaaaaacatatcttgtctacctattaattactgatttctaagaaaactctaagattctagaagatagagtctaagtacagaagccctctgtatctgtgggttccacatctgtggattcaactatctatgattaaaaatattagaaaaaatataaataacaacaaaaataatataaaaatagtataaaactatttacatagcatttacattgtattaggtattacttataatacctaagtaataagtaatctaaagatgatttaaagtrtgtaggagtatatgcataggttatatgcaaatactatattattttatatcagaaactcgagcatttgtggattttagtatctgccagtgcggcaggtgccctggaaccagtccctcccagatactgacagatactgagggacaactgtattttattcttcctatgtcttagaaacatattataaaacactaggcacaaaatagttacttatagactctgcttatctagttctgtgtgatagaaaatgaggccctagcccacagtgttctcatatgcactctagaaggatacaactgtgagtgtgggaaaaagtcatctgaaggtcagagatatgcatcactcttgagtacctgctgcgacttgctagtactagctgycctttggaaaaagctgagaagacagaaaaaaattaggtgcagcaagccagaggattagttgaagacaattaatggacgataagaattgaatataggaatgacaagaattttcacatgccaaggaagatgagttaaataagaataggtttaagaggaaagctaggtgtcaggaccaggaacaggcatccaggtgctcaccagcaaaggtcagaagagtctgaggcattatttgaacacatttgcttttagctgtttggttcacctctcttcaacatcaggtcttccgaataacaggctgaatgcctttccatggttaatattggtatagtcataaactctgatcaatcaagttcaaatatgacttggatagtttctacggacatcaacaaccaaactgactgaggaatatcaagttaacctgatagtattgaaaaaggagtgaaattacctacaagggttttccaygcagattgaaatttatcctgatatacttttcttttgcctgcaactttacagattgttacttatatgtgtgtacaaatcactggatttcatgtctctgtcaaawtcttgatgaaataatcagtactgatggaaatgggaagtttcagtttcattttggttttgattttttttttttggtagggatttgggaggctctcatttggaatcagagaacacttgagtgggttgttaaggtattaaggaacattttcaaatgtaggaggccaggactaaaacagagatgggtgggtgctttataattttgataaccttgggatggttataaatatatactcaacattcttgagggtttatagtgagtgaaagaaagagaataaccaagggagacttttagacttttactgtaaataactgggcagaaggtggtaccaactaaaataaaaaaggctgctagttgcctctcattgttcttccttttcaaagttttcctaattatctttgatttttctatattaaccttagtatcaaattacatactyccaaaaagttcatttttattggactttgattatatttttaatgaatataggtggaattctaatctttatgatattaaacattcctatccaagggcatagtttatctttctagtttcttggtcttatttatatcttttggtgttattctggagattttcttttactacatagattttgcacattttttgttatgcttattttaagtattttatcttttgtactgctattataatgggrcctcttcttacaatgtattttctaagatgttatatatgaaagctatttacatctgtatattttatttttacttgattaatttattgaattatctcaatgtttcttattgtagtctggtttttcagatttatcaagtacattttaacttttatggttttttttctagtttcatttgtttattgttcaatttctacagttaaatgattcattttcttatttctgttttattgatataataatttgtccacaatttttttaacattgctttatatttattttataggatctaatatgaagtgttttcattataaatctttctaaaaattttgcaatgttgttttgttttattttgacccaagaattatttaaaagaatttttaaaaacttccaatagaagggtctccttatgaaggatctttttttttccgattttgtcaataattataattttactgagttgtaatcaaataaaattatagtctatctaattatttactttttggtattaattaaaattttctttgtaaccaagtttataccatttgcacatgagaagaaaatgtattatttattttctgagtttgatatagtcatatatataacattagttaagttattgacattttctgtatccttgatctgtcatgaactgagaaagttattcaaaaataaattaaacaaatacaatatattttgtttctatatatatctcctgtaatttcagcttaaaggaattctatttctttttcttatgtatatattatttttctatctttatttgaatcactcttttactttataatgtgtgcctctttgttttatttagtgctgaatttttgtttgacagaaagcattattttctggcattttcctgctacatgtttgctttcaacatttctaaattctgaataactttgttttatgtgtataatgtatgctgtatagaattagcaaaacatataattagattttgctttgtaagtcaatttgaaaatattgttcatttaaataaatgacaaggaaatttatatttgtttttatgataaatatatatggtaaaactatcatattattttctgttctgtttattgtttttattttttacagttttttctttgtgcattaaaaaaatatttaagaaggtttttattaccttaataattacaacattatatagtactcttaattctctatttatttatagggtggctactgatactctagtacaataaataaatgataaaatgtttttattttctcccctcattccttttgtctccgacctgctatttgccagtaaaaattatttgaaaaatatrtatttttttattttttactttatacttttaaatgttcttatactttgattatctggttggtcagcttttaaacatttgttgattcctgttattacatattaggcrgtcaacaaactttctcatctttgccctttctcattctaattttggtagttgcgttatttctgcatagtaaaagcaaagaccatttacatttgtctgcgttttagtctgttttgttctgctatagcagaatatcacagactgggtaatttataaagaatagaaatttatttctgaacarttacagaggttgaaagtccaagatcaaggtgccagcatctggtgagggccttcttactgcatcatctcatgatggaaggcagaatggaaagagagggcaagagcaagacagaagtgggctgaacttgttcatttagaaggaacccactcctgcaataacagcatgaatccattcatgagggcagaggactggtgtcctaatcacctgttaaaggttccacctcttaatattgttacaattgcaattccatttcaacataagtttgggagaggacaaacattcaaaccatagctgtttgttaccccaatcctcacacttttttaaagtcttgatcctataatcataatcaaaacttttagcagtccttttgctagtttcctcagacatactttgattaagtaaactgtgtcttttagcatgttccttaggaaagacttatgggaacaatatttcctgaattcttgcattttcaaaattgtttgcaacttttaatcttggaggcagatttgactggctataaaatcctttactctcatttttttacatgaatcatttgtagatacacaatgagataccatcatctcacaccacagtcagaatgactattattaaaaagtcaaaaaataacagattctggcgaggttgcagaggaaaaagaatgtttatacatcattggtgggagtgtaaattagttcaaccattgtggaaaacagcagggtaattcctcagagacctaaaaacagagctgccattcgacccagcaatcccattactgggtatacacccaaaggaatataaattgttctatcatagacacatgcaaacgttcattgcagcactattcacagtcacaaagatatgaaatcaacctaaatgcccattaatggtagactagataaagaaaatgtggtgtgtgtgtgtatatatacacacacactacatacacacacacacatacacacaccatggaatactatgcagctataaaaaagaatgagatcacatcctttacaggaacatggagctggaggccattatctttagcaaattaatacaggaacagaaatccaaatactgcatgctctcacttataagtaggagctaaatgatgagggcaaatggacacagagaggggaacaacagacactgaggcttaccggtgggtggaggttgggaggagggagggaattaggaaaactaattaatgggtactaggcttcatacttaagtgatgaaataatctgtacaataaaccctcgtgacatgagcttacctatatagcaaacctgcacatgtacccttgaacttaaaataaaacttaaaaacaaataaaaataaataaataaatatttttgtataatatttggtcataatgttcaacttttccatgacattttttgttgagtttattggtacattgctaagttcttaaattttttttgcctttgttttgccttttgttttggttctgacactttttaaatgtatctttctattgaatttttaaaaatttgcatatggtaaaatttactctttttggtgtgcagtttcattaatttagacaaatgcatgtagtcatctattaagttaattagtctaacaccactagaatcagaacagcttcatcactccccaaattcccctgggtttgctcttgcataatatccttttattgatgctgtgtcacatccatttttattactcatcattgaatgagttggattttttagatctactgtttacaggacacttctgctgggggttagaggaggtcctgtgcagccttctgactcctttattactttcacagagtcagattgctttcttctaaaatagcccctctatgtaagtgtgttcccacccactctaaactatactgggtcccggaaggctcttctgcctttatttctattctcactgccccaattaggaaagctatatttttttgcactttgggataaacttttcacagaagtgtatttttgcagtcaatttcagagatctgccgctgccggccatgttgtcattctccgcatttctttgctgcctttctccctgtatggtatctactaattgctgcttttggtaactcttaacatgtttttggagtctgtagaaattaggtcttccagtttttctaaaaatggtgatcatgtaacttttgttgttttggttaactgtgtaacatttgcacatcttccaggagaagacaagatgcagtcttagccrtattcttaccagaaatcctcttgactgcactttatcaccaactttccctcactctcctttcatggctcacactttaaatattggaatctcttgcctctcttgttctttcaaccctcccttaaggctttcatataaaatcttcctgtgatgtaccataacctgtgacaaaaaaattttgctattttccaaatacccactttcaaagttggttagttttttcctgctattcttttagcttggaatgcctttttcttccttacctgattagaacacttctgctcatgcattaagacctaaaaaaatgtatttcctcctttaggaatccctcctagacaccttctcaagacagaattaatctctcagttatgctcccacaatatattgtcccattttttgttcacttaccttattgcttttattatttgtttgcttgtcattatgaagacaatgagtatcctgtatactaatgtattaagcagtcaacacagaattttcaaattctgtatttcagggactctacttatagctctcctgtgatgatcggcacttaccctaatttggtctcattgattttcctttcatttaattgaagggtacaatattttggttcctcttggttttcttgtatagcttttgtgctcaaagtgatttagtcatgtcaaagtagcctttctattcttaggaaataagtgaaactcttctggatttagagcatttataaaatttttaaaagttcagtaatcactgatagaaattcttctgtattccaggtgatgcaactgtgacaatagctcacagatacacccccaaagagcaactgaagattcatacgcagctggcagatattatcatagttgctgcaggtaagtccttagtgactgttattttttggaatgtcatcagcagaataattcctgccctaaatgctgacatgtttgaaagctttttgagagagttagctttatgtatgactaacttctgttgattggattctgtctcttggcaatcattatatcagtccattgtgcctatgttagcatttgttacttcattatggaaaacccaaacagcttttgggatgacagattaagcacaagaacaatgtgcactttgctaattgctttgacgaacatggtttaacagcatttacggaaaaaggttggtgcaggtaaataatacattgtagctatggagaacaataaaacttgtattttcaagttgtatcaaggaacatagaatgttcaggtgaggggaaaagatagtcactatgctgccctaaacacagccaggctgaagaattatgttctgaagtctagactttaggggaaaagttgatggatgagaccatgtccaaaggagagtatctaggataagaatctttccaaaaaagatgacatatgaaatttggtctgatgaactgaggatgtttggtctggaagaaagtatgacctaaagagatacaacaactttttttttaacataaagaaaaaacccaagcccaaacttttataataataaaagctgcctcaaagtcaccagttcttgagatagtaagttccttatcactacagtgattagcaaaatagataaaaacataagtggcatttcatagagcattatttgtcaacgtttattggattttgccccattttggttgacaaaaaaaaaatcccctttcaacattatcaaaatatttcaataaattaaacaacatagctaaaaatgcatgtaaacagttgtaattattttgagcatatgttctttggggaaggaatcacattctttctttactccctaccatttaaaggaccattgcagagaatgtctgtctactgagtactaggttgggttcattgtgttttaatacttccttcaatgatgagactctttaattctctattttaatatacaaaagaaagctttatggaatatatgtatatgtatacttattatatttcataagattaaatttctttaaatttgtttgtgttttcctacagggtaagttaacaagaaagatattttagaacatagaaaaggctggaatatggggcttgtgtatggataattcacttacagatatttgagagtttatcatttactctgattttaattaaacgtgtacttttgaatagcaaagatagtactaaattcattcaattgaatactaaattcattcaattgaatattatttattcaataaatattggacccttcctatgcagcagtatctgttttaaattttaggaatacagcaatggatacaaatgatgaaatgccagccctcgtagaacttacatcttagtgggagagagagcaaataaacagtaaaatataatgccagataatgataagtgctataatgaaactggatgaaggaatagtgttttggggatactgttttagattgattgattggtgaagatctttcttgggaggtgaccttttgagtagagttcttgtcctggccattctccatttgtccaccagccccagtgtctgcccttccctgccctggtctggccctgagaggctgactaatgaagatggcctcacctgtgttcctctgacactggctcccagcaaggtttggcactagtaggatatctgaaggagaagaagagaaatgtcaagtcatggtgtttcttctctactcttttccacttctactgtctttctcttcctcctgcatcgatagcttttgctcagcatcctttccccgacagctaaggctctcactgggctgcagtaacaccatttcctcacccctacagacctaggaatggtacaagcttcctccagtttctaatctctaagagctgcaacagcttttgtttttatcttagcctgaatatatcgctgtaaaaattatttcattactatatggggtggattctgtttcccatggagataccgacagaagcagatctgtatgaagtaaaggcacaaatcaagaaccattcctgggggaagagcatcccgagcagaggaaacagcagataccaaagtccttaggcaggagcatgcttgatgtattccagaacacaggtctttgacggcttattatattactctgattttaataaaatattaataaattatgaggatactagtaagaaatgttgttgggaaggtagccagggttaactcatgaaggacgttgtcggccatggttaggattttgatataagccaagaatggctgacagcagatcaacatggtctgacttaggttttaaaggactgatcacacctttaaaaacatatcagacctcatgtctgcagttgtgtcaaraactgactttagaggtgtaaaagtagaaacagagaggagaggtattgcaatttcatttaatgggtctagattttgctctaatttgttttgtatttgaacacatagtttcaatcaaatttaataaaatatctgattcttctataggcccttttctggaacctagaayatatacatgactgcaggaacagtagttggctcctcatagagtaaaaatagaaatgttctttttcccagaaaaaaaatcagtaagctggtacagataaccataccacattgcctgtttttccaaaaaattacatttgggtgatatcaaatgcaaatttttgaactgcattgacagaagtcaggcatgtttagagagttagtaaactttttcagaccacagatcagcattaagtgaaatactgcttcagccactgataccttcatggcagataagtattatactgacttctttttagagacacttctgttcacacacaagacacagaatttgttgaataaagaggaatttgaatgctcatctttgtccgtttctaaccttaggaagaatgaagtttacattatccttaaaaggtattatttgactaatgttaacagcttgtacagaatatttgactattgtccttagataacatttatcaaatattatattgaatgagtattttattctagtggaggaaaatctctcatcatgccttcctactcgtggtttgttttattattatgacaaatggcacatgggtgatcacaatccacttgcaagaaacactgatattctcttgtaactaagtcaaagcttatgccataatgccaacactgttgtcctccttgagtttatcctctctagctttctttgtaaaggcctaaatcagccttgagtacagatatttaaaaagaagacaggaaaagaaaaagaaaaggaaaataaaggaacagaaggacaaggaagactcaagcctatataaaataaacaagacaggagccaggaggtactcaagctttaggtgtggtgggtgttgaggctgtcccacaagcatcccgctgagggtattttcttaccaccagagggcgccagtcaggtgagcagctacttcagatgtagccaagttggccatacaccatgctaatactagttagaagacattttaaacaaagacagtgggaagaagtcctgttccttgcttttttatttcacctttaatgcctcttactaaatacaaaagtatgttgaatgtagaagacagatttgtatgtagttctgcagtcttcttgaagaaataaatatttagccaatgggaaatttaggggaagaaaattgagaatttataagaaacaactaaagattgctacatttccagttaattaataatcacctggagaagttagggataaaacatgtaggcatttataaattatagaaagaatgtgagtgaatataaaaaataaatcccatataaccagacaataggaataaagtattgccagaatgaccatatcatgcattgtgtgtgggaamtaaacaaatacaaatagcagtgggtatttaaaggaaatagtgatctaatggcagaggtagccagaacggggagggctagatcactgtcataatgagaatgtcagcatatatggaaacaacctcatctaggagaactcagggtagaaggaggaggattgcgtgatatatatcagaaagaatgataatgtctgagagatgagagtgaagaatgtggtaatgaaatcttgacacaagcttgaagaaagtaaaagaggaaatcctgtgtgaagatcctgagacatgaatattagcttatttaatattaatgtcatccctccagtttctcatagtactactcctactgrcttatatatcactcacctttttaaaattgcccccaaaattgagatttagactcagttagaagcttagatctgcagaatcagaccctgtcacactatgcaattagaagtaagtagcttcaagtccctactcaaagccaaatctctgagttcacagagagagttaacaagtttctagagtactttaatgtaccatggttatagcacatagtacctgtttatagttgttatcttcattagactacagcaggtaaaggcgtggtatttttttttaagcttgctaggtaagtgcttagaacaatatctaacacatagtggttgcccagtaaatgtgagctgtgttgattttgagattataactacaataagaactttttcaaattgatacatatttagccgatataatctaattttttaagatggaattattctagttgttggatttacacactgtagcattatttttgggaactaccaaattattccagtttgtcatcataaagtagttgctaaagcaataaaaagtgaaatatttattcatgaaagagtagttcatgtcattaagtgtatgaatggagtgatttaggtgtaaatgttaagattaagaaatgatgggaaaggtggccgggtgcrgtggcttacatctgtaatcctagcactttgggaggctcaggtgggtggatcacctgtggtcaggagtttgagaccagcctgtccaacatggtgaaaccctgtctctactaaaaatacaaaaattagccaggtgtggtggtgggtgcctgtaatcccagctactcaagaggctgaggcaggagaatcacttgaacccgggaggcggaggttgcagtgagccgagatcacaccactgcactccagcctgggcaacagagcaagactctgtctcagaaaaaaaaaaaaagaaaaaagaaaaaaagaaattatgggaaaggtgaagaaagagtaaggagactattacatctaaagaacagtaagagtaytggatggttgaaaggggaggagcagtttagggaaaggctaaatcagctttkcacaagctactgataaagaagggaaagctagccagtatcaattctaagatcatgttggagatcattgggctttctcgtatctgctttaaggaaactgtaggctatcctaagtctgtaaaattctaggaatcttcattattcagcaggataggcaagtttttttagacattgtccacattaccctccacccatctgagtaaactctgaaactatattcaggaaatgagctgctgagtcaatgccacttgcatgtcaagctctggatgcagtgtcacggtggtgaaagctggcatttttggccactaagccatcccttccagcatgacgaatgaaccttcacagttgtaactttagagtgtctattgcaacacttttaatgacagataccatgatataaaacaggataaatgggcaatttagtaactcagaatattcatacttacttgtcataaagtacaaagtgaccaacgaatttcctttcaccacttctccaatcatattatcaagtcttagaaacactcccatcaaacattatcctagggctcaatagggttttcccccrggtgtatttcctcctccttgaaacagggttcgtaattttcaggaaaccaggacatggagaagttccaaggggtggggcaaggaaatagctccaccatccccacagctcatgcaacccgggagtacaacttgctcacttacggccctgagtgcttcctgagtgatgccagcacatttcatggcttcactcatactatagtcctttccatatctcatttcttatttgttattgtccagcttgtcctcttttgctagcctctgctactccacttaagggttccttccctccttcctaaaagttgtcattattttcatggtacagagtagtgaaaatgcacaggcctttctaaagtaagaattccaggatttaaattccrgctctgagacttgctgattgtgagcttggtctcatttctgaatctcaatctgttcattgatgtgatttaaatgataataataaaagtaacctttcatrgcgatgtctactttatatttttgatcttaactatgctgatctaagtagaatttcccatatctaaaatgatgccttttacttattgaaaggcattttagtgtggtttatgtgtaataccaaataaagaatatttaacacttctcaaaaaaaaaccttttgcatagtgtaatcaagctagccaatccatgtaaagagcatagcacagtgcccagtatattgcaaatattcaataagtgttatgtgttaatgtattctatgttaggcattgcatgtgaatatttaaacaatttagaaatgataaatcagttgattattaagctacaacttagcataactaaaagaatatacttcttggttgcttttgatactaatacagtatcagagtagagtagttcttataagcataaataaattaagaagtgacttacacatgagggaccaactttatggaaactttatttttatacttaagatgtatgccttctcaggatgacatcagcacttgttcatagatgtgtattatgttgttccctggatgaattccttattgcctctccctcctttggaacaacctgactttgagaggggagatagggaaggccgaggcacttagatgaaagggatttttttctctcaggcctttatccaccgtcccagtctccctctctctctgtttctacctcatcttcccacctcaggctattctggccctcacaacccatgcccaaagcctaagttactaagtaagcaaagcttccctggcctgcagtgagctttgtcaatacctgagagggcagcctgactactgatatttttcttggtgtcagtaatacatccttactgcaaaaacttagaaaacttggacaatagagagggagggaaagaaccttaatcccaaccaaagtgaaataaggtaaacaatttgatgtttgaccttgtactgttttatatttatacatagatctaaatatttaaacaattcttttgccttgtatatactatttgtatttagcagctctacaccatgtacgtgcttcttcataaaatgctttcttccaaaacagacttctaatgactctatagtattgagtgctatggatatactaaattttatttattcagttcttgactattggacatttagatagttccctgagttttactgttatgaataatgcagcaaacagctgtaaacatcttagattatttgcatcgtaaccyataatatttatcrtattggtcttaagtttattttcttagtaattattacttatattctaaaaacaaatgaacatttaagcttggtgtataataaaggcttacacgtgtgtttaatattaaagcatatttcataccttacctgtgcatttatgtaaagttttaacagagagaggagatagctgtgtctcgtttgtaacccattctccaggcctgttaccattaccaatcagtatactatgaagctttagatccttatctttccacaagagaagatagaagcctagtgtgtggggaaggggactcaaatatgaagtggggtgtagtatcaaaagaaacgtggtctttaaagtaaagagggtttggttttaaattcaattttaactttaaaaatcacatctaactctctgggctttattttcagctatcgcaaaatggaggtagtaatactagtgtttataaactgtcatgagaattacatccttagcacataatggctactaagtgaaggtagtttcccttcccttcattctcctattgtgtggtgagctcctattgtgtggtgagccaatcactaaaattacaacatgttttaaatgaaaatatatgaaaatttattatctattatgaaaagactttaactttctaatactttggtaatatagactgtacaaaaacatgtacaaacttttatatgtttccttgctcgttagcctcaaataagcaaaaacatttttccaagatcgatcacctcagaaccatcacaaagttttatttttttttcttcatttgactgagacccttgtgtttttctcctcaacttgttctaattacagggacttttgaaaagggggaatcttttcatctctaggttttttcaatctatggtattagtacatggttagctgaggttgattttttttcttttgaggctcttctctcaacacatatatatgtactayttctgatttttcatgagtaaaacaagcattgatagcaatatccaaaaaagcttcagtaaagaacaatttatatcaaagatctttcttcactgtggagaatcacagacttccttggaaatatactttagatggtcaaatgatacatcatttaaacttaattctatttgggtccatgcatgtatatcatgggcttgggaagaagtgaggttcttcctttcaagttatgtctgtagcctttgatattatcactttgttatatttttatgtccaggtctttaaaaggtttatgttaggaaatacttaaatatacccaaaagtgtataagaataatgttaattaaaacgttaacacttatgttatcaatacctaaatttgacagatgtgaatattatgtatattttcaatctacctgttttatatttctataacttgctttgttttgactaatgctatgactttcaagtttgcccatgctaatagatgtagcactatttctataatactcaattgctgagtatccattttctgttgatgaatatgtatgctatttccaatatattgctattatgaacagttctgtaatgtttaagtttatacatattttcttggagactcattcattcatccatccagcaaacactaattttgccactggtacatattaagccatatagcaggcattagaaaaatatatatatataaacttggttcagctcttgagaagtccagacactagtggaggagaaagatgtgcaaacaaattagtgtaatacagcttgctagtgcaatattagatacatgtatgtatgtatatgtacatgtctatctgtttagaaaaggagacagtgtgtgtgtgtgtgtgtgtgtgtttaygtgtgtaagagacacagatagattgaaaaataaaaacagagagagagagcatcattggagaggaagtaatagctcttttcctctgactctgaaaagtacatgaatgagtcgggtttcatcccacagaatgaacagaaattcactaggcagaataaaaggcaatgagacttctggcagcttagagctataaaatgctatgcatatagcaaagaaaatatttactctttcaaaatgacaggtgcctgtctgtgagttgtgaaagatgaagcataacatttaggaaaaaccagatatcataataaattaagaaattttaattttatcctgtaggtcataggcaacctttaaataattagaagcactgaaataacatcatatttgaattttagaaagatcacttggatagcccctgtgcagggataaaactggaagtagcattgatgtagttctacactaatacaggagtagatgaaagtgagaaggaaaaacaggaagtagactagaaaggcttactggctttagagactaagtatatggtgttgccattaacaaggaaggtatatagaaaggaagcaaagtttgagagaagtaaagatgagtgagtgggaggagataattaattcaatgtgaatgtgttgagttgatgacactaggtgttatattcaggtggaaaagtccaggagagggttgagatatgtgggtgtggggtttgggagagagctctgttctggagtgataattttggaagtcattaatatcagggatattggacacgaattcatggataaaaccatctagaataagtctgtttatagtgcatggactgaatttctatttcagacatctttgaagtgtgttggttgatatggttacttctataacattgccttcttgcttctgtatacctagtgccaatgaaagatagcctattcttattccagcatctacttcaattgatcgtataagaaaaaaactggtatttttatgaagctttgttgtttcatacctgttgttcttttgttacccygacctttatcggcttgaaagcattgtttgagtaacatgagagaatgtatttgataaaccaaaatgtgccatatagtggagacaaaattgtgtcctaaaaataaaatgatggactttacttcataaatgtttaattttttacatgtaaaagattaaatttaaacttctttaatgtaatgtaaacttctttaataaatgttcccagcaggcagaattttttgtttttgcttgcatttgtagtctttgcatactggatttattgtgaccatctaatgctcagttaatttctattatctgacttgtccaggttaccagcttgatctgatttttacagttttattgctcacagcctattatatcttcacagcacttttttctgtgaccaacagcctggttttagtaactctggatttcccatgtccattatttgattatgttaatgctttctaaaacacaaataaattgttttctcaattccttatggcttgattttttgatttctaaactagattgcctaaattktgcttgaaacatctattgacttattcactgttattctttaaaaactaggacctgaaaacgaaagttctacatgcaatggatgtgctcgctagttttttctagccatccagtgtattctctatggtctcaccttgtcctttattccttcacacttgtggtatccattcaacttccctggggctcaggtcaaggcaacttatgacacgccagggtctacattgctagtatggattgaaagctttctgtctctagctcagtcatgccagtaaatgattatctctgcatgaaaaacaggataggcttcacatatctaatagagagtggtgcgtaacgcacatatatttttcctagtgtgtcagtagatgattaaaaatcatattttaacttttatgtgcctttttggatatgtcccatgaatattatcactcacttcatcaagagactccaataaatgctatctgaagttacactgaggaggaggtataaggcatttttccccactatactttcagtggatttatctctttttaggtttttttttaaataaaccttacttttrtgggattatatgaagttgtactttatagttgtaaaaaagtsgtttaataacacccatatcaggcataaaatatgcctttacattttgtaaaatttamatatgttgtggtaacatgggatgacaagggtgctttcgtataaaggataaaagtcctctctcaatcatattgtgaagtatracaaaataataaagaggagaaggagaaaggaaatacaaagaaaggatctacatgacatatrtgatgagtagggaatagtaagaattatagtgggacagcactggagtgaaatccactgttctgtgacctccagcagccaggaccatgtcttatttatatttgtgttycttgtacctggtgaagaaccttgcttttaggactagaaaactccctgttcaatgaatgaattcctttctttagaagtcaagtgcttaaccggttaggcacggtggctcaagcctataatcccaacactttgggaggccaaggtgggcagatcatttgaggtcaggagttcaacaccagcctgaccaacatggtaaaacccagtcttcactaaaaatacaaaaattagctgggcgtggtggtgcacacctgtaatctcagctactttagaggctgtggcagtgagctgagatcrcrtcactgcactcctgcctgggtgacagagacagactctgtctgaaaaaaaagaagaagtcaagtgcttatcttgatcttggtttaagcttttttcctagaaggtaaggaagctcttcataggggaagatgatcctttcaggactcattcagccttagattctctttcataccttgtttgggactgttccacttcatgaaagcttaatatggcattgcatcagcaccactgactcagagcttgcacctgcagagttcaaaaaaaggtaggggagaggcaaagaattaactgagaaattactgtcttcaatgaaaaaactagaaaataccattgctttactttctactgtgggtaggaatataagcctttctgtaggtgaagtygtcattycaatggtgtattcagagcatgktgttactgaatgtctgttgcagacaatgtgttgactatcagaaagtgaaacaattttattagatctatagtcattattaattgtgtcattttaatagcatcagcatatctaattaatacctaggaaaattgatatttaaaaaatgtagtgatcaaaatgttacatgtcagtgcttatgtaataatccatacagaggtggtgtttgaaatgtactatggagactctgacggagcacctggttacctgctttaggtgtggctttggttctgaaatagagcagttctgagaaggaaggaatgtgtattggtatatatctgtggtgcgttctaaggcaactttctatgaaagtcctttctttttactcatttatgtagttaaagacataaatgttagactgaaaccataaaaaccctagaagaaaacctaggcaataccattcaggacataggcatgggcaaggacttcatgactaaaacatcaaaagcaatggcaacaaaagccaaaagagacaaatgggatctaattaaagagcttctgcacagcgaaagacactgtcatcagaatgaacaggcaacctacagaatgggagaaaatttttgcaatctacccatctgacaaagggctaatatccagaatctacaagaaacttaaacaaagttacaagaaaaaaacaaccccatcaaaaagtgggcaaaggatatgaacagacagttctcaaaagaagacatttatgcagccaacaaacacaagaaaaaatgctcatcgttattggtcatcagagaagtgcaaatcaaaaccacaatgagataccatctcacrccagttagaatggcgatcgttaaaaagtcaggaaacaacagatgctggagaggatgtggagaaataggaacacgtttacattgttgggagtgtaaactagttcaaccattgtggaagacagtatggtggttcctcaaggatctagaactagaaataccatttgacccagcgatcccattactgggtatacacccaaaggcttataaatcatgctactataaagacacatgcacatgtatgttcattgtggcactattcacaatagcaaaaacttggaaccaaccccaatgtccatcagtgatagactggattaagaaaatgtggcacatatacaccatggaatactatgcagccacagaaaaggatgagttcatgtcctttgcaaggacatggatgcagctggaaaccgtcattctgagcaaactgtcacaaggacagaaaaccaaacactgcatgttctcactcataggtgggaactgaacaatgagaacacttggacacagggtggggaacatcacacccccaggcctgtcgtagtttgggggggcagagggagagatagcattaggagatatatacctaatataaatgacaagttaatgggtgcagcaaaccaaaatggcccatgtatacctatgtaacaaacctgcatattgtgcacatgtaccctagaagttaaagtataatttwaaaaaaaaaaaaggcttctggatctgtcttttactgaagcacatttcccccacatttatttttgtttaattcataattgctcattttaaaaatgacttacctttgttacaaaatgtgagaattaacgagtactgtgcagaagtgtgggctttatgattgtggttggaacaaattcaaataactcatagtttttctctgagtgtgcagattgcaggcaattcacttagaattttattaatatgtgcctttcagatgaagataataatcaatataagaatcagatattacattgtaaaaaggggcaagtgcattgcagtaatgtttttgttgagtttctattatgtgtttcataattcctgcttaatatttattttaacaaaagtcagaaagattccttgtctctgtaaaatacacagacacatacactcccaaatccacattaccatatacatccttcccagggtagttggtcaggatatacttaaaaataatgtggtgcaccatatcaaaaggagtgagaatccctccatgtgtactaagagtaacatacattcttgtaggtcactaagataccacccccaaatttacttctcttgaataaaaaaacatttgaaggggttccccctcctctacttaatgataaattttatgacgttatagtggaagctctgcaaagggttttgagcagtttggaaagaactcgggaaatggcgttagttttactgcagcctagctacagaattagatagtaaacataagtaaatttctacaaatacaaataaatattttttaaaacttttttgggagacaagcttgttaactaacattatctcggttcccaaaatactacctttagaaatttatcctaaagaatcatattgaggcttacagagataacatacaaaggtatctgttataaatttatttatgatcgcaaaaagtggaaacactctaaacattcaacagtgttggaacatttaatgggtgatggatgatggtgtatatctataggaattctatagatgcaatgaaattatattttaaaaaacatttgtattcgattatattcattacagaaagagatatgaccacacacagtcatgcatacacactcacaaacagaaaacaaagatagaattaaaaaatacaacttgagaygttatctctggtagataaatatatattcctttttatcattttctgaattctctaaatgaattttctaaaatgtattgatttcatattataaagcaaaataaagaatatttagatgacccrtttccaatcactggcaagattctgcctgctgtcatgttgttttctgcagctgttactttttaatatagaggagcatggaaacaatgtattaaactgaaattgcttgtctcctacaaactaccaaacacctttaattatttggcttttcctgggacaaagtaatgtgaattaaatggataaatcatgtagtatgtgaattattcctcaataaagcttttttaaaaagacaggggagactggaagccctagggatactaaaatagaggataatttcggctttcaaattcatttccatatatgtagtataaagaagtcatctagttcttaattagcgccaagaggaaggagtggggcaagaatatgagggaaagagatagaaaagaarcccctctacctgctctcaattgagttccttacttttaccattatcaaatgatttcttctattctgtcttgaacattccttattgctgagctctttcctcaagcccgtcgaattatccagatgacattaataacttgttctataatattatggtctgccaaagataaatccatattttaactgaagcatgttttgtaataaataggtgcagatccatttttccccaatatcattatttaatttttaattttttgttttatttatagggtctctctctatttcccatgctggagtgcagtggcgcaatcatggctcactgtagccttgacctcctgggcccaagtgatcctcccacctcagcctcctaagtaggtgcacaccaccaygcgtagctaatttttgtattttttgtagagagatttcaccattttgcccaggacctctccaactcctgaactcaagcgatccacctgcctcagcttcccaaagtgctgagattacaggcatgagccaccacacccggcactrtataagtattttagaccttagaaaaacctatctagttttaaatttgtcttattaattttcttgacattgctaaaaaaagaagcatgtatatccattcatgcaatattcctcagcagtgaaaaggaatgaactattgatacagcaacctgaatgaatttccagcaaattatgaagtaaaaaaggcaatctcacatgttctttgttcaatcatagaatatatgattccatttatatagcattcttgaaagtgacaaaattagcggtttccgggagtcaaggacaggttgatgtgggagggaactgggtgtggctgtaataaggcaacatgagggayvykttkgatgatggaaatgttctatatcttaactgtatcaatgtcaatatcctgggtataatattrtcctgtagtttggcaagatattatcattgtatagtatcttgtattatttcttacaatggatgtgaatctataattatcaaaaaatgacaatttaattaaagcatatagtaaataagtaaaaaaataaaataaaaacagactacaaaaatggtcaaaaaagcatgtatgtggacatttaatcttttctgtatgattaaataattaaaatattctcatatttctgagtatcatggtacattatttttaaaaacttagtggttggtagcaaacagattttaatgtaatctttcagtatagagttttagtataggcttatcatttctttatttaaatatcagtgtttacaatgtttattataataactaatattttttgagcatttctgaaacatcttatttaaatcttccaacattcttatgaggtcagtaaggttattatttctatattatagatgcaaaaagttgaggcttaaagtgaattgatttgcttatgatcgtacaataaactagctgaattaggattggaaaccaagtctgtcttactctaaagctcctgatattgattctttattctgtttttggctatggctgccacgattttggacagtgggatgtgcttttaattttccttgtttatttgctttatatcaagtgtaagtgttaacatatttgaaagagtgggcatcagccttagrtagctgttgctcaggaatttatagttatgttggtcacatgtctcttttccttggcagtactttttgatagaactgaaagggcatrtttaaagaaaacaaaaaaccaacatgtgtttaaatttacaaaaagtttgccaagttctaactacaattctataactctctcctaatgtataacatttcacattcatatttttaaatggagcttatagtctactctaatagacactaatcaaatgacaacatacaaatgtaacagcaaaatttgaaaattgatgagagagagaggtgcaggatgctataggtacctatagaaggggacttggtcaagtgttaggattgctgtggcacagaaggcctcccaaaggatgtggcctctcagctgccatatgctttttaagggtttatgattagtagccaagaaagacttttgtagttttcttttacctgttttaactatgcataaatcggatatatttttatcacagcgcatttcagttatgccagtcatcttccaaatastatgtttcaagctccctgagtacaggaactctgcaggttatctttgtactcccaaatgtgaggatactgtctcatcacattcctatttggctaaatggggtgggattgttatggtagcataaaaactctgccgtgaagacctttgacctatttgaggcaaagtcttgaagctttcttaaatccacatttctggactttgctgatttttaaaaacaaatatttggtttattttgatattttgttgttttatttgtttgattttaataaactttttttttttactttaaaaaattattcctttgatttacaagattccatctcaggcctgttcagagtttctttctctgcatgtttttcatgttgctaaatgaatatgaatatgttgttttattttttgtttggtccttacatcacaagtatatcataagcacctataaattctcccaaaacaaagcttgcaggcaaggtaacagagccacgcattaaatccctaggagtaaagagagcatttttattctctcaaagcaccggttctttcttgactttggcttgtacacagacctcacctatwatagtgggctctgtgaaatttggcccaaaacactgttgtttttatgctttgtggaggatcaaaattataaataacactgctcaatctgttggtaggtgtgacggaacaatctcttgttactatttgttcctactgttgttatgtgattattacatgtttaaggttgggcctgtgggagaaaatgccactccctgtttgttgggggtgggttctcaaatgaagagtgaagtcatttgttacattcatgaccacaatctttccagtcttctgatcagaaagatagatgagtgggtagtctttgcttggtggtagagatagaaccatctatttatttgttacattcatcaccacaatctttccagtcttctgggaagtggtataatcctcagatcagaaagatagatgagtgggtagtcttcacttgggggtagagatagaaccatctattggctttgcaggaaatgggtcagagtgctgaatcatctgcttttgtcaatgggaaggaagatataaaagcaaagtctagtaataggttccaaagtcacccaggtgagttttagtgaatttatactagccctctgtactaagccatagtttgatttcaagcaaaagcagtatccccactgtgagcttgacagctttgtaatacttatatgtttttttctcatgagatcaatagtgctactaatgaatgtaatttttatattgtataatgatatgtggcaatgtggaatatccacaaaactcaatgaaatgctattttccaaataagcaatacataatgtcatggaatccactcaaaatgcaagacagaccagtggattttagcattacagattatggagtatgaatattacagagttcattgaagtggcttcaaattctacattgcaattaacgtttaagaaactatcacttgtcaagttttggtatagaatcaaagaaagatatccacaattakcataaaaggctagtaaaacactcctgccttttccaactacatatgcatatgaagctgaatacagaagaagatttaagaatctagttgttggccgggtgcagtggctcgcggctataatcccagcactttgggaggccgaggcgggcggatcacaaggtcaagagctcgagaccatcctgcctaacacagtgaaaccccgtctctactaaaaatacaaaaaaattagcgaggcgtcgtggcaggcgcctgtagtcccagctactctggaggctgaggcaggagaatggcatgaacccgggaggcagagcttgcagtgagctgagatcgcgccactgcactttagcccgggcaacagagtgagactcagtctcaaaaaaaaaaaaaaaaaaaaaaaagaatccagctgtctttctgttaggttggaccttaaagattttcaaaattgtaagatagtgccttttattcttattttttaaaaattttggaatatatagttagttgaaatatgttatttattttaacatgtaatagacatattgtttttcaaaataaacatttaattcatcaattttaattgcttatataatatcattaaatataagtcattaagtaattatatgttaatatcattagatataattattggattttcaataattttttttattatactttaagttttagggtacatattcacaatgtgcaggttagttacatatgtatacatgtgccatgctggtgtgctgcacccattaactcgtcatttagcattaggtatatctcctaatgctatccctccctcctccccctaccccacaacagtccccagagtgtgatgttccccttcctgtgtccatgtgttctcattgttcagttcccatctatgagtgagaacacgtggtgtttggttttttgtccttgtgatagtttactgagaatgatgatttccagtttcatccatgtccctacaaaggacatgaactcatccttttttatggctgcatagtattccatggtgtatatgtgccacattttcttaatccagtctatcattgttggacatttgggttggttccaagtctttgctattgtgaatagtgccgcaataaacatacgtgtgcatgtgcctttatagcagcatgatttatagtcctttgggtatatacccagtaatgggatggctgggtcaaatggtatttctagttctagatccctgaggaatcaccacagtgacttccacaatggttgaactagtttacagtcccaccaacagtgtaaaagtgttcctatttctccacatcctctccagcacctgttgtttcctgactttttaatgattgccattctaactggtgtgagatggtatctcattgtggttttgatttgcatttctctgatggccagtgatgatgagcattttttcgtgtgtcttttggctgcataaatgtcttcttttgagaagtgtctgttcatgtcctttgcccactttttgatggggttgtttgtttttttcttgtaaatttgtttgagttcattgtagattctggatattggccctttgtcagatgagtaggttgcgaaaattttctcccattttgtaggttgcctgttcactctgatggtagtttcttttgctgtgcagaagctctttagtttaattagatcccatttgtcaattttagctttttttgccaatgcttttggtgttatagacatgaagtccttgcccatgcctatgtcctgaatggtaatgcctaggttttcttctagggtttttacagttttaggtctaacatttaagtctttaatccatctcgaattaatatttgtataaggtgtaaggaagggatccagtttcagctttctacatatggccagccagttttcccagcaccatttattaaatagggaatcctttccccattgcttgtttttctcaggtttgtcaaagatcagataggagtagatatgcagcattatttctgagggctctgctctgttccattgatctgtatctctgttttggtaccagtaacatgctgttttggttactgtagccttgtagtatagtttgaagtcaggtagcatgatgtctccagctttgttcctttggcttaggattgacttggcgatgcggcctcttttttggttccatatgaactttaaagtagttttttccaattctgtgaagaaagtcattggtagcttgatggggatggcattgaatctataaattaccttgggcagtatggccattttcacgatattgattcttcctacccatgagcatggaatgttcttccatttgtttgtatcctcttttatttcattgagcagtggtttgtagttctccttgaaggggtccttcatgtcccttgtaagttggattcctaggtattttattctctttgaagcaattgtgaatgggagttcactcatgatttggctctctgtttgtctgttattggtttataagaatgcttgtgatttttatacattgattttgtatcctgagactttgctgaatttgcttatcagctgaaggagattttgggctgagacaatggggttttctagatatacaatcatgtcatctgcaaacagggacaatttgacttcctcttttcctaattgaatgccctttatttccttctcctgcctaattgccctggccagaacttccaacactatgttgtataggagtggtgagagagggcatccctgtcttgtgccagttttcaaagggaatgcttccaggttttgcccattcagtatgatattggctgtgggtttgtcatagatagcgcttattattttgagatacgtcccatcaatacctaatttattgagagtttttagcatgaagggatgttgaattttgtcaaaggtcttttcttcatctattgagataatcatgtggtttttgtctttggttctcttgatatgctggattacatttaatgatttgcatatattgaaccagccttgcatcccagggatgaagcccacttgatcatggtggataagctttttgatgtgctgctggattcggtttgccagtattttattgagaatttttgcatcaatgttcatcaaggatattggtctaaaattctcttttttggttgtgtctctgcccggctttggtgtcaggatgatgctggcctcataaaatgagttagggaggattccctctttttctattgaatggaatagtttcagaaggaatggtaccagttcctccttgtacctctggtagaattcggctgtgaatccatctggtcctggactctttttggttggtaagctattgattattgccacaatttcagagcctgttaytggtctattcagagattcaacttcttcctggtttagtcttgggagagtgtatgtgtcaaggaatttatgcatttcttctagattttctagtttatttgcatagaggtgtttgtagtattctctgatggtagtttgtatttctgtgggatcagtggtgatatcccctgtatcattttttattgcgtctatttgattcttctctcttttattctttattagtcttgctagcagtctatcaattttgttgatcctttcaaaaaaccagctcccggattcattaattttttgaagggttttttgtgtctctatttccttcagttctgctctgattttagttatttcttgccttctgctagcttttgaatgtgtttgctcttgcttttctagttcttttaattgtgatgttagggtgtcaattttggatctttcctgctttctcttgtgggcatttagtgctataaatttccctctacacactgctttgaatgtgtcccagagattctggtatgttgtgtctttgttctcattggtttcaaagaacatctttatttctgccttcatttcgttatgtacccagtagtcattcaggagcaggttgttcagtttccatgtagttgagcggttttgagtgagtttcttaatcctgagttctaatttgattgcactgtggtctgagagacagtttgttataatttctgttcttttacatttgctgaggagagctttacttccaagtatgtggtcaattttggaataggtgtggtgtggtgctgaaaaaaatgtatattctgttgatttggcgtggagagttctgtagatgtgtattaggtctgcttggtgcagagctgagttcaattcctgggtatccttgttaactttctgtcttgttgatctgtctaatgttaacagtggggtgttaaagtctcccattattaatgtgtgggagtctaagtctctttgtaagtcactcaggacttgctttatgaatcttggtgctcctgtattgggtgcatatatatttaggatagttagctcttcttgttgaattgatccctttaccattatgtaatggccttctttgtctcttttgatctttgttggtttaaagtctgttttatcagagactaggattgcaacccctgcctttttttgttttccatttgcttggaagatcttcctcyatccttttattttgagcctatgtgtgtctctgcacatgaaatgggtttcctgaatacagcacactgatgggtcttgactctttatccagtttgccagtctgtgtcttttagttggagcatttagtccatttacatttaaagttaatattgttatgtgtgatttgatcctgtcattatgatgttagctggttattttgctcgttagttgatgcagtttcttcctaatctcgatggtctttacattttggcatgattttgcagcagttggtacctgttgtgcctttccatgtttagtgcttccttcaggagctcttttagggcaggcctggtggtgacaaaatctctcagcacttgcttgtctgtaaagtattttatttctccttcacttatgaagcttagtttgactggatatgaaattctgggttgaaaattcttttctttaagaatgttgaatattggcccccactctcttctggctcgtagagtttctgctgagagatccactgttagtctgatgggcttccctttgtaggtaacccgacctttctytctggctgcccttaacatttttccttcatttcaactttggtgaatatgacaattatgtgtcttggagttgctcttctcgaggagtatctttgtggcgttctgtgtatttcctgaatctgaatgttggcctgccttgctagattgggraagttctcctggataatatcctgcagagtgttttccaacttggttccattctccccgtcactttcaggtacaccaatcagacgcagatttggtcttttcacgtagtcccatatttcttggaggctttgttcatttctttttattcttttttctctaaacttcccttcttgcttcggattttcaataatttttaagaacataaaggagttctgaaacaaaaaagtttgaaaatcactaacttgcataatcacactctctaatttaattcatgtctctgtttaaatggtagatgtgtagagaggcctatttaaaaatagcagtctttttttttctaacacttatcattacccaacattttattatgtatctatttatttgtatggttactggccatcttccctgtgaaaatgtagactccattagggaaggaatttttggctgccttgttcatggttttatccctcacacctactataccacctagcacatagtagctattcagcaaatttctattgaaatattggaaatatttttctatctggatattgttctactatttcctggatagtgctaaaactttaaaggttctgcgtgcagttcctcttaattatgccttgcacctttgctaatgatatttttgagagcttctaataggttgttatactccctagcaaatccagtcagttattatatggtgttctcttctcttgcttcaaccccttcataactgtttgcctacaacacacatctgtatgtgtgtgttaagatgaggttctattattcttgccaagaacagctgccacagcagacacagtctcccaactgcgcactccattttagatatgctgaagccctttaagtggagctgcctggagttctgtggcaaaatgggaaaaatgcctctcccttatgttattccctctcagagttgcaccagcatattacagaattttagggaaatatcccttgtattttttatttatggcttctccttctccacgacttcagattgactccctaggagcccagaatagagtccaatctgagtgatgaactctaagatctaagatgaactcagactcatctctcctctaacaataaatagtatgctgggttaagcctatcatgtagatttctgtcatgttcatttctccaaaatcattagatacattcagtcatggttttttacaagaattcagtgtaatgcaaaacttgcggttcttgacattttcaatggataaaccaagtctcttgtaaatagtggatgtacctgaactgtaatgtggtcatttgcacatgaatcagcctttctcttctcctaagtacatgatgagaatgaaatgttttctatcatttggtggttgtgattgtactccagcttcatcaccaaccgttgtcttcaacatacatcctatactctaattatcccaaactctttttagcttcctaaatctttccaagtttattggaaatccctgctttgttgtgtagtcagattcttctgttcagagtagttttttcactcattcacctgatgtacttatagctctcaagaatcagctcatgccctcacttccacaaatatgcctgaaaaacatgccctcactgccacaagccaggctaagtatccccctccctaaaccccattgtgcttgatttcctccataccctggrcattcctatatcatagtgccatattctattatagctatctgactctcttttgtgacaatgagctcctaaacagaccatgtaattttctcaatttctgaatttccagtagcaaacaaaactatttttaaaattaatcagcatagttgttctagaaaacaagaaagagaggtctctgtagactagaataaggatgtcaccttaataaaaagcagtggggaacaaatgagttcggaacaccctgaagctgtgaagctagtccacaggcaaggtgggtgatgggacccaggtgaatgcttggaaaaagcattctttatgcccacacaagttgggcatatagctgagagccatgtctgcacaacttgtatggtgctgggtgctgggaaagatgccacctctttctctactcttggctacttggaatagcagcaccttctgccatatagcttgcggctcctgcagcaaattttatacagttatgggagtctaaagctaagcaagaacaagtctagaaatgaatctttgaagactggcagccgtgactgcaaggcctgttctgtaccagactattattggagccttggctaaggccactgcaaacttacggcaagagaccaggatcctgtaggatgagatatctcgggggtcataacaacataggcacttaacaaagacaaggacaaacaacagacttgacaaacagaaaacctgagggtgaggaaaataggcatacaagtgcaaacaaaatggattttaagtatttttatggcattatgaagataaaaaagggattatagtaatgagagaataacagtttataaaacaagaatatggggttatataaaattgataattatgaaaatgaattaattagaaatatttaaaatgaaaaatattttgaagttaaaaaataaaactttaacactaaatagcaatatgaacacaacagaaaataaatcttctggagtaataaactgaacwcatcccagaattcagcacagagaaataagtatctagaaaacatggcttgtgatatggaacataagaaattctgcttaagagtttcagaaggtgatactagagattattaagatgaatatagacataacattttaagggaaatcactgatcacaaagctaaaagatgtgagtcctgagtttaaaaaatttatttctgagaaatattaaaataattatttttagatacatatattaaaatttcagaacattaacaatcctagaatttataaggggtaaggagaatacctacaaataaactaagatctaagtgaaacctaattacttactkattggtggttttagatgttagaagatgatagagtaatagtttcaaaattttgaggaaaaaaattaatttagaattttacacccagctaaactgtcactcagtagaatggtgcaatgaagaaatttccagctatataaggaaccagaaatctgatttcctttacaatgattctagtaagcagtagtagaagagaagatgcaaaagtgagccactcccccaccaaaatatatatgttcatctgagtgctgacttgtaaaataamattaataattatatttggggtgacatctgcaagattgcaagataggagtttctagcacttgcttcctcacaraaacatgaatttgaacaaacatccattgcaagaaaatatctttataagagctaaggaatgtgggtaagatgttatagcacatcagtggaacatacaaataagaaaaggcaaattagagagtataggaaggacatttttacatttcccacttcacaccttcctcaagcctcctgctctatggaagagggagagtgaagtgagccctcaacttcactgcaaatcgcagcaccaacctcaccccagtgaatcccaaagctaggccacctcccacaagcatcaggcttcaggccaccaccatggccccaggctccaggcaagcaccagaggaccataacccaggcttgctcatgctgacacaggtttcatgcccaccgcagaaccaggctagctcctgtcgacctaggcttcaaactaccccatggctctaggctggaggccagcaccagaacaccaggacccaggcctgcccatgcagactcaggccccaggtctacctcaccaccagcctggctccatggacccaagccccttgcttacctctatatatccagactctaggcctgtccccatagtgacaggcaccagatctgccttgtgaacccaaatgccaagacttcctcagtggaccccagtagcaggacagggtccatggactcaggatgaggtccatgccttcagatccaggcaccaggactgccttacagaaaaccaataaatgcatttggggacgtctagaagaaacagagaacaaaatgtgggcagaaagcttaattaaagaaatattaacagacaacttctaaaatctgcagagggaaatgaatatcaagatccatgaatcccaaagaaccccaaataaattaaacataaatattggctgaaaaattttcaaatctgcagagggaaatgggcattcagcttcatgaagccctaaaaaactccaaatagattgaaccaaaagaggtatataccaaaacgcattaaaataaaaatttcaaatgtcaaatgcaaaaaagaaaatcttgaaagccacaaaagtgaatcatcttaaacaagagaacccgcataagatttctcagcagtggatttctcagcaaaccttgaaggccaagagagtgtcatggtatattcaaagtgctaaataaaaacaaacaaatagaactatcaactaagtataatatatcagcaaaactgtccttaaacaataaaagaaagaaaaaactcccccacctccaaaaaaaaaaaaaatgctgagggagtttatcaccactggacatgccttaaaagaaatgctaaattgagttcttcaagttgaaatgaaagtatactaagaacataaaaacaggtataaaactcattgtgaaggtaagaatatagtcaagttcaacatactctaatactctaacagtggtgtgtaaatcacttttaactttagtatgaagattaaaagagaacggtattaaaaaagtaaaagtaattaagctgcaagaattagttaattggctgggcgcagtggctcctgcctgtaatcctagcactttgggaggccgaggtgggcggatcacctgagggcaggagttcgagaccagcctggccaatgtggtaaaaccccatctctactaagaatacaaaaattagccaagcatggtggcaggtgcctgtaatcccagctactcgggaggctgaggcaggagaatcgcttgaaccagggaggcggaggttacagtgagctgagatcatgtcattgcactctaccctaggcaaaaagagcgagactccatctccaaaaaaaaaaaaaaaaaaaaaaaaagaattagttaatgggtatacagtataaaaaaatgtaaattgtgacatcagtaacataatttgtgggggaaggagaagttaaagtgtagaggttttgtatatagctaaagttaagctgttatcagcttgaatacagttgtaactgtaagatattttatgtgagcttcatggtaaccacaaagaaaaaaacatgtagtaagtagatatataaaagttaaaggaatcaaagcataatactacaaatatcattagtcacagaggaaaatggagaaagaagaaaggaactagaaaacagtaagaaaatatttttttaaatagtaagttcttttttaaataattttaacttttagattcaggggatacatgtccaggttttttacaagggtatattgtatgctgctgaggtttggggtatgaaatgattccattggtcagctagtgagcatagtaccaatagttattttttcaggccttgtttccyccctctcttccacttctagtagtctccagtgtctactgttgccatctttatgttcatgattacctaatgtttagctcccccttttattaataaataagaacatgtggtatttgctttcctgttcttgagttaattcacttaagataatggcctaaagctctatccatattgctgcaaaggacactgtttcatcctttttttgtggctgtgtaccattccatggtgtatatgtagtatgttttctttatccagtccattctttatggacatctaggttgatgctatgtctgctactataaagagtgctgcagtggacatatgagtatatgtctttttactagaatgatttgtttccttttggataatacccagtaatgggactgctgggtcaaatggtagttctgtttctgttttaagttatttgagaaatctccaagctgctttccacagtggctaaactaatttacattcccaccaacagtatataagtattcttttttcccccagcctcaccagcatctgttgtcttgattttttcataatagccattctgtctggtataagatggtatctctttcctctcttagcctcctgagtagctgggactacaggcgcatgccaccacacccagctatttttatatatttttaatagagatggggtttcatcatgttggccaggctggtcttgaactcctgacctcaagtgatctgcctgtctcggtacctcccaaagggctgggattacaggtgtgagccaccatgcccagcctcaatgtttatttttgttgcgattgcttttgaggacttagtcataaattccttcccaaggctgatgttcagaatggtgtttcctagattttcttctacgattcttatagtttgaggccttatatttaaatcttcaatccatcttgagttaattttgaatatggcaaaaggtagccaatttcatccttctgcatatggctagccagctatctcagcaccatttatggaatagaaagtcctttccccattgctatttttgtcaatggggacacctataaccatttgtcataatcaaatgattgtcagtggggaaacgtataactatttgctataatcaaatagttatatatgtgcagttttatttctgggttctctattctgttccattggtctctgtttttgtaccagcatcatgctgtttgggttactatggctgtataggttgaagttgggtaatgtagagtttgaaatcagataatgtgatgcttccagctttgttctttttgcttaggatttatttggctatttgggctctttattggttccacatggattttagaatttttttttctaattatgtgaaaagatgacattggtagtttcataggaatagcaatgaatctgtagattgttttaggcagtatggcccttttaatgataatgatatttccaatccatgagcacagaactttttcccatttgtttgtgtcacctctgatttctttcagcagtattttgtaattctctttgtagagctctttcacctcttgtttatatgtatttctaggtattttgtatgtgcttggctattgtaaatgggattgcattcctgacttggttctcagcttgaatgtaatagtaagtttttacctataaaaattactttaaatataaatgacttaatccaatcaaaagacataaggcggatgaaaaaataaaaaagtaagttcaactatattctgtctacaggtgactcgctttatctttaaggacacacagaggctgaraatgaagtgatgaagaaagatatttcatgaaaattgtacccaaaagggaacagaagggactatcttaataacagacaaaatagactttaagtcaaaaacttcagttaattatatcaagaattaggattccattaattagaggatataacagttataactatgtgtgtatcaaactttagcaaacctaaatatgtaatataaagcaaatattaacagaactgaatggagaaatatactttgggaaaaagcttctggactttggtttgggcattagtttttgggatatgaccgccaaagcacaggcaacaaaagtaaaaatagacaaatgggattttatcaacttgaaaagcttcttcacagcaaagaagacactcagaatgagagattttcaaatcacatatctgataagaggttaatacccaaaatatataagtaagtcatacaactcattagcaaaaagtccacatacacacacacatacatgatgtgattttcttagtgagcaaaagacttgactagacatttctctaaaaaaggcatacaaatggccattgggtatatgaaaaagctcgacatcagtartcaaggaaatgcagatcaaaactgtaatgagatattacctcacaactgttaggttggctatgctggaaaaaaaaaaggttacaaatgttagcaaggatgtggagaaaagaaatccttgttctgttagtttaaatgtaaattggttaagccatcatggaaaacagtatggaggttcctaaaaaaattaaaaatagaactaccatattaactagtaatcacccttctaagtacgtagcctatggaattgaaatcagtatcttgaagagataactgcagtcctgataacttgcagcatgattcacaatagccaagatatggaatcaacttaggcattcattgatggatgaatgtataaagaaaatatgagatagctagaagataggcacataacacacacacacacacacacaaacacacagttgatccttaaacaacatggttttgaactgcacaggtccatttatacacagattttttttaaccaaatgaagattgaaaatacggtattcttggatgtgaaaccaacaagggctgactttatatgagtttttcaggactaactgcaggacttgagtatatgaggattttggtatatgtagggagttctagaacaaatatcagatgtatttcaagggatgactgtatatacacacacataaaatttatggaatcgatacaaagtttttagaattttatttataaaatatgaaacatctaacatcatatagattatagcaaatttgatttaaacattcatcattaaaaatgaaataattagttctatggcgacaatatgaacataagtatcagtgcagaacaatattttttattaagtcaggaaaactatggacagggagatacttccagaatggtggtgtaaccagtctgtgaacccagtccccagtaaaaaaaataaataaataacttgtgaaaaatattttaaaatcattttaagactttagaaattcatcatggtcatatagcaaatgcataaacatttactcaagaaattctactaaatctctgtaagagaaatgcaagtctgtggcatttgagccatgacccactacttttttccacctatcctctaccagcacagtatgacaaaaactttattccaggmagttgcagctaagaacacaaggctctctctcagatcccagtctggcatctctccagaaggagcaggctgccagaactttttatctccccaagcctatattacagaagttcctatttaaacaaagcagctaaatgtagcactccattttcccacccagcacccactcatagggtagaagttatacgttacatgttgcaagtcaatcatgttgggtctaattcatcctcatctcagcacagggtaaaggttttgttccagaagacagaagctgggaagaccaggggataccaccattcatcctcactccactcctccccaccaccagcatgaactagtaacaggattatcattctagcagcactgggccactgcacctgcccctgaggcacagatctggagaaatgtctaagagttttgctttgaaaaacaggtagtctgcaaaaacagagagccccatagttcttcctaagagaagtttatttgaaacagaccataggtacattcaaacctgaggaccctgtcaaaaacaatgacaattttgatataagataatttggaggagactggtagtccatgaacgcaacaagctaaaccatagatcagctatatgtttaacagagagaagtagggaatgaaaaagccaagaaaaactctctttgggttagaacaaaatactggcctcaaagattgccctacaaggaggcttgaatataattgattagacattggagccattaatcccctaaggtattgttgaaacagtagagcaatcaattgacaatggagcctaaaattaggtgtgataccaatagaggtagagtagcatcttacagagagacagggaaagataaagccacctagaggagtatgatgagccttggggaatgggcacttatgatcatgctccactacagccattgccatgccaaaccctctgggctctaggcagactgtagttctggctctgccaactctcctggaagttctctgtgtcaactcaattgcctgtggagattgtggggcctcctatagctagcatcccacaggtctgtggcaagagtgggccactctatgtctgttttactcaccacttctcttggagccagttggggccaggaatgagtcttggtgttaggcaacttgattgggagttcccagttttctacactgtcagcccccggctgtgaatcctccctgtatccactctcaatgccttctttctgaagatctgtttggagtatgctgacctacttgatggtcttgtctctcttggtgcaagaagctcttcctgtctgtctagtcagccaccttggctctctgatctctaggttaaatattaaagcctagaaaatgttaccaaatttggcccaaacagtacaaaagctattaaggcactcactatagaatgaattaaaatagtaagcagaatactttatgttaatgacataaatactagatagtttcaagatcatttctattgagtcttcaaacaataaatcatttgtgtcttgtgaagtgtgattcatgagaagtgaagaaggaggaggaggaacagaaacattatttcattcaatttataaaactacgatagtcatatcaaaacaagacaaggacatcaggagaatttaaaaacctttgttctagtcttattacaaatattagcaaatttaaaccatagtgtatgaaaagaatacaagacaagaattcaaaattttaaaaatattactcataaccttctataaatgcagaaaaaagcagttattaaaagtgtatacccatttgtgtttttttaaaaaaaacaaagaaacaattaaaaatctcattttaagctatcaatatttggtgctttaaaaaaatctaataaagggtatcaactgaaaataaatagaaaaaaatatatatatatatactctgttgtaaaacactagaattattcccatttatataaaggtgggacaaagataacaactattacttatattttccagcattgtattgttggtgttcctggctaatgcaacaagttgacagacatgagttaggagacaaagacttctaagaggagacgaggtggtgttctttgaaggtatgatagtttatccataaagctcaagataatcaactgataaaatattagaactaatgagaaagttcagcaaggttgctgaatacaataacaacgtaaatgtaggtagtatctacagatatcaataatatataattagaaaatgtaatagaaaatatattccactcacagtagtaataaaactataaaattcattggaataaaactaaacagaaacaagaatatagaaagaacttttcaaatatataatcaaagggaaaagtctgagcaagtagagctctaacccatgtttttgcgtgggagaatttattcacgtaagaatgctattattgccaaataaagcaataaattccataccatccaaaggctcatgattttgcacaggagtggaaagatttattccacaaaagcattatcttataaataatgtgaccatatgtcatgatttatttgaaatagttcaaaattatgcctagcaacttgtaattattattagcatccacatatttataagaataaagattaattggaagaaaaagcgtaagaagactttttccttctgcttcttagctttcccacttgcaagttgtgtgagcttgctacctaagttataagttactcaagctctctgttcctcagtttccttacctccgaagtagggataataacatctacatcatatattgttctaaggtcaaatagagataatacgtgtaaagcacttagaacgctgactgactcaacaaatgttaattattatgaacagagtagtattttattctgtctcaaatcatattataaagaactggtaattaaaattaaagcataggcataagaaaagacaaataatggggaaggatgaaaaaacaaacacacattcgtatgtgtgaatctatgtaaatagggtagtgtcattaaacactggggaaaaactaaatacttcaatcaatagtattaaaacatttgacttcccatttaggaaaaaaatctagttaaactcctactcaccccatacatacaaatatatttcagatgagataaagaacataaattaaaaacaacaaaaataaaaattattggagaacttaatagaacttggtcataaatttagagcaggtaggattttcttagaaaagatacacacaaatatacagacaaatatgtgagtaaaaataaacagaaaagctggaggtatatatatataattcctaaaatctatggaacaagtgcctcttagagttaaaattttagcattttattgggagaaaatatttgcattatacataacaaagaattagtatgcagcatatataaatatgtttttaaaaatatggttgaaaatacaaaaacctaacttttaaaagaacaatttataggaaaggatatttaaatggctaatacacatgtaaaaattgctcaatgtcactgataatcagacaattgcaaattaaagcaaaacaagacactgtttgcacacatcagattggcaaaaaatgaaaagcttgatgatatcaaatgttggcaaggatccagggaagcacatacttgcatatgctgctgatgaagttatgctttattatagtccctctagaaggtaatttgacaatgttatgaaatctgaaaatgtgcacttcatatgacctagagattccattatttttccacatatctaaaaatacctgacctgtatattcagaaatctgtattacagctcgttggtgatagtaaataattgaaagcagctaaaacattcaccaatagaggaatagagtgtgtacttatctctcaactcaccaagttgtttacattaaatatggacagctttctgtatgtcagttacaccttagtagtttcaaaattttaatccaaatgtaatcctatatatatatgtgtatatatgtatacatatgtatgtatatttatgtgtgtgtgtgtgctgtcttatttctacgttctctattctgttccattggtctgtgtgtctgtttttgtaccagtaccacgttgttttggttaatgtaaccctgtaaatataatttgaagtcgggtagcatgatgcctccagttttgttctttttgcttaagattgccttggctatttgagctcttttttggttccatatgaattttacaattgttctctctagttctgtgaagaatgtcaacattctaaaatctataaattgaatctataaattgctttgggcagtatggccattttaatgatattgattctttctatccatgaacatggaatgtttttccattttttttgtgtcatctctgatttctttgagcaatggttagtagttctccttgtagagatctttcacctccctaattagctgtattctgaggtattatattttactctttttgtggtaattgtgaatgggagttcattcctgatttggctcttgactggtgttgttatataggaatgctagtgatttttgcatattaattttgtattttgagactttgaggaagttgtttttcagcttaataagctttctggctgagactgtggggttttctaaatataggatcatgtcatctgcaaacagggatagtttgacttcctatttagatgcctttatttctttctcttgcctgcataattcagtatattaaaagggcaatgcatcatgaccaaataaggtttatcccagaaatctaagattagtctaacctttgaaaatctgtccatgtaatttaccatattagcaaactaaaacaaacaaaaataaaaataccttaataatctcagaaatcacatttgacaagatctatcatccattcctgataaaaaaaaattatcagcaaactgggaatagaaggggacttcccaacctgatgaagggcatctgtgaaaaccttacagttttcatacttaatggtgaaagaatgaatgcttccccctaagatcaggaataaaacaaagattttccttcccaccacatctatcagcattgtattggcagtcctattctataccatcaggtaaagaaaagtaatataatgtatacagactaggaaggaggaagtaaaactgtctttgttttcatatatgattatctatttagaaaatctaatgtaatctatgaaaaacctactaaaattataaattagcaagcttacagaatatatggtcaacataatgacataattatgaatacctatgtactcaacccctccaacccaagaactagactattccaagtaacttacatctagtgtgtgcttctcccttattcgattaccatgctttaaaaacatttcaatatttcatatatatattatatttcatggatgcataatatagataaaggaatgagaaaaaattagagtgttagaatatatatccacttagtaagagataagaatgaggattaagtttgagagatgctttatctatatctgttattctaatatttttaagggcagtgaatttatagttcaattgttttaatatttttaagtacaaacttaaaaaaaaagacttgaggtaaatattccaaagtgcttattattggttgagtttcagcagcgttaatattaatggatttcttttctttttttactactttctgttatttgtttctataccttaatatgttatttaattttctagaaacaaaaagtaaattgatttatttgggattatgaatgagaagttcttgtgtacagtgatttgaaggagtaataagaaaccttccatattatcacatgtggagatattaagatctattggaaaacaaattcactgtacatgtgtaacacatttcaattgatgagtatatatcaatttataacccgtatttcaagtattttagttataactgagagtaagaacttttttttttacttcatgctattgctgtggaagaaatcatgtcaaaactcagtggcttaaaacaatagtcatcattattctaacccacacatctatggtttggtgggggattgacacactaggctgagctcagctaatctcagattgattcattcatttgtttgtaattcaactggcttatttatgtgtctgcaagtctgccagggctctgctctaatgtgggtttgtgtgatgcactgtagctgctccacacgtgtctcatccttatccagagaccagcatacaggcccagatatgaccttctcatggccatggcagaaatggcagagggtaagtggaaacgtgcaagacctcttaataatgtgtgaataactgtggcatactctcagtgtggattggctatgatatttttgatgtgccaggcaatgtgctacacactttatatacattattcatttacttctctatccagtcttatgaaggactactattatcgcaattatacagggaaggaaacaggattacatggacacttgtccaaggttattgagttattaagctggaaaacctgaaatctgaacttgagccttagattttagccaaggaacaaaggtacctagacaagcacttaaaattgccatggctagtatttttgtcatgcatactatttttgtcatgaataatattaaaatacattgtaaaatagtactttggtatatcatatgatttgctaagcttaatattctctatatcaacatttgtccagcaagatttcgagagcaatactttgtatgatgggtgaagaagaaatgcagtttgcctaatttgcagatgtggagacgtcattactttttttcttttaacaaacaaagcaccatttaatttttctttcaaagtgctttaaatatgttgaagtcaattatttatgtgttagattctgatatttgtatatctgatttaatttttagaacagttcagtaatttgataaccaatgattcagaccattgtatctgtacacatccattaagcactcctttctcaaactttattgactttttcattacaacctttgaaagttactggaacatagcagaaactcaagcttcatctatgtggactcttatgttgttccagaggtttcatataagtatcaagacatggtaggggcatttagttttcactattatgtttctaaactctcatcaaatgagctagtcatcatctgatttggtccttgtccaactgcctacacatgcacttgcagaagtgctcctttttgcccaattgctttaatctctctattaccctgtcatccttaggtacacaggaaatgctaagacagtgtctaaggcatctgctttagccatccttccatctatttaattatttgggaccataccacctttccaaccactacacaggctataggaaaaatatatttttgtttttggatttccaaaaccaaaactagggattttgccagttctccaagacacagcccagggagcattgactagcaacatctccctgggaacctctgaagtctaagctctcaccacttctccaactctcctgacttttcgaactcaacccttccattttcttgtttgagtctctctgttcttctaaagtgctaggcttttgaaatcttgaagctaagaagtaaggtctccacttctctcctgtctatcacttttctgagtcaatcagcactgaatgccttagctgctgctagaatgcttaaaggttgtaggagaagggaaaatctaagactgcataagaggggaatactagggattgtaaaaaagtaatttgttttctaaatatcaggcctcatttctttgtattatctagactatctggctttcaggaggtacatctttaaaagaaagaaattggactaattggtttttcaagttgagctctggggaacctaaagggatttggctggtagcagagctcccctctacctcttttcaactaatatacctctccttgctttgatccttttacacactgagcttggtaaacaattttcctttaaataaatgtttctaaaatgtttgaaacccattccattcgactttaatactctgtgaataacatgacagttggtaatatagacccttgcctattgtccctactggcctgcagtctctcctcattccccaagtgcattggtgtctgtttgcaggaaatacatttcttttttctattctattcttttcttttcttttcttttctttctttctctttctctctttctttcttcctttctttctcctttctttcttcctttctcttttttctttctttctttctttcttttctttctttcttttctttctttcttctttctttgacagcatatcactttgttgcctaggctggtggcgccatcgtggctcactgtagcctcaatccaccgcccacccctgcccacccgggcttaagcaatcttcccacctcaccctcccaagtagctgggaccacagccatgcaccaccatgtccagctttgtttgtttgcttgtttgtttgttgctgtttgtagtgacaaggtttccctatgttgcccaggctggttttgaactcctgggctctggcgatcctcccaccttggcctcttaaagttctgggattacaggtgccctcagagaataaggtttgattgatgggaggaagaaaagagaagcacacatttggaccccacaggtccattgactttgcagaaatatggtccaaggcagaaggtgatggaactacttgaatgatcctatgaatttctgaatataagaggattccaaagccctagacgatccaatatggcacagagcagagccctactggccctgagctctgtaaggaacctagcaccatcctggtaccacaaggaatagaagctttgggggcattcagatattgtccttggcatgaatattattctcatgacaggcatgataggcatatctgttcagataggaaccaaagaagccagagaaaagaaaaagaacaggaaatgttctgtggtcactgccactgactcactgggttgtaaacactttttgaggatttctagaaataacaggaggatacctgggagaagacactgaggtttttgtattactaatgtaggctctatttatctaggatgcatttagccattatattactgtctgcaaagcaaataatgctgaagaaagtttttctaatctagaaagaagcatacattcacacaaattccactctaattattatctttatttatgtagtaggacaatttccagctgaagaagtgatccacctgagtaagcatttccatggtgttccttttatatctgagttagagttctggttttgttcccagccttacctctgactcatcattgtgaaaccaagaaatcatttagcctctcagcacctcaaaatctttcttctgtgaatgaggataatgggtaaaccttttcttgcttcactgaattgttgtgaagtttaattagataatgtttacacagtcctttgaactctactaattaaagtgatgtgtaaatatggcgcttccttttatcaggatggcttgactgagccatttcatgaagagttacagatgactatgataggagtatccatagggaagtgattaattttttttaattcatgtaaactcaattctgagattatcaaatacacatatgaaaatatccagttgcggctgtaattagggagaataaggatatagcctcccactagctgaagagctaatggtcacaccttcacattagggaaagcttagctcctagggtgtagactagtgctctgtttgctttaggtattgctatcatttttttctatgttacctttattcggtatttttttgcctaggcaacattggtgatttattttatatttgtcatataatgaatcacaaaatagcatatttacaatcccttgatgagaaagacataagctttaaagtagtgtgaatctatatagatgatccattggttcatttacttatcaaagagattttcacctgaaacagaaaaatcttagataaatcagaaatcttcttactaagtttcccaaggagactgttttactctaatattatcatctcaattacttttgaaattctgcattagtaagaaaccctttcttttgccagaaataagttgataaaaggattaattagcttggggggaaaaaacacaagtttttctccataagccttctttgtgcgttagtgtataattatctttgttagacagaattttctaaatgataatattataggtatgtaacaattcaatttcatatgctactgaatgactcagaatttggagttaatatagtttattgaaaactcagataactaatatgggagttttgaaaactgctaaatatcataatgggagtttacagcaggaaatgtttctataaaatctagtagcttgttttttatacttgtaatgcataacaaatacattatatataataataaataatgtataaataatgtatgaataaattatgtctactttcattacctatgtacttcagggatatgtctgctgatggaccagcataacataaaagcactttgaactgtttgaaacttcaaattcagagtctgattttctatcttctgaaatatattttctgcctcaaatcctcaccagtatgatatgagtagaattacacagaaatttgaaattatttaggtccaggcggaagacttgtcaaaagtgtgatagtgccttagtaaactctaaggcataatagcagaggtgtattatttgatatttccagaagaaggcagataagtatagattattttgatccaaggagacactaaagaaaacaaaatacagatctaaaactgtaaaacatgtagccttaggatgcacaaagataaaatagaattcaaatttgctaccatggagaataaatattctatttacggacctaaggtcctgaatgaatctgtatccctacacaatggggtttttaggtattctttttttaaatagaaagataaaggttagttttagtcattagctagtggttttctttttgtccaaaattcattttatttttttctttttattattattattattatactttaacttctagagtacatgtgcacaacatgcaggtttgttacgtatgtatacatgtgccatgtgggtgtgctgcacccattaactcgtcatttaacattaggtatatctcataatgttttccctccccccttccctcaccccacaacaggccccggtgtgcgatgttccccttcctgtgtccaagtgttctcattgttcaattcccacctatgagtgagaacatgcagtgtttggttttttgttcttgcaacagtttgctgagaatgatggtttccagcttcatccatgtccctacaaaggacatgaactcatcattttttatggctacatagtattccatggtgtatatgtgccacattttcttaatccagtctatcattaatggacatttgggttggttccaagtctttgctattgtgagtagtgccgcaataaacatacatctgcatgtgtctttatagcagcatgatttataatcctttgggtatatacccagtaatgggacggctgagtcaaatggtatttctagttctagatacctgaggaatagccacactgtcttccacagtggttgaactagtttacagtcccaccaacagtgtmaaagtgttcctatttctccacatcctctccagcacctgttgtttcctgactttttaatgattgccattctaactggtgtgagatggtatctcattgtggttttgatttgcatttctctgatggccagtgakgatgagcattttttcatgtgtctgttggctgcataaatgtcttcttttgagaagtgtctgttcatatccttcgcccacttgttgatggggttgtttgtttttttcttgtaaatttgtytgagttatttgtagattctgaatattagccctttgtcagatgagtagactgcaaaaatattctcccattctgtaggttgcctgttcactctaattgtagtttcttttgctgtgcagaagctctttagtttaattagattccatttgtcaatttggcttttattgccattgcttttggtgttttagacatgaagtccttgcccatgcctatgccttgaatggtattacctaggttttcttctagagtttttatggttttaggtctaatatttaagtctttaatccatcttgaattaatttttgtataaggtgtaaggaagggatccagtttcagctttctacatatggctagccagttttcccagcaccatttattaaatagggaatcctttccccatttcttgtttttgtcacgtttgtcaaagatctgatggttgtagatgtgtggtattatttctgagggctctgttctgttccattsgtctatatctctattttggtaccagtaccatgctgttttggttactgtagccttgtagtatagwttgaagtcaggtagcatgatgcctccagcttgttcttttggcttaggattgtcttggcagtgcgggctcttttttggttccatatgaactttaaagtagttttttccaattctgtgaagaaagtcattggtagcttgatggggatggcattgaatctataaattaccttgggcagtatggccattttcacaatattgattcttcctatccatgagcatggaatgttctttcatttgtttgtatcctcttttatttcattgagcagtggtttgtagttgtccttgaagaggtctttcacatcccttgtaagttggattcctaggtattttattctctttgaagtatagctagtagttttaagagggtattatgtaagttcagacagaagtcaatctgaagctggatagatgtagccccaataatgttgatgataataccaaagttttacccacaaaaattctggcatcgctttgatatcttcaatttgggcttgatttggatacaaaggtattggtaagtctacgtcgctatcgaaactagctatgaatagggcatcctaagggattttaagaaagagataaatcaggacatcatttaatctggcaactcccctttcagagtatcaaattaacaggtgtgggatcacggaggaggaaagactgtatttctgttctaagcctggacataaggaatgtttaggagttattggaaatgcccaccacctgcatagtatgtttattccaaggggactgttgaataagaatagaagagtttaaggctaatatggtcatacctatatcaatcaaaaggttgttcttttaacattataagaaatttctccttgtgaatttaagggtaaaatgagaaactgggcatttgatttcctttaaagcacttccatttttacatccttcattttttccctttatttttaatatattaacttttttgtcagtgttctttctgtttacagtatctgcaactggctttaccgagtaactccctgttcagggagtgtttaatgattggtaataccggattgttttatctgtaggggcctgaatttgatttaagacttatttgatttttgtgccaagtccctttcaaaatgttcaacagggtgctagaggtctggcaataggctgtttcccgtttctgctttttcttgtgttttaactcttttatttctggcttaaggtcattcacaagaaaatgagcagaaagtgaggcttcatctgaatcagtgtttacttctgaattctgtcaaaaggtgtcaaataacctatccttgaactccctaatgaacttattctttctttgcttataggactgaatcagagtccaatctatgtttacaggaaagatttgggggatagcttccaaaagacattcaaaatctacagcttgcaaaatccctctgatttcttatgcaattaggaatctttgtattacgcctttttatccagttcttttgtatctgagcatatgaagtaatagatatcgatttgaggagtatgggttttacattcctaaaactattcctgatgtccctgcaaattttatcgtggtgaggctttgggtacattttaataatggcttttagctcagaatgagatgaagtcttaaaattaacaataagagtttttttctgttctgacaggggcttaactttataaaataatgcactttaggagtttctggacagccagaagaaagggggaacaagtcagaaggagatggagaaacactctgggagaagaagaataataggataaaggccattaagtttgtgttgaagtttgaaggaatctaaaagagattaagtatttcacttttatttttttgcctcaacaaaggaatcttttaagggaataattttgaagtctgaataattttgaatacttcctcaaacacattaacaatgcaaatcattggacgtttgaaattttattcctttatgttctaaggcacctctcaaatgtacacttctgttcatatcaaaacgccttgaaaatgtctattataattctaaattatctttagtgaaactaagccatttagaaagataataaatataagaatttgtgttatggtacaaatacatgtacaaagaaagagtctgtcagagggggaatggtcttcggtttaaactgagccaagtccagcagagtctaggaactatcaggtgaaagtactgctgtgtacctcctgcctcagccccccatggcctgatggctgggccttctccaggtgcaaacctcacacgtgcagttttcacagatagtaaagtttggagagatttcacgagacagactgggaaaagcactcataagattttggtaagtgacctcaggcaaaatttttccagagttttccatagttcagaggaactttctgaatttctcagtcctcaagaacagtttgattttttttttcttttttcaagtagagatggggtttcaccatgttggccaggctggtctcaaactcctgacctcaagtgatacacctccttcagcttcccaaagtgctgggattacaggcataagccactacacccagcctgtcaaaatcagtttgaggatggatttatctggtttatacccattccctttctgtgaactttgcttttatagagatacaaaaaaatgatagggatagagatatatagtgtagttaataataaaactgatttctaccaaggataaaagttattcaaatctggtcaatcaaaggattccttaaaaagggcttcttattcatagaagacaaaataaatgcagttcatggggaactttaaataacaaaatgtataagaggtcagactcaatgtgagccatacctcattgtaacagtaggagagaccaacaactccttatcctagcaggaagttcaaaatgccacaaggcactcctgctttttgactcaagtcttggatcatttacaacagaagttcttgactagatctttgtggatctttaagattattgaatgctggttccccaaaaatatcaccgaaacaattcaatgatatgacaaatcttagtttatggttactgtagcatgggtgagaactgcattgacagagccttagtagcagtggtatgctgaagcttgctccaccagcctgtgagattgattctgagcatctcttccccaatccatgttcagtgaggtcacattagtagcttgaagtcagccatggtaggactatttatgttgtagaaatcatcaaattctacacatcagagatagtttttctcctggagagccagttaaacttagtaacatgttagggtgtgggggcaaagttgaaatatttataagatgttagagtttgtttcaaagcaagtctttattttttaatttttctactttaagttccaggatacatgtgcagaatgtgcaggtttattacataggtatccgtatgccatggtggtttgctgcacctatcaacgcatcacctaggttttaagccctgcataggttagctatttgtcctgatgctcaccccacccccaacaggccccaatgtctgttgttgcctttcctgtgtccatgtgttctcattgttcaactcccacttatgaatgagaacatgcggtgtttggttttctgttcctgtgctagtttgctgaggataatggcttccagcttcatccatgtccctgcaaaggacatgatctcgttcccttttgtggctgcatagtattccacagtgtatatttaccacattttctttatccagtccatcattgatgggcatttggtttggttccaagtctttgttattgtaaatagcgctgcgataaatatatgtgtgcatgtgtctttatgatagaatgatttataatcccttggatatatacccagtaatgggattgctgggtcaaatggtatttctgattctagatccttgaggaatcaccacactgtcttccacaatggttgaactaatttatattcccactaataatataaaagggttcctatttctccactgcctcaccagcatgttgcttcttgactttttagtaattgcctttctgactggtgtgagatggtatctcattctgcttttgatttgcgtttctctaatgatcagtgatgttgagctttttttttttatgtgtatgttggccacataaatgtcttcttttgaggagcacctgttcatatcctttgcccactttttgatggggttgtttgttcttttcttgtaaattttttaaaattccttgtaaattctggatattagacctttgtcatatggtagattgcaaaaattttctcctattctgtatgttgcctgttcactctgatgatagtttcttttgctgtgcagaagcactttagtttatttacatcccatttgtcgwttttagcttttgttgcaattgcttttggtgatttcattgtaagtctttgtccatgcctatgtcctgagtggtattgcaaagcaagtcttttaacatgccttatggaggcttgcttagaattggatgattataatatgaaagtttaggattggtggatacaaagagagggttttgaagcaagggtttcaaaacattctacagaatcagctgtttgatgctacctactgaaacatcaaaagatttgatattcattaaatgagtttttcttaagttcatgcgacaaaatcactttcatctttcatctttctgagcaagagtttcctggagtaagaaagttatgtagatgaggacagctgaataataaaataatgttaatattacagcttttaatatataagctatgtgagcatagatggttttggttctcacatataatgcttgagccctcaaattatgtataaaaattaaggattggttctatggaattatgatagcaacaacagaaaaagtaaagctcataggaataattcacttgaaatcattcattttcaactctaacaaaaagaaaaatatccggactgtgcatcctaatggtatatgtcttttatttatctaatatttaaatcgattttgattctgttttatccaatgacaagaatttatattgcatttgtatacttggggaattaaacacatcaagtctaagaactttctttccaatatctataaaaatacactgattgagcaactatatgcttccgatcatttgcctctgcaagacagcagtgtaagtagactacttagtgtatttagcgtaactaaaatagagattttgtatgtttgtcataattccaaccattaaatataatttatataattatcttcttaagtagaatgaatgatagagtcaaaggtcaacacaacttcagaaatgaattacttggggaaagaaagaggattttttttttaatttgaaaggacaaaggagaatgtttaaatcatagaattgaaaggcataactaatacagaagtttgtaagtctggcagaagcttagagaagacctagatgcttctgcagtccaaacaccatgaggacagcatggaggagcaaaatgggtcccagtacctctattgcttgcataagaatggtgagacagaacactcacacaaatcagccaaagcagatttttttttttttttcacagatatgcagcaagaataaacagaagcctagaatccttggtgagccagcttcccaaggctcaggaaactgctgagggcgaatggagtcttatctgtgcttgccccattgtgacacagctgagggaactcaatacaccctagataccacttgaattgctgagctgaagcactgaggaacatcccgttctaagagggaggaggacatagcctaggttgtacccaacactttctctttatctcaagatgccccattgtagttactaggatgccccattctagaactacaatgggataaagagaaagtcactgttaagtggcaggggaaagagctggggcagccaaggtcatctggggatttgtcctcctacaactaaccttcccagttcaatcccttctttattttgaatattgctaataaggaataaggacaatatacagtttctctttgtggtatattatattatccttagaatattctttatactgagctaaaagatactccctccctttgtgttttttcctttcttctctccaaaaccatatagagtaaaatcttcctgatttgcagtttaacatattgaagaaactactatagttattggggttttctcgttttgtttttaggtgtatgcatttgtttgtttgtttgtttgtttgtttgtttctgagataggtagcctaggttcatttaaccattcctctagtgcagagggtttcactgtgtggtcagtgcactggtgatggtctgtgactatttcttaccctctgcacatatgttataggtctgcaagaagatagggagcttgcaccaaactataaatcaacacaccacttatttcactgaaaaattcttgctacaaaaaaaaataaagttagctgaattaaactgtgtttattgagatagttgctttatgttgtagcacaagattttatcttattgcagatcactaataaggaattgaaccagctagtttgatagcaagtgataagaatttgacatgatttctagactgattctaaccattcttccctagaccagcctccgaagtacaaccaactattccagagagtttgctaaaaatatattggaaaatattacatccttgtatctggagaccatcttagttttgtattgagtttttaatcaagtacagcacttcatgagaattatacatttgttcccattcagattcttcttgatacttagaatccgtcattccaaaattacaacccagtaaccattctgtccaatttgatgtcatttgcaatatgggctatgtagctactggtatgttaaaaaacaaaacaaacaactacctttaaaaaaaatttttcctgagtccatggttcagctgatcagttattgtgaccttgactcactcatttctgatgaactttctggggcccgatcaagcatctgccatcactggttgttggcagggggctgatcagtctattatggcctcagctaaagtgactcagctttcctctatggttcttgtatccttcagtaggctagcttgagcttgttttcatggccatgacgtggttccaagagagataagaagcacacaagacctttgtaaggatcagtcccaccgctggcctagagtaaagcagaaaaaaggtgaaaatgcatctggaggagaacaaagataaaaccatcacaatgccaatgtgtccttccaaattattcattaaaaatttgaacatggtattgacaaatgcttttcacagaagacctcaatagaccttacaaatgcattggtcgacagttttctaatatgttatttagctacctatgactctaccaatagatgctttcatctaacctacatttttccattcataacagttcagtgaaaagttttctaaaatttgatgctgtaattaagaaattacctatcgttttctgaacacaaatgaccatcactgtattatttataatagcaaaatattagaaacactgcaggaatgaatacatttttatggtaatccatacaattaattagttcatatggctcctaattttcaaatgaaatgggaaaatgctcacattttaatttaatgacagagtggtaagatacatagtgagacacaacattaaggaaatacaggtttcatattttatatttaatatataaatattttgaaatccgagaaagaaatacactaaaaatactaatacttattttctttggatagtaagataacagtgatttttattttcatgttaaatttttatatattttccaaattttctacagtggatatataaagcgtcattatccaaaacagacaaatatttaaagtttttttccattttgtaattttcctgggaattaaaatcaagctcacactttcctctattttgaaaattttgccatttgttcattgccatttaatattctctgagatgttataataatcagagggagattgggatctttgccattagcatagtagctggactgtaataactattttatgaatatttttatcttgaacttttttctgcagctatwctcaatgtatgtcttctttttctattggatgccaagaagaaacaggattttatgactatctggagcaatgcatagtacctatgtcagaaccaataaaaaagataagttctatatcacaggataggaaagcaagggaaaaatatatctcaaacattggtgactcttctgttacatcattatgagactaaggaagctatcctacagctatatctatgttgacactgaccatttgtttatagcctttaaactcttgctagcagtaaaaatcatgttacaaggtgacatttaagccacccgtaatgcttaaatggatagtacaggtgctagaatgtctctaacaatgcagtggataggcttttcctgcragagatctagaatacgaatgtgagaacatcacctaccgacaccatgtccactagaagcattgtgatagaataataaagatgatcacagagtctttgattctcctcccattgagaagtggagtctctgttcctcctcgtgatctgagtggactgtgttacttcttgaccaatagtatatgacagaagtgacattatgctggtttcccagtccaagcattaagaggctggtaactaatacttcttgtctcctggaacactcactcttggaagccagctgccaagctgtgagaaaccaagccccatgaagagttcatgcatatgtgttccagttgacagccttagctatgctcccagccaatcacaagcatccactgcaaccatgtgagtgagtccttttagcctggtcatgtctttagatgactctagcttcagacactatctgactccaattacatgaaagatcctaagccagatgcatccagatgaactcagtcaacccacagaaccataagacataataataaattgttgctttaatctattaaatttgtgattggattgttcaatgttttttttttttaaaaaactggaacattaaccattgttagctggtactgttgtatttgaaacaaaatttgaaaataattgcaggaaatagatggttgcataagatctctgtataatgttgcataagaccaatagtgaggagagcttactatacatgacacctttcagaatcatatacggacatcgtgattcaaagaaaccaagaaaaaataaaaagaaagctcaaggtagcacttagcactgcacatttggagttgatgagatgccattatgagtatggcactttactgtttatgacaaccctggggaatatgaattattattatcttcattctttctttccccctcccttcctttctatctctctcccttcctccctcccttcctcccttttttctttccctccttccgatttccaagttgctttcactgtgctccactccaccacacctcagcaggagcctgtctcatgtccgcagtctccccatgccattcatagtatgtgacatacaaaaggatgctgctcaagcaggtatccctgtgatgtcaggtgagccatctctgaagtgagaggctagctcctgcaggatttcatcctcagaagtcctgatgtgctgccttaatcatctttgttattctctsggatcagaaatcatcaatggcctgttttttaaggaacaatgtattacacatacgtgtgtgtgtgtgtgtgtgtgtgtgtatttttaaagcctaccaaaacagatatgtacacctttgttatgctgaaggacaaacaactctttttgttttcaggtattccaaagttgattacgtctgatatggttaaagaaggtgctgctgtaattgatgtgggtatcaactatgtccacgatccagtgacaggaaagacaaaattagttggagatgtggacttcgaaggtaataaaccaatatcttttgataggtgaagaagataaaaaaattccaccttacgtattttaaaaatagagaagtttcatttatggaggaattattaacttattaatcatcacctctttcttctgagggaaaagattttaatcagacttaaatatttactttctcccttcctctctctttccctccctttcatccttcctttcttccttttctccctctcttctaattgtatcattaatatttggtttagggatcaaatttcttatagtacagtttttattgatagaatacagctggccttttatagacctgggcatagttttgaattttgggagttgacatcttactctacgcttagtcaaatatgctctatgctcagccattcactcttagagccagaaggcaccttagggtgtgtctgccaaccctaactacatttcagatctaggtagttatctagatagttgaagtcagtgtttttcacttgtgttttagagagaataaagaaaaggaactaagctaaagtttttgtggtcgatgaaagatacaaggcaacaaatatgtagtagtaaaaaaaaaattctaacccagtcttctctttacaataggggaaactgggccccagtacttctagatgcctgaccctctaatctgattttacttccgttatctttgtcatatatttacctgcattcagattttcagtgtgcctaggagtcttagatgtctatgaagkcatgaatatagtaaagttaagtggtgacatttttatgttagaaatattttttgtataagagtgattattctggccaaaaaatacagtgccacatcaagaactttgttagttataggtgtgtccttcttacagagaaactgaaaagaataggtgatgccattttaaaaataatttagattttgttttttcacttagaacctggtcatcaggtgatggtttacccaagttctagcatattgttgaataaaatagaaaatgcagatagttagaagtgtcctagggtactggccctatatatgtgagattctaagatacatcagggaccagatccaagtaagccatttgagcctaaaagaaaaagaaaacygtaaggacacatatgtgcaacaatgcgttctagagacaaaatggtgtaaataagagcaaagtacagatgtaccgtaccaaagaaaacactgctgccctcattggctctaatacacagggtctctgacatggttggaactctattctagcaaggctggctcttgacatgaacatgtctatctgtacgtatatacatatgtctgtgtgtgtgttgtgtacatgctgaaatcactagggaatgacctcatttatttatttaatcttccatgttcaatcacttaggccagatatgagtaacttatttgaatttctcaacttgaaagagtaaagtgcattttattttaaaacctggcttatttattttctttactgtcattctgtttcttgataacattatagttatgcattcattgcaaaattaccacatttgtgatgcacccagatggcactgacaacatgagataaccagcttgaggcaagaaaagcagggatgtttgcagttcacagccttgactgcctgtaaggcaagcttacccagcagttcagtccagcacattttacaagactcttctctcatagagtatttttttggtctcatgtcacttccatgctttcttcttttttaagtaagaatgttttttactgaaagtaaaaagtattctgaaagcaatttttacatgagcatttttggtgggtgtatatgcttagtagcacatatactcacttcatgtcacatgaagtctaacttgttaatgattattaaatcaaattgtagttctgtgtatctaagtatatataaaaattttaaaaggagatggaaaagagacaaagatatgagatgaacagggctgggagacctagcctgttgccctatagttttgccacctcactagctgtcagtgatatcagttaaatgatagcaattatattagtggctccattcagctctactgtttggcatatcttggacatccaacagagcattaccaaatgatcgtgtaaaagcacagaaactttcacctggaaggtcgagcttttctaatcctctcataaaagacacccatatgattagttgtatctagcttgccagcctgctgattcatggagcaagagtactaatgaggacctggacttggtaaagaaggctttgccagtgaggccatgactcagccacccacaggagcaggcaagtgataggttttgacatgttgctcttcaagttgttcatcaggacttaacctgaggtgaaggatgatcccccaactgagagggaggaattttaagatgggttatgccacaaaactcataagtaacatttggcttcaaattgccacagggaaagtgtggtggctgctttgtgagtatcggtgaaaagtttcactataactatagccaagataaacaaaacagatgtagataaaatcaatcgttgaagtaaatcgtccttgcagaaatctttgtttcattagtaaagaaaactggatgaccccgttaaaagtaggtaacattgatgggaatgatttatccacataaataaacaaaatggctgtgacagaaaggatgacaatgtcccagaggatgtaaaaaacttcacattaaaggaatctgcagtgatatttcatgccattgaaagggcaaaggataaaatgttggaagctgattcatacttagaaaggaatctgccagttcaccaaggcatagaaaagatgcttgctccttctaactggtgtgagatggtatctcattgtggttttgatttgcatttctctgatggccagtgatgatgagcatttattcatgtgtcttttggctgcataaatgtcttcttttgagaagtgtccgttaatatccttcgcccacttgttgatggggttgtttgtttttttttttcttgtaaatttgtttgagttctttgtagattctggatattagccctttatcatataagtagatgcaaaaattttctcccattctgtacattgcctgttcactctgatgggagtttcttttgctgtgcagaagctctaaaaatcaggaaacaacaggtgctggagaggatatggagaaataggaacacttttacacggtgggactgtaaactagttcaaccattgtggaagtcagtgtggcgattcctcagggatctagaactagaaataccaattgacccagccatgccattgctgggtatatacccaaaggactataaatcatgctgctataaagacacatgcacacgtatgtttatttcagtactattcacaatagcaaagacttggaaccaacccaaatgtccatcaatgttagactggattaagaaaatgtggcacatatacaccattgaatactatgcagccataaaaaaggatgacttcatgtcctttgtagggacatggatgaatctggaaaccatcattctcagcaaactatcgcaaggacaaaaaaccaaacactgcatgttctcattcataggtgggaactgaacaatgagaacacttggacacaggaagggaaacatcacacaccggggcctgttgtggggtgagggggatgggggagggatagcattacgagatatacctactgtaaatgacgagttaatgggtgcagcacacccacatggcacatgtatacatatgtaacaagactgcacgttgagcacatgtaccctaaaacttaaagtataatttaaaaaaagacttaaaaaaagatgtttgctcctaatcatcagttgtatgaccaaaagaaggcaagcaccattcaaactattctttgcaaaatgtttacagagaaataaaacacttcagttctcratgtttccaaaattttaaattgcattcgtttttttaaatattagtttaattttgctagtagttagtagtagttttactattaattttactactagtaaatagtaatatttgttttactattatcagtaatattaattttactactatttttaatcccctatacatttatagaccacagtaagagaacttttaatgttttgacaaaaaatttttaaaggtcactaaacaaatataatttctcccattgactactaaaattgctttgcactgtttcaacagtcatctttgtggtcttacactactgtgaaaactgagcactgcttgtatttttctctgtgtctaattaaatctcatgaaattagtgatcatatagttcaaattcatatccaatgccataatcacttctacatgattattcagttgtttggttacagtttctcactgttactattactgtctaggtaggttgttcactgtggaaggtaatgtttgctaagcaccttgccaaccattatgttcttttcctcaacatacattgaagttaggcctttcctgcaatgccatgcctctctggatgttttgggaaataaataggaccttaaagttattactaaattgaagtgctattttgttttgtattgatttccagttacagaacttgacagttcatcaatatgtccagcttctgacaaatgcttaacattcctcttctattacttgaacatacttcctccctcctaacttatgtcattaaaagaagaaacagtatttaaaaccatctgtgataacattattttgcatgtctaagaattatttttcattactaataatcatgcagcaaataattattcatttataagtttatgtttgctatatagattattacttttttacacttaggtatacctactttcacaggcaatttttttaaaccattttctattgtagcttagaaagaaacttcatacatttctgacaaagaaggctttattctcaaaagatagaaatgagattatgtgccatgagtagtaaatagcttcttgtaaataacacattggaaaacagtatgtagtcctagactcaaaaactcttaattataccgttcttaattcatcaaatggatttgatcagctaaacagtctaattaatgacttccatgctgttaattcaattaaccatgctcttatgggtgaattcttgggcctcatttacttctcatagctaacgcaaagacatttctctacccttttgaagctttagtagctttgcttcaattttatgatgcttcctgcagggattgaggtggaataagaactggagtgtctattccctgttgcctgccatctctcctccctgtattccaactctgacaatgcctttccacttattggtttatactaaaacaaggaatgaaacagacaggaaagaattggtgttgtaaagaaatgaaagagacaggaaagagaaatgatgtgtaggcatttttgttaaagtaaaaataaatgaggttaatgtttaagagtgactttcctctctctactgtcttaacataattggatagtaaaatttaaagtggtaagtctttgtaaaggtgataagtctaatgtaaaggtacattatattgttgatgaaactggtttaaattacaaaaaataaagaagtcacactttatggaaaagaatgtctactcctctagcgcaactgacattatcattgtattttgtactagagttgcttccagatattttatgtatgcatcaactatatagtttgaggaatatatgtgacttatgcacttaaacttgttttactgatttgccatgctgaaattctggtttgtggttatgttcagtgcatgtatcattatttggttcatcctttttctattgtgaaactcttaggttgtttccattttttccttttaagtattatacttgagtataggtgaaggactataacaaaggggaaccaaaatgcaatgactcaagataatttggctagccaggcatggtggctcacacctgtaatcccagcatgttgggagaccgaggagtgtggatcacttgaggtcaggagttcaggaccagtctggccaatgtggtgaaaccccgtctctactaaaaatacaaaaattcgctaggtgtggtggtgcactcctgtaatcccagctactcaggaggctgatgaaggagaattgcttgaacctgggaggcagaggttgcagtgagccgagatcgtgccactgcactctagcctaggcgacacagtgagactctgtctcaaaaaataagataatttggctctttcccataaaagtctggaattagggagacagtcaatggagttaggcagctatgcttcattcagggatactgttttctcctatcccactgtttatattagttttccagaaatgccataacaaagtaccacagacagaatggtttaaacagaaatttacttcttacaattctggaggctggaagtccaggatcaggggattgataaggatgtttctgctgagtcaaccttgccaggtagatggccattttctccctgtgtcttctcattgtcttacctctgtatgtgtccatgtccaaatttcctcttcttagaaggttggattagaccctatgctaataacctcattttaacttaattttatttttaaagactttgtctcctgaaacagtcattctgaggtactggggttaagacttcaacatctgaatttagaggggacacaattcatcccataacaccgttccacctgagtgttgtccttatccacatggttgaagttgaattgcctcctcatttatgttctcttctaaggaaaagtgaaagagagagcccagaacaataaaatccatctttaataaaattgaactagaaggtgcatgcatcacatctgctagctttctactgacctgaatatagtcatgtgtggagtacaagggatgtggaatccatagtctctgaatgggaggctacactttggtaaataataatctaccctttacataagaacttgaagactaatctcttacttagggtagaaaagaaagatatttatttatctaacatccacatatcattcagcttacctatccagaattcattttgttctgaaaaacctcaggggacaatctcgtcattgtctgattgctttctaattggtttcaaagcatgctccacttactaacttttttctgaggttttggtgaaatcctagtgtcactgaagacatatcttggctcagatcttaccctgagctttccatggatcttagatacacagatttgcaataacatttgtgcaggtaatacaacctcacctaaatgtctttaattctaactaaactgtttattattcaatcattgatatagatttgatactttttgaccatgttatacaattttgaaaattgtgtcaggtcccttttgtgactttcattttttatatctctatcttcactggcttattttcagtctcttgattattactgtttttagtgtagcccttcagattcttcaaattaggttcattcatttagttgttcaatgctattgagcatctgctatgtgtcaggcatttttatagtcacttgggatacaacagtgacctaaaaagacaaagtacttactcaccagtagcttccattttggttataggagacagataataaacaaatacatatctatataacaaggcagtgtcttagtgatacaaaaataaaacaagataagagggctagagaatggtggcatggagtttcttagaaaaggtggtcagggaaggcttatgctaacctgaataaatgaagaagggagtcgtggacagatgagggagcagcattccaggcaagtggagcagcaaatgcaagaccttgaggggggcctggctggcggtttttatgagctgcaagggggccattgtaactgaaacagtaagtaaggaagtgagtgatagagaataaagtcaaagaggtagcagcaatcccatcttatagaccaaggaaggatatttggattatactctaasgcagtggaaatccattggaggatgtggggcaaagaaatcacatttgacttgtattttaacagtgtcactctggctactgaatgacacataggccgtatagaggtaaaggtgtaaatagggatacctgttaagaggctattgtaattatccaagtaagaactgatggggcgtggaccaggttgtaatgggtgaagatgttaagaggtggttagatggtagatataattttaaaggagagttggaatgattggttaaacaagtagatatgagggaaagagaagaatcaatcaagtgtgactcaaaggattttggaataagcaagagtggaggtgccagttctggaatcctcttgagatgaatcttaaaggttcaatgaattttactcaagtatgtgtatttagggtagataatgggcaaaagagaggaaggggctctttcctggtagagggaacaaagaatcaaaggaaaggaggcaacattacaaaaggttttatgcactcaatagcagacccaacatgggctgttgaaagaaggaagtatgatattgtatacaattgtgaattttccccaaatatctggtgccttattttgaatttttcaaaagaatctccaccaggcaggaaatctcccctataaagggaccttttaatttgagactccatctggcgaaaccattcctcaaaattccaacccaatagtcaagcataaggtcaggaaagggtttggaattacatagaagctcagtatcattatcctaagaaactactagagatgaggtgaaaacccctggagtgctttgtaagcagctttctatgttttcttttaatgctttgtatttgaaagtttggattcatctttcactccctgctctttttgtattatgtccaacctttcataaaagactatgctttggagtcaagctaacttgggtttgaatcccaactctactgcttaaaacaattatgatcttaagtaaatcatttcaccactctgagactcaattatatcatctgaaagattgtgataataatttccatcttataaagttgttgtgaagattaaatgaaataatcaccttacataagctagttaatgtaggtgaattgccaagcataatgcctggtgaaagactgtgtgtgtgtgtgtgtgtgtacgcgcgagggtacattgctcacgttttctctccattcccacgaaagtattaacccagaagtatacaacttcacgcttcagttaccaccatcctcctcattacttttctggcctaaactctcttccagtgtagtctgttctctttgcccaactctcatatgaatcaactttaaagcactcatgcttattcccatcttctcctgactctccttacaggtttaatttgccttactcattttgctcttaatgctatactgcgttgcacttttacttagttgttcctaactagattggatgcctctgtaagattagcttcctgtcttacatttatttttccttttcttttttttttttttttttttttttttttttttgagatggagtcttgctctgttgcccaggctggagtgcagtggtgcgatcttggctcactgcagcctccacctcctgggttcaagcaattctcctgcctcagccttctgagtagctgggactacagacgcacgtgccacacccaggtaatttttgcatttttagtagagatagggtttcaccatgttgaccaggatggtcttgatctcctgacctcgtgatttgcccagctcggcctcccaaagtgctgggattacaggcatgagccttcgtgcctggcccatttcttttatatctctgtcccacaccaaatttcagccttcttattcagaccactgkttatttgtatgaacattctctgtatttaaaaaccagtggtatcattcttacattacagaaatactcccctcaagttaacttaatgggaacaaaagctttcatgcagagtaatagcaactatgtcattaattcaacaacacatattcattaatgatacatccattgattcttcgtttatttactcagcacatattttgtgagtgctgcttcatactaggcactatttgaggtcctgggtatatctgtgcacatgataaataaagtgcctggaatttatgttttccagattatgcaaagtaagcttatttggaaagtagtttggcactgcttactcccaagtgtgtgttctacaacatgggaaagtaagtgtatataatcagtttctaagtaaacagggatggtttttaactgtatcatttttacaaaactattattaatctgtgattacaaagaatcaaattaaagtgactcccaaccacttcagttttcagtgtcaatcatttaatttgatgatatggctaatcagtctgactcaaaatatctacattttgcattagataattataaagtagttcaaagctccagcttttactataagagaagatcttatactttaacccagaggtaacttgttccaatcctttagaaaagttgatgaacattataaaagcccctctgtgagactgttattaacgctgtgatcacagaacccacactgagcatttcacgaaacaggtagaaccactgatggtcactatgagattcctatcattagtaagtcaactgcctccattgtggcttacaacatggacagaatggttactgtgaagtctaggcctttgaaatcaaatcaacttctagagacttctatttagtagatgtctttgacattggatcatctacctttatagagcagagttaaagttgaaacaaaaaatacattcacaggaacaagagaagtgactaatgcttctgcaagtttttctttgcttgaactgtgatgagtttttttttatagttgtttctcagtgatccatattaaaacacaaatacctatggaagggagattttatctgctcctatctcagactacagagattaaggccctgccaagagatttggagagtactccagaaagctttrtctagtttacagatttgccactctgatacaaatattcagtgacttcaggcaaaagggattgggtgggggagggaaaggattggagacaatgacaagagtgtatgatgatcttgtatttttaaagacatgatgaaagggagatatttttagtaattttcccagctcttaatagaactaccagaaatatcatagcagtattgttactcctgcctactgaaatggaatctggcaatgacagctgacagcatccatggtcagaaagaaggtttcactgataggtcatagctggagttcacagaaagcaatttttttttagtagaaatatcttttttattttattttattattattatactttaagttttagggtacatgtgcacaatgtgcaggtttcagaaagcaatctcaaactttctccaggtgactgacatgctatttggttccactaattgtcttctaagtggtatgagtggtatttttttctaagtggtatgagtggtatttattttgttttttatggttttttgaataggtttttaaattattatactttaagctctagggtacatgtgcagaacgtccaggtttgttacataggtatacaagtgtcatggtggttggctgcacccatcaacccattgtctacattaagtatttctcctaatgctattccttcccttgccctccacccccgacaggccccagtgtgtgatgttcccctccctgtgtccatgtgttctcattgttcaactcccacttataagtgagagcatgcagtgtttggttttctgttcttgtgttagtttgctgagaatgatggtttacatctataatacagatgaccagatatatacagatttaatttaatgtaaaggaaaataaaacttagccaccctacaaatacaaattgcaaagtaaatacatttctaccacattaggacaataatcctctctatttcattactgaccacaggatgccacgataatgaacatctcaatatatttagaaaacttgtggaaacctcaagattcagcaaccagatgaatgtaagaagaaatatagtaaattccctccggagcacttgattcctggttgccttccaagttcaatggcaagctactaacttgttaaggagccctctgctccctggttcaccatgctcttaagtgtcatttttctatcaaccatatgagaaagtggagtgttttctgtattatctcctgagtcatactatttctacagtcctatgtcattcaggtttttctggttgttattcctgtacttcattttcctgaagcttgtctccccttcattagagtggatgtttgagaggccacgcttaagtggcttgcatttagaagcatgggaaaatacttcaagcatttaatttagacaattacatatgtataccaggaggatgaaattcacatgagagaagcaagaaatttttgttctgctgccttgccacagataaggaatcatccttcttctttttgggggagggagttgactttaaaaaataattatagcattgtggagaactgacatgggccatagagtacttctttaaaagagacagtgaaacagacaaaatagaaagacaacacaatactataggaacgtgagacatcagttcttctttctccactccaaaaataaatttatagagaacaaatatattctttaactttgccagaatatacaatttccaaaatatactagcaaaattaattctgcttagatacatctggaaatgccattatttgggacctttggagtatatataatgtactgaagtagaaatttactatttgccaaggaattagagagtattccaacaaagtatcttaaataagaatctgaattgttcaattcttggccctgggaacctgggaacataaagtttccaaatgaagcaatgacagaacacaccagctggagacaccctgtcatgaaggatggattgatggtgccagaagattcatgaccacgtactttctgttttattcttacttaagtttttaaagggcattttagtgtcctttatgttgctattggtatccttcatgagtacaatttatgcaccctgtcatctatgccacccttggatttttttggaggcgtccatataaactggatgattagtttcttccatcatctctatcatcacctcaaattttaaatatgaaagaacctctgcactgtacctattgttcttatactgacattgaaagatggttgtcttcaagttagaatcaagtaaatgatgccaagccaagttttagttcttccttttagaaatctgaagccaataacataggggggaaagtcatcagccacataggggagaagagagaacacggaagattagacatgcatggcaggctgaaaaagaatttcttgagtaatgatttactgggatgcaatagcctgaaacttcatgaaaatgcaagatgaatttctccttcactactttcttctaaaattatttagtagtatacatttttctcacaagtttttcatattacaaaaatgatcactcctaaatatgtaaatagccaagtttattcatgaaagactcttttaaaagcttattcaccctgaacacagtaactacagctaccatcacccaacctcagtttcttgaccccatatagcccatgatcacctccccggcctcctctctttcttctcgctgttttcatcatgtgctttggtcataatgaagtcatttcacctcctccattatattaaatttattgtcagatccaacccacctttgcttttactcttccctgtgtctgcattgctttctctttccctttcttccctgctcaggtgtccatcaatcttgcagcttttctgcagctttacaaatctttctctgatccccatatcggatttatgttttctcttgaggtactcccataagtgcctgaattcattcccaccttagtgaatctcaatttactttgtaatttttgtgtttatttcctttcctttcaccccagatattaaactcacttcattagagaaatgtgcaaacacagaacagtttcttcatttgattttatgctgcctgaaatgttttcccaaatgttaaaaatactttaatcatttcttttaaattaatatacaaaatacttgatattttctatgagcctctacataaccagacactgcctacctcttccatgtcacctccttcaactctgtctttactcctgcatctcagccatactggccttcttacagtgtttccaagagttcaggctgctttctacctgagggaagcttcttgccacctttatcacattgtctcccctacactgtctattctacacctctctattccacatggaaaaactcggcatggatatgccacattaatacacagtgctgttcaggcccagatcctcttgacaccttcacagtgcagcacaaatttcatgtgtagcacatatcactgccgtggctcaattattatttaggcaattgcctttttaatgtccatcttcccaactagactaaaagctccatgaggcagtatctatgtctgtcttgctcaaggaataattgttacgaatctatctggtccagtttatggcatgtgtgggaacagtgactaattgaatatagggctagaacatgatgcaaaataaagatgttgggccagaagataaaagaccttgattgccataacaaagaatttatattttatcctagagacaatgaagatccatcaaatgtttataagctgagataatcaaatctgtgttttaaagaataactctggcagcaaattatatggctgacatggtggactgggagccaagaggctactgtagtagattataaaaaatggccacacatttattttgtccccatgtgtacatcccctttgcagggtgacttggccactcttgttactccaagtctttgaatttcaacttgatcgtgtgccttcctttggtcaatggcacattagcaactcttatgtaagcagaagtgtgaaaaccgtttgcacattggggtttgcctggtacttgcctgggaacctgaggccatcgtgtaaagtagccatactacagcagtgaattccaaccagattttaaattttctccattccgtttatatgtataacattcctttcccaccgttagaaatatctctcacttcaaacattagttctcagtggtgcgtattgacaatgtgcaatattgggataggaggaggcatatgcagtatgacttaatctcacaagagattccactatgctctatgaatgcaaattgaaagtcactctactaagtctcactgatgaatgaatgaacagttaacttagcctggggagttaacaggctccacaaagaaagtgacatttatgctggacctgagaaggaagaataaatattcatcagctggagaagtgagagaagggcacgttagacaaagagaatagtatgtacaaaggcaaatcttacatccaaaatgactgtttttaaatctcttttatttttgtacaactgaacacacaccctaacattcttaattatgctggcaaagctatagcactttcaaggaaatatatggaattactttgcagagtctaaagtttgcagagaggtcatccaaataaattattatgataattattaactttcctcaaaacattcttattttcaggaacttactttaaacatttccatgtcatcttcatctaagtctcattctccagagcaagtttaatgcggacaataagatttggtgattgtttatttgtctcaattgtcaaatagtttcagtaggtctaaaatcatgttgactttgtgaaattgaatctaaccctggttttgccatgtgtcttcattaatctcatatgaaagggctgatatcaatcaagatctcatacctcattcccatatataccaaacttctggtattcccttaaacagacacaaatatgccctcacacctacacccacagtaaattaagtcgctgaaggaaattactatcatataatgcttctgtatttctctttaatggagcatgtagaacaccttttccctacacataataggattaatatttaaaagcatcatcttcagccaagtgcaaacctttgtctgccctcagggaaagactagccaatgagaggttattctggtgatgtaatgcttgttaccttgctctctttcaggcatgattggggaagatgcttttcagaacatcaaacatgaatagaatttaactctttctcacatgactaattttagcacataagccacctgcagtatttcataaatgtgttgcttaagatcgccctgaaatagttatgcaaaatcattagagtagagaatttttgttaagcattgacatctgtatccactggcacttgccaatagctccccacctttcttgagagatcacttacttctgtatcctgatccttacgtaaatgggcaaagaatatattaacactagccagcagcagataagcttattatttccttctcagacacagatactcatgaaaatcaaatcaaaaggaatagaaacctaatatgtgttttccaaagtcaaattaatcactctgtctctcatgaccatatacagggtttatcttcatatccatatactttatttcaaaaacaaaaaagatttaagcaagtattttaataaccaggtgtgtttacaatgatattataatcttctgcctcgtgaataattttcagatctctattgatgctactaaatgtttattaatgttcagagaagccctagcccagatcaggtgaagacctattaccccttacatagcctgattctatgaaaactgataggcaggacagggtgaatatgtgttggtttccaccagcgaagtatgcaaaaatgcagacactgagctaaaaaatttccggcggatattatttcatgtagtatctcattcccattccctcctcctccacccaaacctcactttttgagcaaaagaatgcaatagtaagcatgttgtctgaaaaacataatttggaagaggaagataatgatacctgagcataccagtggtttatctgatctgacaccaggaataaagcaactcagactgctaagccagctgtgtaatttgaagtgtaatatgtagttcagagatgatgagctatgagaacttatagtcaaaatgttggaaaattaatatattagaatcttttcctcttcatttcttttttccagaatatcctgctaacactttgagaaaactgagttaatttttggcacttgagccattctttggacttttctactcgtttaggtcatgataatacagttgcattggaatggggtgaaattatgggattatagagcatttcaaacctggctgtgaataatgtctgtacatataggagagtgataagtcactgtaacttcactgagccacagtttcctcatctattaaaatgaaataattaaatattaattattaaaacagcataattcttggcaagtaattaataagtactcaattgatagtagctatggtttttactatttttttcatagacaaataatatcaaagctgctttacctttcaaagttagaaaccaaactatataaaaataattttatacccacaataggttttctgatataacaaattgtatgccacttttaaattttgaaataaatcattttgttttccattgaagattcaatttgcacttgatttttactttcccatattatttagcagaattttatttttatatattaatatttcaaagttagtgctttacaaatatatgactttgtgttctattagtataaatggtagtagtagtgtaaatagtagtagtactgtaagtagtagtagcagcagcagcagcagcagtagcagtagcagtagcagtagcagtagcataaatgttacttctaaagacctgccaagttttaaacgcattgcttctccagtgcttgagaaaaggtcctggaaggcatttctcaggccattaagtcagcttattgaaaagtggaaaatgcagtttatcaccctaaagcaaaatgagtagctcaagtttttcagtaaattagcttaaactaaattgatattgtttacatccagtgaaaagcactgacacatttctgcaaattgattttagattttaagtaagggcaatttaagttcactttctcaaaatctgcttagtgcctaacctgtgtatggagatattctaagattaaaaacaaccaccacaatgacttggcttctgccttctagatgctgatgtctagttaagggaacagacagtgcacagtgtcttaagttccataatggaggtaggtataaaattattggaaatatagatggtggggctttcaattcaacactggaggaatgagtttttcagaaaaattgtagacaggtgacatttcattggctttcaggaaataatgagtttcttgtttggataagatggaataatgatccaggtagaaggaacagttagagcaaaggaagaaaggactaaaaattcatagctgtttattgaatggctattgacccattctaatgtttctatagaatagaatgcattagatggaaatgtggcaatggaaaggttgtgctttctgtatagagacgctgtttggaaaactgaaatattaccttccaaatcatagtattcttatattttctttatagcatcccatcagaaaattcataacacatgttaactatatatattttgtgatgtatttaagcttactggacctttcttcaagtaaaacaatgttattcctttgcttttcctcagatttaaaaaattattccaatgtactattcacttcaaataaagtaaaggtaaatcccacaaatcatccttcaaaagggcgacataagttgtgcaaaaataatactaaagatatagacaacatctatttattttgattcatgcagaagtctatatgagctaattgtaaaaggcaatacatctaaatagcatgtggttaataatgtcagattatgcattaaagaaatattgtctatgctaactttttactaaaagttatttggaaaaacttcattgctcttattcacacagtaaaccaccataccatcaagtaaatgaatgcagtaagtcattcacctttcatactgtgggtgtgaaaacattcttaaataaaacttgctgagagttatctgccattttctttaagtatacagattctccatgacttatgatggggttacatcccggtaatcctaagttgaaaatatcattaggtcagaaatgcatttaatacaccaaagatcataccttagtctaggctaccataaacatgctcagaacacttacattagcctatatttggacaaataatctcataatgcagtacattgtagagtattggttgatcatggttgttcacctttgtgatctcatggctgactgggagctttggcttattaccactactcagcatcttgagaagtatcgtatcacatatcactagctgggagaaaggtcacaattcaaaatttgaagtatagttcccactgaatctgtatggcttttacacagttgaaaaatcaaaaaattataagtgaaaccattgcaagctggggaccatctgtattcactgaataagttcccatacctctgaacaggactatgtatgtgttcataattcaagtatatttagtgatacttactagacttgaattgaaatgtattatccacacatacattgtgatattgttataacaggaataattctatttaataaatggtatgtgctcaactttctatattctatgtccctgtgtcccttttgtgaccagtatcatgtattttagaattagttaactagaattacaggtaactgggtcaatcatgggtttcattatgtaaaacaaactgagctgcatggagcttgaacctaggtgtcggtccattttggtctttctgtccaccttagatatcatcyacagaagtattcgtctaagtgagtgtgagcgtgtgtgtgtgtgtgtgtgtgtgtgtctgtttattacagcctacttgattctaaaaatgatttgtatatataatgaagaatcactatattcagcatgtttaaaaatattaaaatctcagatattttaaaataaagaatatctgtttgttttttttcctcatcagctgttaaaaagaaagctggctttatcactccagttccaggaggtgtgggacccatgacagtggcaatgcttctgaagaacacccttctggcagctaaaaaaatcatttactagatcacrtgaaaggataaagcaaactgaagtcatgctatttgtttatttgacaaagggtaaaacctttatattttactacaaagctatttatttctacatggtatttattttttcatgggtgaaatcattgtgaatcaattgattcacatagttttatgcatttcctgctaatttattttgagttttaagaaaacaaccaaaacaattccaatgaaaattttagtaacaattgtttattttgagggtatttgttcataacattaaaacaataaagggctcataataaataaatatatttttgacacaattaaatattacatagagtatgtttacaacaaatatcctgtcagccaaatggttacccatataaaatgtaatttaggttttgctacttgcatgctaacatttttaatgtattttatgatctatgtcatatattaaaaaagagcttgcttactacaagaaaaatattgaaatattgaaaatattgaaaatattattattgaaaataaaatcttgatctcaactatcccccaaatgcatcctataagtccatcctaatgagaaatgatgttctatttaaggaaaggaaaatattccgggaaggcaaaaaatgcagtgctgtttggaagtgtaatgattttatcacatggtgaatgactactaagagtaatgattatatcacattgtgaatgactacttgccacagtaaaaatacatgaagaatgtgttaggtttaaacgtcgtttctttcttctaaaaaatatttggttagtaccttcactgagcaatagtggaaaaataaaaaaataagtaaacagaaaaaactaaagttgtattttcccacaaatatagtatgaatgaggtcatattaaagaacagcaactgttaatgtttgttcacaaattcagaaatctaataggaaaacatgatactttcaatgtgccaaaactaaaccttagtatacaactaaaaatctcctgccttcttgcctacctgtcttccctcttctgttacagaatttgttcctcaaagtagatgcaatgtttctaacacaatttaaattaggaaatatatatgaatgtcgttgaagtctattttgagactgctaaagctattaattgatactgtgtttttatgcccaaatcccagtatgtttatgtaccaataatgactcttacccagcgcatgtctttatcagtgtgtactcgtgacgatttgtgtgaaaatagacttgatgtttataattaataccattacaactgtataataaaagcaatttgaagaaaagctgtattctttttttctgtagatataaatttcttacccatttccttactacatcctggagaaatgtacaagtttctaaaatgtgaaagaaaagtttatatagcatattccacagtcagttcagatcaattgttgtctgataaccctgatggaagtttaaatttaaagtttccaagcaaacattcagaaagggcctctttaatttttaagggttcctaactcccaaaacaaataaagtgactaaaatacatgtatgtggaaaatgtgaagactgtaattttgagctctacctcaacagaggtgcaggaagggtacctttggaataacattcagaatttagacttcccataaactaattaaaatgctgtagaagaaaaattactctgacacttgtttaaaacagtcaagaagatgttaagactattgcagtggatgaaggagattgaactaactatgaatacaacatagacagctagagatttatagccaatgagcagagctagggggttggtggatgaaaaattactaagaggacctttagatattcagggtagggggattcttgttaaactggcttgtcaggatgcttgataacagcaggccaaagacttagatatcaaaggaagaggattagaaactagataaaatagcaatggtgagggaccctccataaactgacttaacaggattctttgctaaaactgggctcgatgggtctagatcaagacctgatcagggagagagctcagaggagcctgactaagattcggtgaaagagtcaacatattacagaggtaaagtcaatgtattggaaccataactttacaagtatttgaagtccttaaaagatagacatgttggccttgtggaggagcatagagatggttttcttctcctaccatatctgtatctgtaaagtatctgtaaagagcgccctaaagaacataataaagttacagaaatgattatgagcttaccatatatgtatgaaagcaagagttgcaattagacaaaaatgaaaggtttgttttggaaagtggtacagctggataagtatgcaaaaataaattagaggagtggataaatcagaatttggcagtatttagcaagttacgagaattgtagttagaggtcagaagatgttatcattgactaacatgaggaaattgtaaaagggagctgactttggagtagagataatatgttcagattaaaatatgttaagtttgaggtgatgacataatacatagataagaattctgaagtaatatcagtctaggaagaggataagaattcatagttactgataagaatttaggactcgtcagcatatacggacacactaaattcctggccttggtaaccattatacacactctgtgtctttccacacttgttcaatagtaacaactatccttaactgagcacgtagcatgtgctaaatactttcctcttttgttcttttctttctttctttttttgagacagggtctcactctgtttcccaggctggagtacagtggtgtggtcactgctcactgcagcctctacctccaaggctcaagcaatcctcccacctcagcctctggagtagctgggaccgcaggcgagtgccaccatgcccagctaagtttttcattttttgtagagaagggtctcactatattgcttaaactggtctcaaactcctgggatcaagcaattcttctgacttggcctcccaaagtgccttttttttttgtctttgctcattattgacaatctccacttgatagatgagaaaattattgaccctcctggttattaaaaagcctcagccaaggccaaatagatagaaaaggtggaatctgaattcacaacaaagtctgttgggatgatgtgagtcagaagccactccttttactactccactctgccttccctcagatcctgccctcaccccgaagtcctttctcttattactaggtgtctaaatcctacttgctatttaagattcacttcaaatgaaacttgtccatgaaaaatgtcagcccttagctctcagagcttttatgcacacattcatggcagttgtcactccctacccagtactgcagttatgtatgtactttgcctagaaccctttagttccttgaagtcagaatccatgcatgatttctctatttgtcttacaaatatcatctcacccagcctagtgccatggatatagtagtcattcaatattttatgaatgaatgcaactgaatccatgaaagtgatagaataaacttagagagagaatcaatgaactgatcaccattctctgccaatgaccagtaataaattttggttaagttagtgaaacagccaggaaaaaaagatagaaaggggagggaagaataaactttcagagattctctcttctagcataaacttctagaagaagagagataagtaaattgaaaagactggaaacatggcatgagagaaaagtagtagtggagctcttagcctctcatttccttctcctttctcaccctaacctgctttaatgcatattaagaatgaataaagatatcagaaaaaccaccttacagtatccatctgccccccattctttaggatttggagaaaggacttttgggtgagaggattgaagatgtgaagggagtggactttcctgtaaagattgttaagtgggagccatgagtatgggccccagaggaaaggcaacatgtttgatgacttaaagttactttctggtatactccataagctaaagcagaagatgggtttctatattaagtggcccagtttaccagagaggcttcagttccatctctcagcacagatgtgagtgaaaatcacagttaattaaatatttagttttttttctaataaaggtaatttatttaaagcttgattttaggagataattgagggaattcttttgagatcagtacaacaactactacaagagaacacagctaggtaaatggaaagagcatacgatttagaatctgtaaatatagaattgaagtccttttttttgttcgttttgttttgttttgtttgtttgagacagggtctgtagcccaggctggggtgcaatggtgtaatcatggctcattgcagccttgacctcccaggctcaagtgatcctcctacctctgcctctcaagtaactcatgcccagctaatttattttttgtagagtcggggtcttgctctgttgcccaggctggtctcaaactcctgggttcaagcaatcctcctccctcagcctctgaaagtgctgagattacaggtatgagccactgcacctggccaggattgaagtgctgactctaggcatgtcctttggcaagtcacttaattcttttgggcctcaatttgtcatttgtcatgtgagaatagaaataatgcctatttatttccttattctctgaagacagattcattgagtatttactagatgttaggcactggatttgtttgggccagggttactgaagaaagaattgagatgtgtagggaaacctgtaaagtgcaaaggactgcactagctacagttaagagtttttacaaagataatctttgtactttgatgtctcagtcttagaaataaactatttaatcccagcactttgggaggccaaggtgggtggatcatgaggtcaggagatcgagaccatcctggctaacacagtgaaaccccgtctctactaaaaatacaaaaacttagcagcgcctagtggcaggcacctgcagtcccagctactcgggaggctgaggcaggagaatggcatgaactcaggaggaggagcttgcagtgagctgagatcgcaccactgcactccagcctgagtgacagagtgagaaaacatctcaaaaaaaaaaaaaaagaaagtatttaatatgagtcctaacatctccctccagaaactacaaaaagaattgtgatggtttatttaatcttttgtaaatgatttctttttaaattctcagcaatggtgcaaagacgattgttcaatttataattcaaatgttatttgcctgggaaatatattatctagaaatcgacttagtaatcaacagttttttaaaaacctacaaaagtagaaatgcaaaatgtagacacatttaaagcgagccaagtactattatattattttaactttaaaatgatgactcctgtggcaagtgattgcccaagttataatgagttcaacaagcttgttcttgtgtgatttctaacaccacatttatatttgaatagtgaaagggctcctttctggtaaatctaatttgctgagtggacatgatgcaaaagataacctatcttgacttgaatatgtttttagggttttgaggtttcaagtttcaagaaaatacaaggaattgaaattccagacagaaagactcaatgcctcaggaagatatatttataaatcatttatattaatttggggcaagtgaaaatttctgtagttgtaaaatatagtagctgtaatgacatattttggcctttaaagtgccactttaataattacaactagatgaacttgagaaataatttgaatgttgtattaacttagaaactttctattcattggatgtatccaaactaaatgtcatcttaattttctcttaatggagaattttaatattattattattgctattatcattatgttggtactttactggttctctgtagcttaatcattgggatgcagatttaagcattgttgttcctggaatatggcagcccatttcatttactcagaaaaatgttaaatagcaggatgacagaaaggtgaatattatactattaaaaataattttatttacagcacttgtcatagtaacactaagaaacaaacactaaaatggaatatgaaacctctgtgttttcacaaatttaactgttctctgcaactaaattaacaaattatcttgatttgaaatggaacttatagtctgtaataaaaggtggtataaccaactatagtttcaggtatatttcttttagaaacaggttatgctgcttcctaatttgcagttatgtttgttgaactcccgtataggtttctagcatagtttgagctggtatagttctcttcacaccaatgggagcctttcctgaaattacattttgttcttgttgttttaagtacttttacatacatgattatgcccacaggtaacaggaaaccagtgtttcaaaagaaaacttgatcacattgctagataatacaggtatcctaaccaagtgcgtgagcgcccagaggctttctgctgctgccagaagtacatatttttttgattggtaagaactgccagatgacgcttcatgaaatataaatgcaacaaagactcagagagctcaataaaaaccttccacccgtcagtctagaaggataagagaaagaaagttaagcaactacaggaaatggctttgggagttccaatatcagtctatcttttattcaacggtaggtaatttccttttgttttgttaactttatatcagtgtaaaatgtgaatagaatttattttctctgcattagagagaagttggcttctaacagttgttctttatgacaaagatcagagtaatgaatctgtggattaatttagtttcttatgtcctgtatgttcctttcctaatatattttgacaccttttttgagacctccagaatgtttgctttatacaattgaagagtaattgatacatttagctactatactatagggttcttattttttaattaatatgtaaatgtatcaatggtcttaaatattgggtttttatttgctttaatcctaatatagtcaatggaatggatgagaaactgtaagtatgttgccctagtcacgttatggatttcaactgtaataaattaaaaaaatagaaattggaataaacagaataagaatactttccatctgttgcttgtacatagaaggaggctctctgttaaagatgcttttgcccccttaatacagcaat

SEQ ID NO: 93308 - DNA, 105399 bp, Homo sapiens
aaatcttaatttccctttttaaaaaaagatagtactctcactgctacgtcacacactgttatattttttaaatgtttgcagatgttaaatcaaagcatgcaccttaatgaatcttttcatctcttgggaaataaaccgtcacatattgtggaaacgcttcctttgaatttctgaaaacatggaacacatactcatattgtatatccacaaaatgcaccaggaattatgcagacgctttttttttttttttttccagacagggtctcactttgttgcccaggctggagtgcagtggcacaaacatggctcactgcagctttgaactctctagctcaagtgatccgcctccctcagcctcctgagtagctgggactatcagtgtgcaccaccacgcctggctaatcttttttttttttttgtagagacagggtctcattatgttgctcaggctcagactcttttatgtatgtgatcatttaacacttaggaacaagaaatccatcccgttgcactgattcaacatctgagattcagaaattatctgctgttttggaagactacaagatgaaccaggcaatctcttcagtttctgttgtcagggaactttacttagattttctgaaagagccactgagcagttttgagtcatttgcctcttcaagagattgttcctatttcagaggtctttcatttttcctttttgtattttgactagagtttatctgatctaaatacatgttttctcacagaaggcacaaaatgcttcataaggagtcattttgtcctttctttcttctgatgaacctgccctctcctcctctgcaaggtttcacagtgatgtgcaacgtccactctccatgctaagtgacagtgactgtaatttgctgagagagcagtgaccaaaccattggctccttcagaggctggttatttcaaccatctggagaaaaatggaggctcctaatgcagagtgaggaccttaagttgtctagggcaaagactcatttgttcattcattcattaattcacccatgcactcattggacaaacttgaatagggtactatgccccaggggtgtgaggaaggataaactatggagtggcccattcacaacaactgcacatcagggcagagcagaagtgctctaacagcaccagctccaggtcacccaaggatgaccaggaaggctccaggcagatcaagcattcgagctgggcttggaggaatatccttgattctggaggtggagttgggaagcagccatcccagcaaagaacatggcagcagagaagctgaagacaccaggatgaggagtggaccagtcggaatccttactcctggatgtgctgggggacagatggactcctccaaagagctgaatgctgggctgaacagttttagtccttaggagctactgactgttgtcaacagaaggtgacagcgcctaccctggcagctgcccatggggagtgatgagccggggaggaagatcctcaagacagtgaggacagaatgcaatatccctggcgtgttctaggggaaggcagtgaaggctaaaacttgggcaccggcagggagaataggtgggacaggagagccgtggaagacaggatgaagccagaaggagagctggagaaggacctgaggtgggggtgaagatggtgggagtgtcaaggggattctcacatttttatttttaactttaaaaagtttttaaacagaaacaaggtcttgccatcttgcccaggctggtctcgaattcctgggctaaagtgatcctcctgtctcagtctctcaaagtgctgggattacaggcatgagccaccatgcccacctgatcctcacattctttttttttttttttttttctgatacagagtcttgctctgccgcccaggctggagtgcagtggcatgatcttggctcactgcaacctccgcctccgaggttcaagagattctcctgcctcggcctcccaagtagctgggattacaggtgtgcaccaccacacctggctaatttttgtatttttagtagagacagggtttcaccatgttggccaggctgatctggaactcctgaccttgagtgatctgcccacctctgcctcccaaagtgctgggattacaggcatgagccaccatacctgactgattctcagattctgaaatgacagttaagcccaggactcaagccagggacagaagcarataacctggttttggtgagaaggttatgcacttgcttctgaaaatgttgatgatgagactaagtcttatagtttcttgtgcacctcccttggtgcctagaagaaaggttaaaacaggatacattacagagggactatcttgagagaggagttacctgggcacagcccaggggcccttgggagtgacatgcaagggcagcactggcttgccttatttggttctcccgctctttcttctttcccttgtaaaagtaactgaagcttaaaggtgaaaatgacttaaataatagaaaccatgttagccttactccccttccccattagccacaaattggtggcgatcaccattttgtgcaccgagcctgggtctcacgcttgcaagtccttgggctcatctggagtcagcttcatcagtttgtccacacagagcaggatgagggtgaggaaccagaggctccagccaacagctgccgcgatccagccgtactcgtccactcctgtgcggcagcaccgggctgcttgtgggcagaagtccacgtctggtggggaagggacagcaaggacgacggcatgcaccaccagccctgcccaggcttctctaccattaatattaacagaacaatcacagcacggtagctgacactgatgaggcctactacgtgccatgcactgtgctgcgtgcttttacacgttagcttatgccttcctcacaaagcgacaggtgcgacttttattcccattttacatgaagaaactgaggctgtaatttgcccaagatcacaagatggcagaagaactcaaacgcaagtctgcaggactctgaagccatactcttaacctctatgtattattccctaatacccttcctttttttttttttttctttttgagacagagtctcactctgttgcccaggctggagtgcaatggcatgatctcagctcactgcaacttctgccttctgggttcaagcaattctcctgcctcagcctcccaagtagctgggattacaggcacgcaccaccacacccagctaatkttttgtatttttagtagagactgggttttgccatgttggccaggctggtcttgaactcctggcctcaagtgatccacccacctgggcctcccaaagtgctggtattacaggcatgagccaccacgcccagcctatccttcgttttaagtgcctaagttaatgcattcggtcattcaatgagggcaggataaagggaaccagacaaaataaagtggaactttctcttttttttttgagagggagtctcactgtgttgcccaggctggagtgcagtggtgcaatttcggctcacagcaacctctgcctcccaggttcaagcaattctcctgtctcagcctccctagtagctggcactacaggcgcatgccaccacatccagctaatttttttctatttttaatagagacagggtttcaccatattggtcaggctggtctcaaactcctgaccttaggtgatccacctgcttcatcttccgaaaatgctgggattacaggcatgagccactgcgcccagctgcaaaactttctattagctagacatgcataatagtggttgctctatgaattactgagcgccttgtggctagaagtaggcaagaagaggaaaaacgtgcatagaagaagaagaaatatgtatgccaaggacgccaaaaccaagctgttgcattgggtggaagttggactagatgatttcttatggcctttccacctccaaacttcttcaagcatttgaacctagggcattgttagctgctgacctgggatgggtcattaaagcaatctgtgtcaaagattgtgcacctagatggggatcagagccaagaaagcctttcagacctgctctgcaaatagttctgggacaaaccacactggtgcacaggaaggccaggcaggcccttgcccacttgacaccaatcaacggaaagcggggaggcctttgtttccctcccaggctgagggccagttctggggttagagcagttggcaggagaagcttactgaggcactgctccagggtcccagggtctgggtggtgagcggtcaagsttgagctgttgctgctgcttgcttctggaagaaaagataggagatagtctgaggcactggcaaaagctattcccaggcatagattttgaaatgttttttgtaaatcagtagtgagtattatgaaagtattatagaagctcccgcatgggcatattgaggctttctgcaacaaagctaactccctgttatggaccgaattatgttcccctctcccaagtttcatatattgaagtcctaaccccaatgtgattgtatttggagatgggacattcgaagaggcagttaagcttaaatgaggtcctatgggtgggccctaatccaatatggcggggtccttataagatgaggaagaggccaggtgcagtggttcacacctgtaatcccagcattttgggaggccgaggtgggcagatcacctgaggtcaggagttcaagaacagcctggccaacatgatgaaaccctgtctctactaaaaatacaaaagcagccgggcgtggtggtgcatgcctgtaatcccagctacttgggaggctggggcagcagaattgcttgaacccaggaggcggaggttcagtgagctgagatcacaccattgcactccagcctgggtgacgagtgaaactccgtctaaaaaaaaaaaaaaaagaagaagaagaagaagaagaagaaacatcagcaacacacatgcacagagaaaagtccacgtgagaacccagtgagaaggcgtctatttgcaacccaaggagggaggcctcaggagaaatcaaaccatcaacaccttgatcttggacttccagcctccagaatgatggctgtcaaaaaaaattaaacatcatagaagcaagcccagagactgccagaatacgcagcacatagattgattcatgagcaaggagtggaaagataaaaaggactttagcatgaattgttaaagtcctgttgtcttgaggtgtgggattgggttagggatctgaggcatccaggttcctgtccataactgacaataagaagagagatgacctctaagtccatactgttcaatacggcagccactagccacctgtggttgtttaaatttattaaaatcaaattcagtaaaaaaaactcagcttcttgtttacattagacccatgccaagggttccattgccgcgtgtgactagtggctaccatattggaagcaccactcagacatgggacatttccaccctcagtgcaagttctattattagacagtgctcatgctgacctaggtagatggaaaccaagagatggattggaagaaccttcctagaaattatattgctgttcgttctgcttcttggggaatgcaaaaaggaaaaaaaaaaaagtggtgggcatggaaactctcaaggttcccctggctgtgggtcagtgtgtccttcaagggagcttgttgtcacagcaggacgagttcagaagaaacctgctgtttagctaaagccatgaagttgctgctgagactaattttatgccacccaacccccaagccactccaatgtcctgcttaaagtatagtaattgcctcgatgcaatctgttactgtaaattatttacagctaaatggcttagagcctggtctttatttgttttggagaaactgattcctcactattctaattttccttatgactcaaataacttccttggccctgactttcatttcacctctacacctagaatggaagttgtcctcttccaaagtgagtggaaaaaaaccctagttggctgaatgctagggttaggttcgagcttatgaaattgccattgttataggtgaaaattgttcaatatcagcaattttctgtggttcaaatggaatagccccggtgaaaattcctaagaatttaaacatcgccctcctcccttataagcagagccagaagcgagggagggactggccctacttggggctattccacaagaaaagctgctgggaagacccaacgattcagtgcagttaaacttgtcttctgattctgagctcccatcataagcaaggcactgtcggggtaagtagaaagaaactcagcactcttatttggggaggggtgaagttggaaaataaaatgaatgtgcttaccataattgctgacattcactgtgtgtgttctatgggctatttctaagttctttacatgaaattacatcaattcgtcttgacaagcactatgattgtccccatgagataaaggaggaaacttggcatagagaggtaaagtcatttgctcgaggtcgcatagctagtgagtcatggaagctggacctgggttcaggctcagcggctcaagagtgcacgtcttgaacctcaacaccaacacccctggcagtggctacagaagagagtctgaggatgagaggggcagacacaggactttgggggcagggttggttttgggagcaggagtgttgcagggcatagagagtgtggtggtgttctgaggtggctgagaacaagatcaaagccaggagcagaagatggtaaccaagrtccctctgccrtgagttgcagaacccggmmtggcagggcaaggcaggggatgtagatcagccttccagcctccacaggaaaatggggagataacccagcatttccagtgcccggggaggcaggagggtgggagacagtgaatggcagccctcctggcagtcaggttttgtgaaagtcgcagagaaagtacaaggggcagggagggatggaggacttaggaaagggaaggtcagacacaaatgtgcacagggaggattgcaaagcacgacagcccagtggggctgagaaggagccttcaggacacagcggaccaagagatatcattttggtcccctgatgggtgagactccagcaaataactttttcctttctttgtggcaaaggccaagagaggtggctgctcctgccttagctgaggaattgagtatctgatctccgtctcaggccaacctaagaccccccctgccccagccccacctcccaccccctgcctaatccttcagatgagaaagttctgtttcctccttcctttgcgcaggaccaaccctggccaaagaatcttccccctcctccttctttccctcccacctctcttccctccttcyctcccccttcccagcctggccatgaataaagctcataacgctacctgccgagcaagccgagtggagggaggcaaaggccaggctgaggatcagggtggcccgggtggcagcggggaggcgctgcatgctggaggctgtgctgagtgcccggtgcaggtgagccggtcctgcggagttgtgccgagtgcctgctgcaggtgagtcgactcccacctgcaggagctggaaagcaactctgccagaggtgaacttatgctgggtgtttgggggaaacaccatggggtggagcaaaggaaacttggcctgtcacaccttctctcacctctctagaagggaagccaaaccgttggctgaggaaggaagggaggggcaagctrtgcccttctcccctgagcgcaaatattgyccttattgagaaacaaggggaggacaagagagatctgtgtcatgctggttcctgggacatgagtttgctgcctctcccatctgcagktgtagcatggatgctcaattccatttgggccaataytcactgagcacccactatgctgaagttgggagatacctgctgtcgaagtgcsttaattacaaacacgcatcattcaaccccagaaccgtgtttgaggaatggcttgggaggataaagcactgtgggtttcaacagtggaggccacatctgctgatgggatgcttcaagaagaaaatggcatttgaggttgggcatgggggctcaccctgtartcccagcactctgggaggctgaggcaggtggatcacttgaagtcaggagttcaagaccagcctggccaaaatggtgaaaccccatctctaataaaaatacaaaaattagccaggtgtggtggtgcatgcctgtagtcccagccacttgggaagctgaggcaggaaaatcgcytgaacycggaagacagaggttgcagtaagctgagatgctcctgaccctgcattccagcttggccgacagagggagactccatctccaaaaaaaaaaaaaaaaaaaaaaagaaaatggcatttggcctgggccttgaaggatggctagaattttgacagggggagaggggaagatggcattataggtagagggacagatgagcaaargtccagaggtaaggaagtgtcagagggtggctgtaccagcagcacccagaagygcaggtgagccaaggcakgtgaggtggggaggcaagaggagagctgtgggctaagcttctgcgtgcctggtagaggaatttgaaacaaagtcaggaagcaaaggggaaggttctgtagagattttgagctgaggagtaacttgactagagctctgcattccgtctaaaacatttattgaagacccacatgtatataaaaggtctcatcctaggcactggagactgagatgactgagacacgcctcttccccttgagagcacagtgcagcagggaaccaaacccggaagaaagaaatttgatgcaacctggcaagactcaaataggggtaccttccactgtgatgggaataaaaaggaggatgggatgaactctgcctgagaggtataggggaaggattcacagagaaagtgacatttgggctgggtgctgaagtttgwgtgcagattagagttgatgggcttttcaagtcaaaggaatagcacctataaaggcgagggaatcgtctgtgtgcacacagcctgccatgtgtggaagtgttcctgcgcatgaatgggcctggtaagggtgaggggtggactccagctctgtgkaaagacatagaaggcgtgagtaagccccaaggaaagatttcctagtggagtgtaacagcccaggggaggcacttttttctaattggctctaagatataaaatagtggtggcctatgttcctggatttggggatagggccaacgtgccctaggaagggtgattttcagtcagtgcacagaagtccagtttaggcattaccactagttgaacattaaacagttgcatgccaggccaggctctcggtgtggggacctgggggtgagaaagaccacacagcccttgtgctcaaggaactcaaggtccccacagagaggacgctgcttagtagaacaaatgctgtcctcgatgttttcctcacaagtaaaccctgcagtgggcttcacagggcaggactgatttatccaatgggtactagggataacagcggtacgtggaatccccaagatttccaaggatctcaaaaatgtttgagacctgagaaaatattctcagatccaaaatttgaagaacagaccaggcatattggcacacgcctgtcatcccaacactttgggaggccgaggtgggaagatcacttgagccagggagttcaagaccagcctgcacaacatagtaagaccctgcctccgcaaaacaaacaaaaaaaaacacaaaaaaattacttgggtatggtagtgtgcacctgtagtctcagctactcaggaggctgaggtgggaggatcacttgagcccaggaggttgaggctgcagtgagctgagatggcaccactgcactccagcctgggtgacacagtragaccctgtccccaaacaaacaaacaaaaatttgaacaatcaaaaactgggcaaaataaatgattgtttcaaaagcaaagttatacagttcacttgaaatgtttaaacggaaacgatttaatgtgggacgctgggtgcattttaatgtgtttgacgtgagcagagcctgtccctcctatggaatcggaacctgaggtatgcaaacatgtaagatggcctgcctggggttattgtagtggtggattgaacagcatctgcagcctaagctgagaccatcctatcaagtcgtatcagggaaagcttttctggcaagcagtggatgtggaggagggggataatgtgttggccctccctccctattttatcattgttatgtgatgtcggactgttttagatgagctgtttgtaggacaaacattctcctatctacagatggaagaactttgttattcgaaaatagtataggctgggccaggcacggtggctcaggcctgtaatcccagcactttgggaaactgaggcaggtggctcatttgaggtcaggagttcgagaccagcctggctaacatggtgaaatcccatctctactaaaaaaattcagaaatattagccaggcgtggtggtgcatgcctgtaatcccggctacttgggaggctgaggcaggagaatcacttgaactggggaggtggaggttatagtgaaccgtgattgtgccactgcactccagcctgggcaacagagtgagactctgtctcaaaaaaaaaaaaaaaaaatagggtgggctggactggccaatgataactattaaccccaaagaaagggctgtgtgtgtgtggccactttttactttacgagtgtcaccagtatttgctgtttgtagcaggtctacaactaacaactccatgtggcccrtttcctcactcatacattttgcatcaggtttactttggagcgcatatcaggaagttgccttactcaaagctagactttctcaagactttttttttttttaaatgggtgagataggtatttggttacacayactattttaaaagttcaggctgaaatgtctgtggctaggcaccatggtggtggttggagagaggrgtagccaagagagtgggattccagggctcttactgcttccaatttcacctgttatccctgataagatttcatgtgaaaaagaaaagaagtaggcagagagtttccagggctaaaagatggaaaacctgcagtctgtggcctggaacggcccagggaagaatatttcatgttaatgaagcttctcttgtgattctgataggccccgttgccacctgtccatctcggggaaaagacctctcaccttgaacttgggtttttcatctccagttaacccaaaatctattcagaggagaattgtggccctaaccaagcctgtgcctgccaagccccagctccctcacagagatggggttgatggctcttcttgctcctggctctgtcaggatctgtttttacaaaataatgtcaggctctgggtggttgtgggaccgaaacatctagatgtggacctgagcagcacttagtttgtggaggagttaacctcactccctgcccttcagtgatgggtctgtaatttggagagaacaagaggttcccttttaggaaaccttgagaactacagctgttaagatcatgccatagagttagttgatcaaagtaagaaagtcagcaaggaagtcctggagtccaccatttggaataatttttgaacacttcccaggatgactaatttagcttgttcaaaattgcactgggaggcggtgcagctatggtccagacacgcggaggttaacacaaaggaggtccttcctcttggcgaaaacaaccttccacctaggtcctgtatcttattccctcccatcttctctgaagtatatttcttaatttccaaacatacggaggttttctagttatctttttgttattgatttgtagcttagttgcactgtgacctgcgaatatactttgatgatttctattttttgatgttagttaaaagacaccatatgaccaatttttgtggctcttgaatgtgtcatgcagttgtggggtcagtgctccgggtaagtccattagatcaagagtgctaattgtgtggttcagaacatccrtatttttcctgtcttttaaaatttggtctaattattctgttgaatacagagatgattgcgggtttctttcttccctgtagttttgtcaacttttgcattcaatatttgaggctgtaattgaggtacaaacaaatacggaattttgacaacttcctggcaaattgaaccttcttttaaaaaatcattgtgtaatatccctcatctcttttatatttttgagatggagtctctctctgtcgcccaggctggaatgcagtggcacgatctcggctcactgcaacttccacctcccgggtccaagcgattcttcttcctcagtctcctgagtagctgggattacaggcgtgtgccaccacccccgggtaatttttgtatttttggtagaaacaggggtttcaccatgttggccaggctggtcttgaaatcctgacctcaggtgagactcccgtctcagcctcccaaagtgctgggattacaggtgtgagccactgcgcccagccttctttatctctagtaatgtttttttgccataaactttactttgtctgatattgctatagctataacaggtttcttttgttttgtttggcatgctaaatcattttcccatcatattactttcaacttttctaaaaccctgttcaagatgggaggatttcttgagcccaggactgtgagaccagcctgggcaacatagtgaaactctgttgctacaaaaaaaaaaaaaaaaacaaacctgagtttggtgatgcaagcctgtggtcccagctactcaggaggctgagataggaggattgcttgagcccaggagatccgagatggcagggagccatgatggagtcactacactccagactgggtgacagagtgagaccctgtctctaaaatttaaaaacaaacaaatcaatctatcagcttaccaagtgctctctactcttcccatctagcttatgttccttttctctttcttctcactacttttggattgagttgttgggttattccattttgtagagattacgacatgcattccttttttgttgctttttaagattattttattctgcaacccaggagcatagatccaagttaccctgaatatatgttctcacaagtgcattcttaacatatcaaagtctaatattaattgacactttcaccactttcatagataatatgaagacctcagaactttaactccatttacccactcgcccaggctggagtgcagtggcgctatctcggctcactgcaagctgcctcctgggttcacgccattctcctgcctcagcctcccgagtagctgggactacaggtgcccgccaccacgcccagctaagtttttgtatttttagtagagatggggtttcaccgtgttagccaggatggtctcgatctcctgacctcgtgatctrcccacctcggcctcccaaagtgctgggattacaggcgtgagccaccacacctggcctatccactcctgatttttataccattgtagtcatgtatgttagttatacacatagtttttaactcaataagtcattattattattattttccaagtgaatatatgagtgaaatttattaaatttatttacatgtttaccggtttattgttcttaatttatttctgcatgtctggtcttccatctgtgatcattttccttctctttgaagaataccatttagtattccctcagtggagtgattaacatgttactttgtttgtctggatatgtttttattcttccttcattcttggaaatcaccttcattgggtacaaaatgtaaggttggcagatattttctttcagtgctttaaagataacatttcatttcttttggctaccattgtttctgttgagaactgtccacctcactggggcttcattgcagataatttgcctcttttattttttggctgtttttaaatttttctttgcctttggttttcagcagttttactctgatgtgctgaagtatggattccttttttgtcctctttggagtttgtaggcaattggatatggagcttgatgttattaataagttttgaaaacttctcagccatcaaatactacttgtgaaccattctctcctctctttttgtgactgattacacataggttagatctttccactccatcctgtaattctcttaccttcttctttattctttatctttttgttttcctgtgttttactctggatattgccttttgcccaatcttttatgaaatctcttgtcatctgtgtctaatcctcttttataactacccattgggttcttaatttcgattatcttagttttagttccagaatttccattctgttcttttttatatttttttttctgccaaactattcagtcctgtttttcatcttcataaacagaggggatataattcctttaaaatccgtgtctgataacctcagtcttygccattcttttcccattcgtttatttccattgtctattatttctgctgttttcattcatatgatcatgtttctttgcatacctggttattttttattgtgggcaaaattgcaattacatactattgtttatagaaataacttgagacccaggataatgctttcttcctgtagacatgatttttgttgttgttgctttaatcgagtgcttgggggcaacacaaatctgctatcatgtcattccggtctcaggaattgagacratgtgtgtcagtttattttggatacctttccttctatggtgtagccctttagaaatttcatccccaaggaaataaccaaagatgagcacaaaaatgcatatccaaagttctccatctcaatattacaatgtttgtaaaagtgaaagcttggaagcagtttataatgaaataaagggtagctattaaaaccgtttttgggactgggtatggtggctcacacctaaaatcccagcattttggaaggccaaggtgggctgatcacctgaggtcaggagtttgagaccagcctggccaacatggcaaaaccccatctctactaaaaatacaaaaattagccagtcctggtggtatgtgcctgtaatcccagctactcaggagactggaggcaagagaatcgcttgaacccaagaggcagaggttgcagtgagccaagatcatgccactactctccagcctgggttacagagcaagactctatctcaaaaaaacaacagcaacagcagcaacaaaaaacattcttgggtaccatttaatcacttgggaaaacatttgccatagtatacaaaacagaaaagcaggatataaatctttatgtcaatataattccagttttgtaatatatacacatatacaatgaaaaatgtttggaatgaatcctctcaaaatgttagtagtagtcatatctaggatgtacagttttgggtggttttaattttgtttttaatacttttttgtgtttccattttaaaataatgaatgtgtatattatttttatgatcaagaaataaaatcaagttaatacttttttttttttttttttttttgagacagagtcttgctctgtcacccaggctggagtgcagttgtgcaatctaggctcactgcaacatctgcctcccgggttcaagtgattctagtgtctcagcctcccgagtagctgggattacaggcatgtaccaccatgcccagctaattttgtatttttagtagagacagagttctccatgttggtcaggctggtctcaaactcccaacctcaggtgatccacctgcctcagcctctcaaagtgctgggattacaggcgtgagccactgcacctggcctaagttaatacattcttaaagattatttcacaggaaagcaatacagtcacaatgaagcagacagattttacatatctgtcccattacctgggaaaaatgttcaatatcagggaatcttcttttccattaaaaaaacaagctggccaggcatggtggctcacgcctgtaatcctagcactttgggaggctgaggtgggtggatcacttgaggtcaggagttcaagaccagcctggccaatatggtaaaaccccatctctactaaaaatacaaaaactaggcaggcgtgatggtgggcacctgtaatcccagctactcgggagggtgaggcagaagaattgcttgaacccaggaggcagagtttgcagtgagccgagaatgcaccactgcactccagcctgggcaacagagcgagactctgtctcaaaaagaaaaaaagacaaaaacaacaacaacaacaaaaaaaaaaaccccaaaaaaaccttaacctttaagtttcacatggtgcagattactgcctatcayagcctcagctcttggagtgctcatggtcacaacggaatgtacagacatatccacggatggtcaggacacaaagaagactagaaagaagacacagatataacatcggattacaattagaatctcagtgttggaaaaggacctcagagaccatccgggccaatctttaaccttggaagaatgccctctgarttaatctgttctcacgctgctaataaagacatatccaaggctgggtaatttgtaaagaaaagaggtttaatgaactcacagttccacatggctggggaggactcacaatcatggcagaaggcaaaggagaagcaaaggcacatcttacatggtggcaggcaagaaagcgtgtgaaggggaactcccatttataaaaccatcagatcttgtgagactcatttcctatcatgagaacagcacaggaaagacctgcccccatgattcaattacctcccactgagtccctcccacaacaagtgggaattatgggagctacarttcaagatgagatttgggtggggacacagccaaaccatatgactttcctataaggaaagtaggatattatagagtttggtatagctgcatttgacctgtcctgcttcttaaggttgttagttggacttctgcttaaatgcctcaagggattggtttcttactaatttttaagacagccagctcttctgtgggttagctcgggtagaaaagtttgtgagttactgkcatcaaacaagtaagggcattttaaggtgaagttaataaacagttggaaggagggcttttcagctctcaactctatgattggcaatttctggttccctacaattactcttatcatttgtgcaaaatatttctgttggcacaacaatctgagcatgtggtcagattcatcttttgtttaataaacagagagatttgttctcaaagagtaactttaagctaaagtttttggaaataagctgcaggtttgtaataaatattccgccaatttttcttctccagttttgttcacataaaaccgaagcgaaccagatagtcaagtcaatgattgtttggacctgtcttcccaacatccaaagacccctctctcactgtgttttctggccttttctataacttcccttcattctctttctctttttttctttttccgtttttaagacagaatctcactctattgcccagggtggagtgcagtggtgcgatcacaactcactgtagcctccacctcctagggctcaagccatcctcctgcctcagcctcctgagtagctgggactacaggcatgtaccaccacacccagctaatattttttatttttagtagagttgaggtcttgctctgttacccaggctagtctcaaactcctgggctcaagygatccttcctcctcagtctctggaaatgctgggattacaggtgtgagtcactgctcctggcctcttttttcttttttgaaaatgctttgtccatatgtttcattttatttatgtatttatttagagacagggtgttgcctaggttggagtacagtggctattcgcaggtgcaatcacagtgtattacagcctcgaactcctgggctccagtaatcctcccacctcagcctccttagtagctcgggctacaggtatgcaccaccatgcctagctcctcatcttctcttgtccaagctgcctctaggttggttggttgggaacacaagaatcctgagtcaagagtcctggattccagttttcatgttgtcacttggagtgtgaccttggaggagtcatgtaaccttggtgtcgatgcgactttctagaaggggaacacgaggggaaaaatctgggggaattatgccttccatcctttgtggggagaattttctctggggtccgcaggactctgcagaggggatacgtgatgcccagaaagggttttgctatgtatacttcctaacacaaaggggtgttaagtcctgtgagaaacaactggaaagctaccgtgatggcatgaaaagaccctgaagtgcagagccctgggttctgcttccagctctgccgccaattacctgcaggaccttgagcaaattgcatctgctccctggagttctgttttctcatctctaaagtaaggagactgaatcaggtgatctcgaagtttcttccagtgatagatttctatgactctgtagtcaatgcaggatattaaatggagaaagaagagaaacaagatagtacatttaaattctttttttttcttttttagaaagtggaggtggaaatcatgataagaaacttacttgtgtaattgggagtaaatattattatagaaaaggcagataactagggaggtgctcccaagtgaaaaacttaggctagcgccgggtgtggtggctcatgcctgtaatcccagcattttgggaggctgaggtgggagggctgcttgagcccaggagtttgagaccagcctgggcaacatagggagaatctctctctctcaatctgtctctctctctctccttaggctataggtaaaaaaatccatccatgataaacttcagggcattctgttgtctctcttttttttttttcctgagacaaggtctcactctgtcacccaggctggagtgcagtggtgcaatcttcgttcactgcagcrtcgacctccctggctcaagcgatcctcccacctcagcctcctgagtagctgggactagagatgcatgccacgaaggccagctaagtttattttgtgtagagacagaggcttgctatgttgcccaggatggtttcagactcctgggctcaagcaatcctcccacctcggcctcccacagtgttgggattataggcatgagccattgtgcccagcccattctgttctctttatgataaaacttcattttcctaagtctcatttccagttcctccatgacgtggcaagtgaagacaggaatgaaaggaatgtaaagcagcttttctctgaagagaagaagagagagagacasagccaaggtacgctgaggtggagaagagggaagctggagggctcygtggtggaggaggwtcttctcctaaggaatgaggtggtcgtgtgctgaggggtgtggggaggagtggagagtagaggagagtggagctgtctgagagccactgggagggctcagtgtcctaggacgtgatctagaggacagaaagtggtagaacagcagggagtgccccactggcgttggatggcagcagtgagcactgagacacattcctggaaaaagtcgtggccaggaggaagtggaaatgtgcatggcagggatgatcctggttccagcatccgtagatttgatctcagtgtgctgattcatgaactcttggaccttactatcaatgaattgcattcagttgcacatgggtgtgtttgtgtgtgtgtgtgtgcgtgtgtgtgcatacaatggaggaagttgaattcattctctcttttttttagcaacctcaaatcattcttttctgtctcaaacactttgtttatgagtgcatattgtaaagggtggtgggtggcagagtcagtgcctggccaacagtgaagaagtattcagcttggctgggtgcagtggctcatgcctattataatcccagtactttggaaggccgaggcaggtggattgcttgaggtcaggggttcaagaccagcctggccaacatggtgaaaccctgtctccactaaaaatacaaaaaattamccgggcgtggtggtgcacacctgtagtcctagctactcaagaggctgaggcaggagaatcacttgaatccaggaggtggaggttgcagtgagctgagatcacgacactacactccagactgggcgacagagcaagactccactcaaaaaaaaaaaaaaaagaaaaaagaaagtgagaagtattcagtttgagtggatgataaaatcagttatttgaatgaaggctatctggagggaattcagttcagaaaaatcagatgctctttttagaaaagtcagattgttacttttccagctagattattatttttggattaaattccttgcaaacattttagctggctctgtatttatcctttgtcattttctaaattacaatgatctcctcctgtaaattgatcttgtacactgaacatgtgattgtgtgcaatattttcctaatcctgggtacaaggatatgagaacacaggaagccctgtgttaaaggaatgcccgttttaaaggcacgtaagtggaatgctcatctcttcaccctcaagagccattctgtagaaagtcctcarggcatgaaagtgctttgccagggacctttgaggctaagtgtaaagcttttggaactggcartgtgccccagacttgtctaaagaatgggaacagtggcctgaaacaccaaatgtcaaaagcaatgtttgtttggataatatagaggattgattctgccctaagaaagttgtttctctcaagaccgaatgctgaatttaaatattattttccttcaaagttttgagttgactttgagagtatataaaaatattatgtttaggccaggcgcagtggctcacgcctataatcccagcactttgggaggctgaggagggtggatcatgaggtcaggagatcgagaccaccctggctaacacggtgaaacaccatctctactaaaaatacaaaaaactagctgggtgtggtggtgggtgtctgtagtcccagctactcgggaggctgagtcaggagaatggcgtgaacccaggagacggagcttgcagtgagccaagatcgcgccactgcaccccagcctatgtgacagagtgagactccatctcaaaaaaaaaaaaaaatacatatatatatatgtgtgtgtgtgtgtgtgtgtgtgtgtatatatatgtatatatatatatatatataatgtttaaggattcataggtggattagtttctttttaaaaaattcaatggcacaaataattagagaaataaggctgtattatctggctttgggcaagtcacttagcctcactgtgccttacttttctgcaagagtggattggactagatcatctatatcttacctgccaatggrcacccttttgggggctagagctgtgtttggttcttctctcctcctttccttcttcctttactcttgaggttcacagtagggaacttagaaaatttactctgattttggacaaattggactgtgtttgctaatgcttggcctgtttcaactttccaagaatcagcaatgctatgaaatgttgcacataaaaaaattgagctcagacaggaaacttctagagaaatgtcaaagatgtcatggttcaaagagattgtctcagatatacatyatgggtaagaaaaagtaggagttcccattttaaaagttatttttttgagacagggtcttactcttgtcaccttggctggagtgcagtggtacaatcatggctcactgtggccttgcactcccgagctcaagtgattctcccacctcagcctcctgagtagctgggactacaagtgtgcaccactctgcctggctaatttttaaatttttcgtagagatgatttctcactatgctgcccatgctggtctgaaactcctgggctcaagcgatcctcctgcttcagcctcctaaagtgatggaattcagacatgagccatgtgcctggcctcatttttaaaatttttaattaaaaaaawtttttttaaatagagacagggtcttgctatgttrcccagactggtcttgatctcctggcctcaagcaatactcccacctcggtcccccatagtgctgaggttataggtgtgagccaccgtacgcagccatggttcccattttctagatgtatctcccaactagaactcacagaatttggggaggggaagttatcaactgtctcttctcctgaaaataaataaataaaaccctctcctggtgctccatttcctctttagctgctgccctgctccctcctttctcttcacagttggtgtttttaaaagaaagctgtagttgatttctgtgcccatcttttttttggaatggagtcttgctctgtcccccaggctgcagtgcagtggtgcaatctcggctcactgcaacctccgcctcttgggttcaagcaattctccttcctcagcctcccgagtagctgggattacaggcatctgctaccacgcccagctaatttttgtatttttagtagagaaggggtttcactatgttggccagactggtcttgaactcctgacctcaggcgatccaactgcctcggcctcccaaaatgctgggattacaggygtgagccaccatgcccagccaatttccatgcccatcttttcttcaccagccactgactttctctgagtccccagaatcctgcccatttcactccattgaagtggatccacggggtccccagtaacctccagatctttctcagccctccccttcatgaacactccatgattctcaagacattttcttcttttgagttctcattcttctgattatcctcctccctctgtttcttgtttgtctcctctgtgcagccttgaaatcctggaatttctctgtattcaggcttggacctccactgcctctccctcrttatgggttgaagtgtgctgccccattccattcatatgttgtagttctaatccggaggatctgagaatgtggctgtatttggaaacagggtctttgccgagataattarttaagatgagtttatagcagagtggggtgggcccctaatccaatatgattggtgtccttataaaaagggatttggacacagacacacacatgtgaakgtgaaggcatagattggagtgatgcttctccaagccaaggaatgccaaagattgccagcaaccaccagcagccaagtaagagacctggaagattcttcctcacagccttcagagggaaccagccttgcgtggcatcttgatttcagacttctaactttcagggctgagataatacatttctgttggttaagccacccagtttatggcactctggtaccacagtcctaggaaactcatacacccaattctgcggtccccaggctagtggttgtccaatgtttttgtctcaggtcctctttacactgttaagaattattggggttcaggtgcagtggctcatacctgtaatcccagcactttgggaggccaaggtgggagaattgcttgaggccaggagtttgagacaagccttggcaacactgtgagacccaaactctacaaaaaaaaaaaaaaagagagagagagacagagaaaaatttctttaaaaaaaattgctgagaagattaggaacaaggcaaggacattsttcctcaccactccatttcacatcatactggagtcctaactaatgccataagaaaaagaaatgaaaaccatactgattaggaaggaagacataaaattttattcacagatgacttcattgcctgtatagaaaatctgaaagaggctgggcgcggtggctcacacctgtaatcccagcactttgggaggccagggtgggtggatcacgaggttaggagttcaagaccagcctggccaagatggtgaaaccccgtgtctactaaaagtacaaaataattagccaggcrtggtggcaggtgcttgtaatcccagctacttgggaggctgaggcagagaattgtttgaacccaggaggtrgaggctgcagcgagccaagattgcaccactgcactccagccttggtgataagagcaagactcgtctacaaaaaaagaaaaagaaaaaaaaaaagaaaatctgaaagaatcaaccaaaaaaagctttcctggaattaagtttttgtataacaaatccctttttctccatacctgttcataaggaccagcaggagcagggtgcttttagctggcaaggccagcagtacaccttcacggtcctacctcaggggaatatcaactctctagccttgtgtcataatttagtttgcaaggatcttaatcatctctcctgtctataaaatatcacagtggtctattacactgatgacaatatactgattggacctagtgagcaagaataacaactattgtagacttattgataagacatttggatgtcagagggtgggaaataaatcagacaaaaatttaggggccttctctctcagtgaaatttcttttttttaattttttttttattttttctttttgaggcaaagtctggctctttcacccaggctggagtgcagaggcatgatctcggatcatagcagtctcaacctcctgggatcaagtgatcctctcacctcagctttcaagtagctggaagcacaggcatgyaccaccacgcccagctaatttttgtttatttttcatagagatgaggcctcactatgttgcccaggttggtctcaaactctctttccccagccatccctgacattgcctaatgggctcatgaacaaagtggctatggtggcagggatggaggttgtgcgtgggctcagcaacatggacttccactcaccaaggccaacctggctgttgccactgctgagtgcccaatctgccagcagcagagatcaacactgagccctcaagatggcactattccctggggtgatccgccagctatggtactggggggtccatagactggtaccagtccatggcctgttaggaactgggccacatagctggaggggagtaggcatttccacctgagcctccacctcctgtcgtgtcagcagcaccattagatcctcagaggagcatgaaccctactgtgaactgtgcatgagaagaatctaggttgtgtgttccttacaaatctgatgcctggtgatctgagatggaacagtttcatgcccaaaccatctcccaacctccattcgtggaaaaactgtcttccacaaaacaggtctctgatgccaaaaaggttggggattgctgctttactgcatctcttaatatgaccctgctctataattagggtcaatgggaaactgcaacaacacaacccaggcagaactacaaatggcccacactcttcaggaatgaaaatttgggtcactcyaccaggtaaagaaccacaaccagctgaggtgcttgctgaaggtaaagggaacatagaacaggtattctgtagtgtaggtagttataaatactggatacaaccacatcaccagctccagaaacaaggactatcattgtcaatcagtatcttttcctttattttttatgaacacacttgtgcatatatatactcatattaagcaaatatctgttttctctcttttcctyttatcatgagacataaaatgtattgattttatatcagtatttaactattgttaattttacatcatagtaatgaagttatggggtatcaggagaagagtatacaccactcaagcagtttacctcctcttctggggaagagattagtgcattttcagtcgtatcatgttgggtagaattatgaccctgtcattgtctttatttggagattaagtgtggtttaagagttgcacataggtgccaagttgacaagggttggacttggaaaggttaattttatggtcaacttgagtgagccaagtgatgtccacatagctggtaaaacattgtttctggatgtgcctgtgggggtatttcttgaatagattagcatttgaatgggtagactgagtaaagaagacagatattccatctatatgtctatccttccaccaatattacaatcttttattttttwttttttttttaagatagggtctcactttgtcacccaggctggagtgcagtggcatgatcatggctcactgcagcctcgacctccccaggctcaggtcatcctcccaagtcggcctcccaagtagctgggatcacaggcacacaccacaaacctggctaatatttttattattattatttgtagagatgatagtctcactgtgttgcccaggctggtctgaaactcctgggctcaagcaatccacctgtcttggcctcccaaaatgctgggattataggctcaagccatcgctcctggcccaataccacagtcttgattactggtgctgtacagtaagtcttgaagttgggtagagcgtttctcccacttcattcttctcttcacgagatctctgctgctaccaccggggctggaggagcagagatgcctcattactgctctgcatgtgatcttcaccatcaatgatcgggggaggggagcttattaccaatggatgggggtaaaagttctgattaggtttcttctgacacccccracaggggcaaacaagggagccttgttaccacagagtggggctgaattcagactccccactcggcctggaagtctaggctccccacttgggctttgctggcaatggggtggggggcagggccatagttttttctgtggcgtttaactggattcgcgygattattgtctgaaagttttctttcttggcagactgcccctttcctggtccttttgctagagcgagcaggctttctttggaacttttctgctgcacatgtactggcttctgccgcactgagtccggaatatacagattgattatctgtcccttatctgaaatgctcagaccagaagtgttttagatttcagactttttcagattttggaatatttgcatatatatatatatatataaaatgagatgtcttggggatgggacccaagtctaaacacaaaagtcatgcatgattttttttttgtttttgagacagtctcactctgttgcccaggctggagtgcagtggcgcgatcttggctcactgcaacctttgcctcctgggttcaagcgattctcctgcctcagcctcttgtgtagctgggactacaggcacccaccaccacgccccgctaatttttttgtatttttagtaaagatggtgtttcaccacgttggccaggcttgtctcgaattcctgacctcaagtaatctgcctgccttggcctcccaaagtgctgggattacaggcatgacccaccgtgcccagcctcatgtatgttcatatataccttacacacatagcatgaaggtaattttatttttcccttgaggactctgaatgaaatatgtgttgtgtgcctgagttttgattgcgacctgtcacatgaagtcagcgaaattttccacttgtggtgtcatgttggtgctcggagtttgggattttggagtatttccgattttgaattttcagattagggatactcaacctgtaggaagtaacaagaaaacccagagaactcacctctgtgttgtttcttgcatcttctgattctcagagggtctatcttctgtccagctttcacagtctgcttatgtttgctgtatatatactgtacagggtttttatttttactggttgggaagaaaaagtatttctactccctttttccagatgcagaagccaaagtaatatatatgtgtgtgtgtgtgtgtgtgtgtgtgtgtgkattttttttttttttttgagacggagtttccctctctttgcccaggctggggtgcaatggcacgatcttggctctccacaacctcctccttccgggttcagctattctcctgcctcagcctcttgagtagctgggattacaggcatgcgccaccaagcccagctaattttttgtatttttagtagagatggggtttcaccatgttggccaggctggtcttgaactcctgacctcaggtgatccacccacctcagcctcccaaagtgctgggatgacaggcgtgagccaccgcgcccggccataatatttttaaaaatgtgaaccaggtcatgccatttccctgcttaaaatttcccaagggcttcccaatgctattagaataaaattcaaattccttattggcccagcagacttggggcatggcttggcccctgcctcctactctgacataccatacacatactttttttgttgtttttttttttgagacggagtctcgctgtgtcttttaggctggagtgctgtggtgcgatctcggctcactgcaacctccacttcccgggttcaagcgattctcgtgcctcagcctcctgagtagctgggattacaggcacacgccaccacacctggctaaatttgtattattagtggagaggggagttttcaccatgttggccaggctggtctcgaactcctggcctcaaagtgatcctcctgcctcaggctcccaaactgctgggattacaggcgtgagccaccgcgtccagcctatacttccactttctaagtaagcctcttctgtttttcagataaggtcactgaggccctgaggttaaatagctttcccaaggtcacgcatggtaaatggcagagctgggatcctgactccagtagttgggctggagcctctgctcttaaccattaggtacatgtactcttttctccacatgttcctgagtggtttctgagcacccagacgtttgaaaactatggccccacccgctgactgggagacaaagcaaacacctgccttggggaagagcargatgagaggtaggagggtgaagtggagagtggagggaggcacgaattgaggccagggctcctagtgcctctggagctcatatgaagggagaggtagaatcaacacagttcttatcttcctgctcttctttgcaaatcttgagttcagcctttggaacttcatccaggtgtctggattcttggacagatctgccctggcaggatgggtgggtgcagctgagctccgcctctcaagaaacgcaagcaactcctttcctccagggtacagagcaggtgctctctcagagggctgggcctccactgccccaggttcacaatcgctgcctcagcttagctgattttcccaaaccgcctacagctcctccctgctgcttcccagcctaaagtttgatttctcaccctgtgttctctaaacaatcgttctaatttgatcatgcacaagtatcacctgaggagcttattaaaaatgcaagtcttggccaggcatggtggttcatacctgtaatcccagcactttgggaagcagaggtgggaggattacttgtaggctaggagttggaggccagcctgggcaacatagtgataccctgtctttatgttgtcatattttataaaaattaaaataaaaaaatcagccaatggctgagcacggtggctcacgcctgtaatcccagcactttgggaggctgaggcaggtggatcacaaggtcaggagatcgagaccatcctggctaacccggtgaaaccccgtctctactaaaaatacaaaaaattagctgggcgtggtggcgggcgcctatagtcccagctacttgggaggctgaggcaggagaatggcgtgaacccaggaggcagagcttgcagtgagccgagatcgcgccactgcactccagcctgggcgacagagcgagagactgtctcaaaaaaaaaaaaaaaaaaaaatcagcccaatcatagtgatgcacacctgtagtcctagctactcaggaggctgaggtgggaggatcacttgagcccaggaggttgaggctgcagtgagctgtgtttgcgccaccacactccagcctggacaacagagcaagaccctgtctcttaaaaaaaaatgcaaatcacagacaatctaggaaacttgaatcctagaattaaggcaaatttaagaattattgaattttaggagtgactggtattttatgtgtgtttgtgtgtgtatatgtgcgtataaaagaatccttatcttttagagatacctgctggaatattttgaaagaaataatatgatgtatgggatttgcttccaaataatcagaggtggggaggggaagtgggtggggtgtggatgatagaacattcatgaactggtgtggccaagtaatgtgtacgtaggggttccctgtactatttgctgtacttttgcagaaaagtacagaaaagttaaaaaaaagcacccccctcactcattctggggtaccttctaaggccactggtggggagagtccctgtgggggatctgtgcaccaccctggagaagcaaagctcattcaaacaaacgcaggtggctgttgcagccccgcacccctgggcaagagaaatgcacctaattggcttgttctgcccctcgcaccctctgtcaaagaaataggaaaagacaagacccctccaaaggaaaagggcacatatcacatatgcttctgtctctttttacctgggccacagcggaagctgaatttcagccattgggcatttcataaggagtcttctattttcctttgaaagtagagtgttttggttaatagttgataggatggtgagtgtgatattttttattttccaaaactattttaattttttcatttatatatgtatatacacacatatatacacacgtatatacatatgtatatatactatatataatgtatataatatataatatatamtrtatataatgtatataatatataatatataatgtatataatatatataatgtatataatatattatatatatagatatatatatttatttatttatttttgagatggagtctggctctrttgcccaggctggagtgcagtggcgtgatctaggctcactgcaacctctgcttcctgggttcaagcgattctcctgcctcagcctcctgagtagctgggattacaggcacccgccaccacactctgctcattttttcgtatttttagtagagacaggatttcaccatgttggccaggctagtctcaaactcctgacctcaaatgatccgcccacctcagcctcccaaagtgctggaattaccggcgtgagccacggcgcccggcccccaaaattatttttcaaagttattttgtttttacaagttcaagggatgttttggtttactggggtccttctaaggcctccaggaatcttgtcctcaaccttcagctccctgaggggcaagttactttcattagaaaataaatgaatgcttcctgctgggaacttaaggtcatggcagagggcacaggtggggcgggggctgagcaggctggccggtggggcaggtttgtcttcacccacaacaggccagtgttgatacaacagagctgcctcctggctctttgggagcctgggaggagaaggagccgggaggggcgctgcggggaagccacctgcggattcactggctgctgctccgcccaggactgctagcaagcacggagggctgccagacctggggctccctgctccgtgcgtcaggttggggaaaccaccgtctgccccagaccctgacccaggacccgcctggaggaagctggggtaagaagggtgttgatgctgtgcttttgatmtgcataaagtgaatgccttgggtctctggtctatgttcacttggctgtagttactagacagggcagtaggagagctttgaattcatcttggtgtcaaaaggcacaaatgtgggcccagaccatgtgcacttcctgagggatgatgtttatcctctggtctatacatggggtattgcttctggagtacccactttgtggtgctgttgacctagaccggtgtgggagtggaaacagggaatggttctagcctcgtggacttcactggtttgtgtgtggggaatccaggcagttaaacaagcgattgcaaatgattgctcttctgggggcatgtaggagggggcttagctccttgagggagctggaggtgtcagggaaggcttgtggaggaagaagatccttacatggagactggaggagtgacagggtcatgcggggcgtgggatggacggtggagaggaggatattgagtttccaaacccaggggaaagcctgggcgaagggcctgaagggggtgggagctgggagaaatgcagggtccctggagaggccaaagctggaggaggacacagaggaggccaggtcctgcagccttcggctggccagctcgaggactttagagttggtcctgtgtgaaactgggacaatgggtaggcccagtatcgagcacacagtagatactctgtacgtgataaaattaaatctactctggaggtgtggaaattcttccagaaggttgacctggggggaaaaagtgtgatttggcagcagtagggccgtcgggaggatctttgggaatagcttctgtgccctcctcctccccttggctctcatgtggccttcaacttcaccattggaaagagcttcactttcttccaacccctgggaggtgtccttccctgccacctgttctaagtgacactaaaggcagtccaatgggcagcatgacttggatggtctattaaggaatggagaaatgttcaggagtgacaaactgccccaccccagagtttggaatgcattgatcgctgctgggaggcctctgatgaccagggctccgttccctggctacgtatgctgtgtgcgggctggtggcaatggcttcaagatcatcccccagtttcacagttaaactttggacatgcatctgttasagtatggtggatgttttaatctatttcagtctagatgtttgagattcccctttcaggagtgtgagtcttagtctttctttaatcagcagtgtcaatacacacttatgactgtatggtggaactgtgtcttgcaggtcagttttggctaacctaactcgcaccattcccctgccccactcacccgtgggcatccttcttccatatacaggacatacagatttattttattcctgctgactgcacagggctctgttatatcacagtttatttaatcattcccctaatgatggatatctaggttacagccatttactataattattacatacaatattataagaaacattcttgttcatctgtttctccatacatatccaggtctatctggataaatagcagtggacatcttgatttgtgggtatgagggatataagatttgatagacattgataaattgctctctgaaaaagctacaaagaatttacacgttaacgttggatatacccaatgggcatatggattaccaaatctcattctgatgacaaaaactatttttcctgactagggaaattgaagacaaagtattctggaatccagagttggttgtgatacccacaactgagttctagagtgacattcgagtgcatgaaagggcctgttttctcataccctccacaacttgagtctttagtcatattttaaaatattttgccagctgagagcagtggctcatgcctgtaatcccagcactttgagagaccagagtgggaggatcacttcagtccaggagttcaataccagcctgggcaacacagcaagactctgtctcaacaaaaaaataaaacaactagctgggtgtggtggtgcacacctgcagtcccagctacataggaggctgaggcaggaggatctcttgagcccaggaggttgaggctgcagtgagtcatgtttgtgccactgcactccagcctgggtgacagagcaagactctgtctcaaaaataaagtataatattttgccaatctgatggagggcataaagtgctatcttgtttttagaatcaggatagctgggcatcctggtgcacacctgtagtccccgctattcaggaggctgagatgggtggattacttgagcctgggaggttgaggctgcagtaagccagaattgcaccactgcattcgagcccagggcaacagagtgagaccctgtcyaagaaaaaaaaaaaaaaaaagtctcctaaaatcagaagtgattcctaatggattttttttccctgttagattttaatttaacttaaaaatttcaccctaaggttttcacacatttattaccttaaatattaatatctttttctttttctcctgtagaccgaggctgggccaagatggygtctgtgtttcgaagcgaggagatgtgtttgtcacaactgtttctccaggtggaagctgcatattgctgtgtggctgagctcggagagctcggattggttcagttcaaagatgtaggtactgagttctttggagataagaggaaggcaggggtgggagtagataactcttgcacaacacttctttatggtgaacaataaccattttgtagggagaggagccgtgagctggaatcgatgaaattctgtagttttagtgcttctggctaggatttgtcatgaccaggcaggtcattcaagagcgtgttctccctccctccatgcctgtctcctctataggaatgtcttgaagctctaatgcaatcactactcattagatgtcattgaattttttttctcttatgtagcatcttcaaacattgtatatagccaatgggcatgtagattaccaaaccttattctgaccataaaaactatttttcctgactagacaggctgaagacaaagtattctggagtccagagttggttgtcatacccgggattgagttccagagtgatattctagagttagacagtcttgagtatgacatgggggtatcatttcccaggggcagtttagaccctcaccaagttcgtagtctaattgagaaaaccagtccttctttacttcttcactaaggtcaaggtcagagctaagctcctgcagggaagaatcacatcttgttgttcgcatccctagttcttcacacaggacctcgtatgaggcaggtcctcaataacgtttattgagctgagctgagagttgaagttttgttgatgactgtgatacgttacatggagctgtgcaatcttcaaggtctggtcatttttatgaccccaktgaggattttgaggctcatttggatagccaaggcagagaaataaggtaaacttagatgaggacagacttcctttccttccttccttcctttcttccttccttcccctccctctcttccttccttccttttttcttttcttttcctttctttttactttacttttcttttttcaggcagatatatgattttctcccatgctgtgggtttttttcacttcctattaagaaagtgaaaggacactgttaagtgtcctttgatgcacaaaagttttaaattttgattaagtccaattttttttgttgttgttgtttgagacagggtcttgctctgtagcccaggctggagtgcagtggcacaatcacggctcattgtagccttgacctcccaggctcaagccatcctcctacctcagcacaccaccacgctcggttaattttgtaattttttgtagagatgaggtctcattatgttgcccaggttggtctcgaactcctgggctcaagggatccaccagcctcgacctcccaaagtgttgggattacaggcatgagcaactgcacctggccaggactttgtttcttttagaaacgagagggtgaatgttgaagcatttgggggattgaatgtaagaacactaaggtgtgttttgcctgtaactcacctgtcttgtgcatggaagtatctattcctaagataattccagcaacattctctagtattaaaaagataataaaatgaccaaaagggggcttagcgcagtgcctcacgcttgtaatcccagcactttgagaggctgaggtgggcggatcacctgaggtcaggagcttgaggccagcctggccaacatggtgaaaccccatctctactacaaatacaaaaattagccaggcgtggtggtgggtgcctgtaatcccagttacttgggaggctgaggcagaagaatcacttgaacccaggaggtggaggttacagtgagctgagatcgcgccattgccctccagtctgggtgacaagattaaaactcagtctcaaaaaaaaaaaaaaaaaaagaaagaaatctattggcagctgttgctactaacatgtatcttgtgattttcgcccccatagttaaatatgaatgtgaacagctttcaaaggaaatttgtgaatgaagtcagaaggtgtgaatcactggagagaatcctccgtaagccaattttttttttttttttcttactgttcaaatgtgaactggcaagggggttaatagtttgcaggacttaatgaacaaatgtgtccctatttgcaatactttttgaggtggtcccagaggcccacctggagggaatgggggaggttgggggtgggatccaggtgctgtggcagctcctaggacaattcaggtagctgagctgagtgaaaggcacatgtcttgcttgacctcatttcttagttatgagaaaacacaatcaccttggggtttctggtgggttttcattcttcaggttttctggaagacgagatgcaaaatgagattgtagttcagttgctcgagaaaagcccactgaccccgctcccacgggaaatgattaccctggaggtaagttctccactttgctggcctccccaggtaaggacagtcatgaagcctgtctccttgaaggccctgagagccacttgcagatwccgtacctgtttgcttgaaggcagggaggcaggcctgcatggtcgtctccytctcagggttacagccccaggaaaatcccagtgtgyggtttttagagccacacctgctgatctggagacagctsttttcctttctcagcatagccctcgggaagcttagcccactttgaggagttgattgcttttgtgggtgtttgattcttacaggcagtgtggtcttgtctgctgggtgccactgaatgggctgagtgtgggcataatgggatgttttctaattctctggtgggaagcagctgatgagttggactcactccagatggaagctgcttctctgactggcttctgtaggtcaactgggagaagactgcagttttcaaggacatttcagctggtggggctctccctctttcctttccttgtctatttccttccccttcagtcttttataaaacactgaataccagctgggcgcagtggctcacccctgtaatcccaccactttgggaggccgaggcaggcggatcacgaagtcaggaattcgagaccagcctggccaacatggtgaaaccctgtctctactaaatatacaaaaattagccgggkgtggtggtaggtgcctgtaatcccagctacttgggaggctgaggcacgagaatcgcttgaatccgggacgcagaggttgcattgagctgagattgtgccactgcactccagcctgggcgacagagcaagactccatctcaaaaacaaacaaacaaacaaacaaaaaaaccactgaatacctgccacgtgcaaggtagcttagaaataaacatgactgtgccctccaagggcttatagagcagatggtggggacagggatgaggggcagggctgggagaggaagtgaagaggtaggcagagccagatcatggaggaccctgggggacttaactgaaaaagcaggtattttatcctcggcagtggaacagctcattcagggcgtgggcaggtaggcaaggcttcacctagctgagccttttctctggctgggttttttttttttttttgaagataacttcaaattcttgaaaatttcaaagccatgagtagtataaatcttgatactcacatagaaatattagattgtcaaatcttctagaaaatattttggaccttatcatatttttttgagatggagtcttgctctgttgcccaggctggagtgcagtggtgtgatctcggctcactgcaacctctgcctcccaggctcaagcgattctcctgccttagcctcccaagtagctgggattacaggcatgcgccaccacgcccagctaatttttgtatttttagtagagacagggtttcaccatgttgtccaggctggtctcgaactcctgacctcaggtgatccgcccaccttggcctcccaaagtgctgggattacaggcgtgagccacctcgcctggcctgtttattgatttttgactgtattacaaattaaaatggaaaagtatgtaaaatatttatgtattaattcacttgaaaataacaataatgtctcattacatkgtaacattttttaagtgaaaaatgactgtcttttccaagacaaaaacactttcatgagaaggatggcattgtttgtgaatttttaaagtgcttggctaatagaaacagctggtttctcacacctgcttctactttaaatctgttggtgatgtgctgtttttaytgaaggagaggaagataatccagccttacacagataagcagtgggaaaagggaggaatattttaatagccttttcaaataattatggatattcttctttgatattacactgaaacttgaccagcatagagcctgtcttgattttgttaaacaggtaacatgtgctgcttttgttttcaaactgagttggctgtagtaccttaataaaggaattcatccaactgggtttagttttggctgacttcaaccatgccaaggcacacacattttcaagtttaaccattttaagtttaaaagattcaatcttgactgatattaataagcttttctgggtggggggagctaaaatttgagtggatagccctttttatttttgggggaaatttattgttttgggctatatcgtttatcttttatctctttggtaagggtgtctcttagatggattaaaaaaaaaatgtctagcatgataggccaggcgcagtggcttacgcctgtaatcccagcactttgggaagccaaggcgggtgtattgcttgaggtcaggagttcgagaccagcctgactaacatggtgaaaccccatctctactgaaaatacaaaaatattagccaggcgtgggtggcgcatgcctgtaatcccagctactctaraagctgaggcaggagaattgtttgaccccaggagagggaggttgcagggaaccgagatcgcactactgcactccagcgtgggtgacagagcaagactgtgtytcaaaaaaaaaaaaawaataataataacatgatattttaaggtgttaaagctctacattcatacatttgtaggaatagataaggggcaatcagatgtgtgcacaagtccttccttagagtttttcttctgaatgttatttgctgtaaaaatgaaattaaaacagcaccagggctggccatggtggctcatgcctgtaatcccagcactttgggaggccaaggcaggaggattgcttgagctcaggggtttgagaccagtctgcccaacataatgagactctgtctctacaagaaaataaaaataatcagctgggtgtggtggtgtgcacctgtggtcccagctacttgggaggctaaggcaggagagtggctaccagaaggtggaggctgtggtaagctgtgttcacaccactgcaccctagcctgggcaacagagtgagaccttctctcaaaaacaaaaacaaaaacaaaaacaaaaacaaaaaccaccagcataaaagtaggagagtaatatcttttaccattcattgctcactggaattgatttgttgattgattgatttgactaatcctgcagttagctgtgttcccccaacattgctagagagttgaatcctttggcaagagtacaccaatggctctgggcccctgccttgtcgagtttctaaagaggcttttataacagtcctagaggaaatactaattcaggggggagggaaaaaaccaccatcccctcagaaactgccctggcttttccttgttttcaggctttattctcatgcagctatacttttacataattatatatccattgtgtatagtaatagcagcattatttttatggcatccttaagtggatagaggaaatrattgggaaatgaagatttacttttccccccaactttgtgtcattatattcagtgttcaaaattcagggtaatggctttctctgagacgggaggtaatggagtggaactgaagctggatgatgggcggataggattcacgctgcttgtgtgtgtttgaaattttccatagtaattcaattttgtctaatactaagcatttcagggagagctaacatttacaggattatcattttttattgtttaaaaaaaatctctttgtgccaggcrcagtggctcacggctgtaatcccagcactttgggaggccgaggtgggtggatcacttgaggtcaggagtttgagactagcctggccaacatggtgaaaccccatctctactaaaaatacaaaaaaattagccgggcctggtggcacacgcctgtaatcccagctacttgggaggctgaggcaagagaatcacttgaacccgagaggtggagtttgcagtgagccaagatcatgccactgcactccagcctgggcgacagagtgagactttgtcttaaaaacaaaaacaaaaacaaaaactctgttaacagtgtcttttagatggattaaaaactagcatgataatctcttctttaataggtgaccttaatccatttccgtttattgtgatttctgattcactggctttttcagttattattccttttgttttttacttcccttccctttcctgtctttctgtaatacctgccaacccttccccactactgattggtgtgcaagctacagatgacagttacacttaacacttcaaggcacataatcactaaatttttctcataatatttgctactggttcaattatcacccctttgtggatatatgtcctttttttccctgatagcctttaaagttttatctttgttctatagtttcactcctgtctgtttcagtgtggatttgttattgtttttgttaaacattaaattgcattagtagaatttttataaaacatgtaaggtataaaaagtaaggatcagcacacaccatgtgtctgtcgccctgtgtaagataacggtacccacaggggcattcaaaaaacctgtgtgcccctcctcacccctcctccatctcctttcccctcttcccttcgagatcatcattatcctaacttctgtatttttctttattttttcatagttttattacatatttatttttctaaataacatatggtatagctttacatgttaaaaaattttctctaaatggaactatattgtttattcttctgcaacttgctatttcatcaatttcatatatattatatacatatacatatatacatacgtgtgtgtgtgtatatatatacatatatatatatatwtwtwttttttttgagacagagtctgaaaaaaagctttgtctcccaggtgggagtgcagtggtgcgacctctgctcactgtaacctctgcctcccggattcaagcgaatctcctgcctcagcctccagagttttgcccggctaatttctgtatttttagtagaaacagggtttcaccatgttggccaggctggtcttgaactcctgacttcaagtgatccacttgcctcagcctcccaaagtgctgggattacaggatgagccaccgtgcctggcccatcattttctattttaagactccatattgtttaatgtttctgaagttatttttattgttatttatttatttttttgaaatggagtcttgctctgtcgcccaggctagagtgcagtggcacgatctcggctcaccacagcttctgcctcccgggttcaaataactctcctgcctcggcctcctgggtagctgggattacaggtgtgtgccaccattcctggctaatttttctatttttagtagagatggggtttcaccacattaaccaggctggtcttgaacgcttgacctcaagtgatctgcacatctcggcctcccaaagtgctgggattacaggcatgagccaccgcacccagcctggcctagtgttttaaacgagaggaggcatgatttgccaaaatgtcttaacttctccatgaagtggccatccactcctccaagtacttcctaatcctctcgtttggtgatggaactcttaagagagcatgcacgtgtgtgtgtgtgtgtgtgtgtgtgtctgtgtgtgtctgtgtgtgtctgtgtgtatgtgtattagggtctgcaatcatgttatgtgctgattcctttgattttttttagtcatctgttgtgggtaatgtatttcaggaatgtcatrgcactttctgttggcttaccttctttttccttcctgcatagactgttctagaaaaactggaaggagagttacaggaagccaaccagaaccagcaggccttgaaacaaagcttcctagaactgacagaactgaaatacctcctgaagaaaacccaagacttctttgaggtggtcacgtgggsatgagttactaaagggcccgttcctcagaacctcaaatttccattttggaaactggctggcctgggatctgagtaaatcactctgtttctgttccatggctaggccattggtgagggcgggggagtattttgggtggaataattgtagtgctggttggattgaagggaaaaatattatggtgctcagtaaaatgtatgtgctgaaaatggctcaggcagaaagagaagtcagaacyaagcacagcagttggtttgagaagttttagggttttggtaggaaaagaccagggaagctttttgatctggccaggagcactctgttttctgacttctgttaactttttgtggaaaattaaagcttcactaaaaccagagaaaatcttgaggtgtaggtgccttttgagtttccctaaatatatttaaatgaaaatcatagtgctttgactttcagacrgaaaccaatttagctgatgatttctttactgaggacacttctggcctcctggagttgaaagcagtgcctgcatatatgaccggaaagttggggttrgtgtaattcttgtgtgtagatgggtccctggtcctggcgagtgatttctgagtgagtgaatgaaygggtgaacaaatagccaytggaatggggactgtttcccatggatgcaaagcctctgccaagcgatagacccatatgtaacttactaggttggtggagtcggaagtggtgtcagcttcttgttagtggcgatgctgacctccttgagcctgaagactgcaatgtttatattgctcccccattggaagctgtggggatcattgttcagatgggttatcacaactcttccctggcgttggaacaaggctatggggacttatgtttttcctttctctttaaaatactattttgggagccgggcgtggtggctcacacctgtaatcccagtactttgggaggctgaggtgggtggatcacttgaggtcaggagtttgaaaccagcctgggcaacatagtgaaaccccaatctctactaaaaatacaaaattagtcaggcatggtcgcacgtgcctgtaataccagttacttaggaagttgaggcaggagaatcgcttgaaccctggaggtagaggttgcagtgagccaagatcgtgccactgcactctagcctgggcgacagagcaagactccagctcaagaaaataaaataaaatattactttgataataaaatgcatttggagtttgaattttttttttttttgaaacagagtcttgctctgtcgtccaggctggagtgcagtggcctgatctcgacttactgcaaactccgcctcccaggttcacgccattctcctgcctcagccgagtagctgggactacaggcgtctgccaccacacccggctaatttttttgtgtttttggtagagacggggtttcaccgtgttaggcaggatggtctcgatctcctgacctcgtgatccgcctgcctyggcctcccaaagtgttgggattacaggtgtgatccaccgcacctggcctgaatttgtgtgttttttttgacacgggctctcactctgttgcccaggctggagtgcagaggtgcaatcatagctcactgcagccttgacctctcaggctcaagtgatcttcctacctctgcctcgcgagtagctggaccacaggcacaatgccaggctaatttttaaaaaattttttagtagagacaaggcctcactgtgttgcccgggatacatttttaaatgtaattagaaatgggggtcagatgtggtggcttatgcctataatcccagcactttgggaagctgaggcaggaggatcacttgaggccaggagtttgagatcagcctgagcaacatagcaagactctgtgtctacaaaaaaaaaawttttaataaaaaaaagaaatgggatagttatgcaatcaagttatttccaagaagcagtgatatgatgtgtcgtagccatgaaaataatgtggtgattcaaaatggtaggattttgttcagtgcctaagtgaaattgaggcattttaaagcatttctgaaaattgtgagtttgggatttatgattttttattcaataaatatttgagggcctgatatttgaggcactaggcattgaatttgaaatgaaaataaaaatatttattggaaatatttgatcagaaagtaatacaggatcaatgaacatttaaagtaataagccagtgaaagtcactggctaacatgaraagtttgggtcagcagttatctacatgcttggataatggaaaaaacagatatatatagacatcaatgtatttttccctcttagtattaaaatatttttggaaaaatgcatagagacyactgttgaatatttgctatcattagctacaatgcatgatgaatggtctatcatattcttttttttttttttttttttgagacagagtttcacccttctctgcccaggctggagtgcaatggcacattcttggctcactgcaacctccgcctcccaggttcaagtgattttcctacctcagcctcctgagtagctgggactataggtgcacgccaccaggtgtggctaattttgtatttttagtagagatggggtttcagcatgttggccaggctggtctcgaactcctgacctcaggtgatccgcccgcctcagcctcccaaagtgctgggattacaggtgtgagccacggcgcctggccattctatcatattcttaattgcaattagtgacgatatagtattggaatgattaaggatatttcaagataccaaagaaaacagaaggtcaaagggacttggggcaagtcagggctggatgcggggtggccttgggactcatgtcggtagagctgtgtcggggtccctcctrctcacagagtgaatggcccttcctttcatggtgtgtcttcacgtcctacagggccttctctctgcatcccaatccctgtgccttaaggaatgtcttcccttctggctgcctaggttcatagccggtgtgatcaacagggagaggatggcttcctttgagcggttactgtggcgaatctgcygaggaaacgtgtacttgaagttcagtgagatggacgcccctctggaggatcctgtgacggtgggaaccttgggctgcaaaaactttctctgagacttcccatagccctcagcagaagcgyttcrttctcccaaaacatgggggatctttagtttgatgagactaatatctatttcctttttttctcctttttttccttcccttttactttgttcctttttaaaaatatatatttgaaaggtcagttcaaggactgattcttgtcaacacctcataaytggtttattcttcccagagacatagctatacttttctctagaacttagttatactagtactatcctaggcggcagctgtgtcttaaagaactgagaactgattgaggtcagcttctcaagcttcaatgtgcacgcgagcatagaggtcacccggggatcttgttaaaatgcaaattccaggccaggcatggtggcttatgcctgtaatctcagcgctttgggagcccaaggtgggaggatcgtttgaggtcaggggattgagaccagcctgggcaacatagcaagaaaacatctctacaaaaaaaagttaaccaagtgtggtggcacacaccggtagtcccagctacttaggaggctgaggtgggaggacaacttgagcccaggaggtcaaggctgcagtgagctatgatcacaccactgcactccagcctagggaacagagtgagaccctatctcaaaaaaaaaaaaaaaaaaaaaaaaaataggctgggcatggtggctcatgcctgtaatcccagcactttgggaggccgaggtgggcggatcacctgaggtcaggaatttgagaccatcctggccaacatggtgaaactctgtctctactaaaaataaaaaaattagccaggagtggtggcgcacacctgtagtgccagctacttgcgaggctgaggcaggagaatcactggtacccaagaggcggaggttgcagtgagctgagattgtgccactgcactccagcctgggtgacagagcaagactccctcaaaaaaaaaaaaaaaaaaaaaaaaaaaaaattctgagtcagtgggtctgagtggggcctgagattccgcagttcttacaactcccagagaatgctgatgatgtatttgccaatagatcccacacttcaaacaacaaggcttcaagggggctcagcccttagtgccatacagttgttgctgtgaattctgtcggatgttgctgtctcaccttccagtttgtatttaatccacttaccctttaattcccagaagctaggcttatttctgagcgtctataatctttttcagattagaggctaaaaaaattaattttaatgaaaaaacaacaaaattcattttgatgaaaaacaactttaaaataagtgaaatttaaaataagaaagattatgaaaaaaatgagaaaccccatcactctaatgtcttcatttgtattttgcctcttgtactatttctctctatagccgtagacaggtataattttatatgattgtagyatacatggaaataatttttttcttttctttgttttacctaatatgagatccctccccatattactgtgcatccttcgtaaagatcatttttaaatttgacattaaatcatcactttttataatcctgttttgacrtatgacagtcatagtgggagagaaagtaaaagcatctggaaaaagatgagcgtggacgccgaaggtcaccaaagggaagtcatgagattagagcrgattcctgattctggtggatcaggagaaaagaaaatttaagagactcagaaaaggaccagggtagactccacgggtagagaaaccttttggaaataatgtaacgcagcagctctgaaaatcctaaaacaccgccacttgctcccgtaaggaaatgccaaagacaggattcattttgatagtatttttaaggaatrtctawtgtgtccactgagttgacgtgacgttgactatctattttggacactttatttctaatttttctccagaatgtagacaccatgatgagcatctttatgcatgtggatttttatttgcttttgaattactttcataataaacaagttcaagaaaaataggattgctggcttaaagggtgcgggcattttaatgacacccgataggtcccgacaaatggcctttcagtgacttttctgattccagtgcctcgagtagtatgtgatgagtctattggatttgtcataacttttccaacaatagtttttgtttttgttttttggggtttttttttgagacagggtctcactctgccacccaggctggagtgcagtagtatgatcatgactcactgcagcctcgacttcctgggctcaaacaatcctcccacctcagccttcctggtagctgggaccacaggtgagcaccaccacactcagctaattcttgtattttttgtagagatggggttttaccatgttgcccaggctggtcttgaacccctgggctcaagccatccacccgccttagcctcccaaagtgctgggattacaggtgtgagctactgcacccggtctgggttttgtcattttacctttaccccctcaaactaaataagattggaagaatgcattgtttcagctcatatttctttgcttacagtaagagttaaacatttgcatgtctgcttgtggaacacatcttcctttcttgtgaattgtccaacttggacttgacaagtgtgatttaagcagcagtcttatggcacacaagcaactgtgagtcaaaaaatctgagcaactgtatgtatgagtcaaaaattgggcatggctttacctttgttaaatataaaacacctactcatccccaaaatgtcggtgttgtgtgttaattaactctggtgagccagtttatcagccagctgtcttcgttttaagccttgcaatattctcttctgaatggtttcttgtttattatcatatctcttaaatgtggggcttagagctgaatataaggtctggctgtggtccaaccagcatcgggaacagggagcctgtcaccttaaggctgcattagcctctgtgaggtcctggatggccttgctctcaactgtgagctatgaacttagatgaactaggaaagttacagtttcccagttttaaatgtatgaattgtgtaagcctaaaaacaggactttacatttctctctattatgttttaaccagaaagaaacccccccctttttttttaacttattctgattttccagaaagaagaaattcagaagaacatattcatcatattttaccaaggagagcagctcaggcagaaaatcaagaagatctgtgatgggtaagagggagtgaatggctctttcttcagtgatttgggccaggattagataaagagatgtgcaatgccaaatgcacaygactgtggcttctagaggtcagtaaggctttagaataactktctcacataaaagtcagccccaactgatttttaatagttgtaagaatatgaatagggagaacttgaatatgcaaaatgtgagggtaactaaaagtggacatgttccccatttcagtctattccatctgagacttttcatcagctgctccasagtaatccaactgcatggctaacttgttttggattttacagaatcgtgttacatgtagctccatagaagcagaaatgactcagtgcagaggatattaatacattaatagattcttaggaagggrcaagcccagcttgcagtcttatttacccagcaactcacaggttttatggtttgaatgaagctcattcatataacagaactgcagcctcaattcacagcacaagtgacgtactgggaacccttatgactgggactccttttccagtggccaaagacgcagttattctaggataggctggccatctaactaaagtcagcaaaygatgtcttagcagaaaaggggatgcagaatgctttgcagcaagaactcacctgtttcctttggaatatattaaacacaggtttcgagccactgtctacccttgcccagagcstgcggtggagcgcagagagatgttggagagcgtcaatgtgaggctggaagatttaatcaccgtgagtgaggggtttgggygcatggtctgatggcagctgcaggagggctgcctctgctgttttcatacaagccctgccccccagggcccttgctgggaggctggctggaatgctggctatgcctttctggttgtggctgtggaagatttcacaattgggaaactgttcgataarctagagggaacgaagctgtgtcttaagaatgctttgcccagggtcagatttgaccacagccctagtcagccttcaggtggccaccccgatctgataaaaggcaccctttattgccagcctcggcctagacggaatctatgatacaaccacccagccaattaagttgaacaaccagtttgactgattattttcccactgaattgcctggttgtttaagctgatgggttaattctgtaaaaacagtgagtctagtttcaccatgtgaacattcattcatcccaaactcattttctttgtaaagtctgtcaccatccagggtcactcaacacacttatgatcagaaatctttcttcaatcacagcagctttgaaagtaatcactgaaaacagctgggcctccctcgctggcagactctcatcagtgctagagttcgatagaactttcggttatgatagaaggttcatgtgtcctgtgctgtccaacactgtagtcacgagccacatgtggctattgagcccttgaaacatggctagtgccactaagtcatttagtttgtatttttaattttaattcaatttaaattttagggctgggtgcggtggctcatgcctataatcccagcactttgggaagctgaggtgggtggatcacttgaggtcaggagttcaagaccagcctgaccaaactggtgaaaccccatctctactaaaaatacaaacactagtcaggcgtggtggcagtcacctgtagtctagtctcagctactcgggaggctgaggcaggagaatcgtttgaacctgagaggcaaaggtttcagggagccgagatcgcgccactgcactccagcctgggcaacaaagcgagactccatctcaaaataaaataaaaggaaataaaatacataaaatttagtagctgcatgtggctgtggtagaagtcaactcagttttagattctggacaagtatgttaagaaattagatatgtgcctctttcaaaacccttaggctagcagacaactttacttttccagaaaacctgtgtttaatttttttttttttttttttgagatggagttttgctcttgttgcccaggctggagtgcagtggcgcaatctcggctcaccgcaacctccgcctcccgggttcaagtgattctcctgcctcagccttccgagtagctgggattacaggcatgcgccaccatgcctggctaattttgtatttttagtagagatggggtttctccatgtcggtcaggctggtctcgaactcccgacctcaggtgatccacccacctcatcctcccaaagtgctgggattacaggcgtgagccactgcgcctggcctgtgtttaattttttaatcctctccattacttctttgtcacttgtcaggaacactgtttccccraagccattgaagtcctttccccccaattctccatgcttgattttatgaaaacgtcatgaggagaatggaaaataaattctgctagatgtgtgcttacatttagtatgacgggttgctgctgtgtcgagggcttcagatgatcccagctgagcagcttctgcaggggcagctttctcctttggctcagtscctgccaaagatgaatcttagacactgtctgatgctgaggcatataattcgggctatgctctttgaggtttctgaaagtcacctctgtgctgaggtgctcttgtctcctggaaatccccaggccagggggcattatattgcwaagtgacaggtagtattgggcttgtgagatgcttcggtggcctcatggctctcgttaatcttagagccagcatgtctstcttacagtgtgtctcttacagaggccatgtgtgctgaaaaagattaccctgtttgttgtatcatcaaaacataaaaatgattccattaaataaattctgtgtgggcccaattgtccattcattccttcattcattcacttgtcatttattggagggattatgtatgtaaagggttgtggtagatgtagtaatctcttagggttgctgtaacaaattacagcaaactgggtggcataagacaataaagatttattctgtcatggttctggaggccagaggtctgaaatcaaggcgtcagcagggccgtgctccctcggaagacctgaagggagccccctccttgcctctccccagctctggtgctgcgggccgtcctccgcattccttggcttgcaagtgcctacttctctgcctctgttgtcacgtggtattcttccctgtgtgcctctgtgtctacgtttcttatcaggacagtggtcatatgggattagagcccattcaaatccagtatgacctcttcttaacctgattccatctgcaaagaccctctttccaaaaaggccatattcacaggtatcagagttcaggactcttttatgtggacaattcaacccataacaatagracaatgaggaatttagaagaaaaggaagatacaatctctgcctaagggttttagcctctagcgggggagataaactgctcaggagagttcaaggccagrtgacagccacaggtcaaaggagcctgccagagcagaggaagctgctgtggcctgtgacactccatttttggcaycttgtcaaacagctctgtgaaggttctctgttttcctgtgtgttgttttttgtataggtcataacacaaacagagtctcaccgccagcgcctgctgcaggaagccgctgccaactggcactcctggctcatcaaggtgcagaagatgaaagctgtctaccacatcctgaacatgtgcaacatcgacgtcacccagcagtgtgtcatcgccgagatctggttcccggtggcagatgccacacgtatcaagagggcactggagcaaggcatggtgcgtggcaggtggagccaggaggggtccgatgagtcagcccctctgctgggctctcagagggtgttggcctcatgggccacatgaactcaagtgacttggtggtaggattgcttccttcatctttgtgtcttcagttatcaaccccactcgaggacataaaagaaattcctttgtcttttcagtgtttgacagttgttcaccattttttgaccttttgtgagtacgtattgagctttttttttaaaaaaaaaaaaatagaatctcgctctgtagcccaggctgttgtgcagtggcacagtctcggctcactgcaacctctgcctcccgggttcaagtgattctcctgcctcagcctcctgagtagctgggattacaggtgagccctaccacgtccagcaaatttttgtatttttagtagagacggggtttcaccatgttggctgggctgctcttaaactcctgacctcaggtgattcgcctgcctcgacctcccaaagtgctgacattacaggtgtgagacatcacacccggccatactgagcattaatgtgccagtctctcagctagactatcgttttggggggattttgtcttttttttcttattaaagatggggacctcgctatgacacccaggctggagtgcagggctgttcacaggcatgggcatactgccctacagcctcaaactcctgggctcaggtgatcctcccatctcagcctcccaagtggctaggactacaggcaygcgccaccatgcccagctccactctgctagactgtagataccacctgttacctcatggaggttatagtctagctagaaagatgaataaccaagcatctataataagagccaaaatatgtagatcgcttgcggtgtgtcygagatggctaagcactctgtcctcgttgagttctcaccgctccctccattcattccttagacattccctgtgtactaggaacggatctagggcttacacactggcaggccaagaccctgctttgatagacattctagaaagggacacggaggcatgtccgtgactaatgagatttcaggcagtgatgagtggtgggcaggaaaccaagcaggggacggcgaggggcaggatggagagtgggggcttgttctgatcaccgttattcaccccattgaaggagggaccccctcctgccctaaatagtacaagatggccgaacacattaccctgacactggacagacgggcttgacagctgtttttagtcactcgtcttcagagcccaggggagaaggacaccgcacgccatgcgggccacacagggcttgccctcgggaactgcgtttgggagcagagtgaagcagcagggccggtgggaggcaggctctgcagtgaacgagggtgaggtgacctttggttcttgcagaaggatgtgattagcttgtttgaataatttcacggggtgggaggagtgaagccattaggttgaggagtgggtggcatgcagctggttyggccgatggggaactagctgggtggcatatctrgtgacggcagatctcgtgktatctgaagaaaccctctctgagcaggcggcattgatagcatgggaaggttgggggmgggaggaagggtttttcaggcggaggaatctgaaggtaaaggccttgcagtaggaatgggttagaaggtgggagctttctttatccccttcgtacagataaagaaatggaggcacagaaagtagaagtaacctgactacagtcctatagccaggaggcagggtttgaatacagaaactgttcctcaaaacagtcgatgcccccacatcatggtccaaaaaccacctaaatggggcacttaaaaagcatttcaaccaggctgagcagggcgggggtgcgtcctggaggaagtgatgcatgcgcagagcgctgggaggctggccggggagcaggtgaagggaggtgcggcctcctgaaagcagaggaggattgaagctgggaccgtgagcactcgtccagctggtgtcagatcccagtgggtgtgcatgtggcacgtgctgtcgggtgtgcggtggctgtacggttcctggacagggagcacttggaattgttaagactcgagtaggtagaatggatgcagtggctcacgcctgtaataccagcactttgggaggctgaggtgggaggatcatttgagcctaggagttcaagaccagcctgtgtaacatagcactgtatggctgtagtcccagctactcaggaggctgtggcgggaggatcacttgagcccagaagtttgaggctgtagtgagctatgatcatgttactgcactccagcctgggacttcctgtctcaggaagaaaaaaaaagaaaaagaaaaaagacttgagcaagtggagaagagaggtggctagtgtagacatggccagtttccatggggaagcgtggggaagggtgaaggtgtgaatggaggattaaggcatattgttaagtagtcttgatcacaagactaaagagttttgatttcattctttaggcgataggcagcctttgaagattttaaagcaggagagtaacatgagtaaaatagtgctttttgtttgttttattaaaagagtgcttgagcaatctrggtgttagataaacggagaggggagaggctggcagagatgctgaggcttggagctagggtgatagctgtgggaatcggaggaaagattccgaaaggagaactagcaagctttgctgggtgatcgactgactgaaaccagagaaggacaaatccatgattccaagattctaggaatctgggagaatggaggctctgctgaaggggcagggagtttgtggaggggacctggctttgtggagagttgatgaattcaggattagrctcctggattttgtggggttggtgacacrttggagtttgaaagtctaagcaggcaattaggaaaaaattggggaagggccagagccatttggaagagggggatgaattgagaaagtggagaggaggaaagcatagagggccaggagtcataacattcgcatttacagcagtaggagacgggagattgtcagagactccagagggactcaattctcttgacagccctcccatgagatgaattggataagtattgggaaggtattaactctctacacataaggtcgtgagtctcagagagatcaagagattgccccaagttcgctcagtgagggacggcaggagctgggactgtgacctttgtgctgacacccagcccaagactcttctccttacatctttgtcgcttttttttttttttccaggaamtaagtggctcctccatggcccccatcatgaccacagtgcaatctaaaacagcccctcccacatttaacaggaccaataaattcacagctggcttccagaatattgttgatgcctatggtgtyggcagctaccgggagataaacccaggtaaagatctgatgaactgcacgactgggtagcttgaaagtgaaaactggtaagatggacccctgaggtgaccgaggtggtgaacttgttaaaactgtgaggcttggggctagggtagtagctgtgggaatcagaggaataagtaggatagtaggggcaagtagtaggattcctaaaatcctccttggtttcgtaataccctgtggtgtcgtctataaatgccgattggtgaaagaattgttctttgtcttcacctgtgcacccttaaactgcaacctcatcaggcagccgaagtcagtgttcatttccttcaccaatacaatgagggccatatcttggcatcttcacagtcctgtggttattgtgtgggaaagacaccagtacacagaacttagaagactcgatkcttggtgtcctaagctgtggaatcttgctaccttggttaataaaataaaggtgtaggctgggtttggtggctcacgcctgtaatcccagcactttgggaggcggaggaggtggatcgcttgaggtcaggagttcgagaccagcttgaccaacatggcaaaaccctgtttctactaaaaatacaaaaattagtagggcatggtggcaggcagctgtaatcccagctactcaggaggcagaggcaggagaatcgcttgaatccaggaggcggagattgcagtgagctgagactgcaccactgcactccagccttggtgacagagygagatcctgtctcaaaaaatagataaaataaaataaaatgaaaggatagaccagataccctttatccaagsagtgcatggtgattgttcttctccagcctgaggcccagtcgaatttgtggcctgtaatgcaggggcctcctgggttgagggtccctgcgagcaaactgctggtggtgtgtggkgcatgtgaatggtggrgaaacagacaaaagatgggtgtggagaagagtatagaaagcacctagagagagaaagctgatcttgtgttccatcaaactttgtgatttttttttttttgactttgtgatttttgacaagtcacttagcttctstaagcctcagcacatctgtaaagtggggaataagaatgcctactcataggctgggcrcagtggctcatgcccataatcccaacactttgggaggccgaggtgggaggattgcttgaaaccaggagttcgagaccagcccgggcaatatagcgagacctcatctctatagaaaattttaaaaagtagttaggcatggtggcacacatctgtagttccagctactcaagaggctgaggtgggaggatcacttgagcccaggaggtggaggttgcagtgagccatgattgtgccactgcactccagcctgggtgacagagcgagaccctctttcaaaaaaaattgaaaaacagaatgcctaggaacagatgcactcatttatgtggcagctaagcatgtgtcagggtagggatggtgagaaaagacaaccagaaaggcttaaggaaacccgcatgcaaatcgtggagctgtggcagggaatctgaggtgggggccccgaggctgtgctgaggcctcaggcgttgtgtgtctcccctccrcagccccctacaccatcatcactttccccttcctgttcgctgtgatgtttggagactgtggtcatggaaccgtgatgctcctggctgcactttggatgattctgaatgagagacgcttgctctcccagaagacagacaatgaggtgagtgtccattgaccgtcttgcccygattcattttcagaatatgaaaatctgtatgtggttttcaccatagaaataacacatttttatgaaaaataaaggagagaaggaaagtaaaaaagagccaaattaacctaaaacttctggccaaaggtaattcctttggatggtttggtgccgttcctttcagcatttttgggtttttgttcatgacttgataaggcatcgatttttctttttcattatatattttttctaactctgatgtttttgcctgattatgaaagcaatacataatcactgtaaaaattagaaaaatgcaaccatctaatgaccgagagaaaartcaccatgaatgcttttggatatctttccaatttgtttgtgcttatccaccaatttttcaaaaattggcatcaagtaatgcatactatttgtagtgtttttacttaaaatatcatgagtatttgttcatggcagaagcagcctgggacccgtgttcttctgaacactgagaaaccctgaacatcgtttccccactcttaagtttctccacctttgcagagtgctgtgaaggctgagacaactcaggagggtgcattggttcaaagtttattggctggccaggcgcagtggctcacacctgtaaccccaccactttgggaggccatggtgggtgggtcatttgagatcaggggttcgaggccaacgtggccaacatggtgaaaccctgtctctactaaaaatacaaaaattagccaggcatggtggtgggcacctgtagtcccagctactcgggaggctgaggctggagaattacttgaacccgggaggtggaggttgcagtgagctgagattgcgccactttactccagcctgggtgacagagagggactccatcttaaaaaaaaaaaaaatatctgcaatgttttattacaggttgaattaattacagctaggtcagcgatgtcgaggttagtgagcagaatcaacctgtgaccaatatagttttccatgccaagcttaaagatatgattttgtatggtaaacattttgagtttcagagttacacgtcagcacttcttggaatgattgacacacattattcagtattatgagaaagcactttattcttctcagcagacatagtcagacagggaatcaactttacaatgacaagacgcaaaatgagtatatatctgacttgtcataaatrtagcagccatgggaggccagttcagtgcttatttcctggaagcacctgagacaacagccacctgctttcaagtcccttcctaagcagatgaggccttgcttgcacttcagtttattttctaatgcaggtgcaatggaagaatctgaggcatgcatatatatataatatatattataaatatatattatgttataaatatatatattatttatatttataatatatattttatatatatatatatattttttttttttttttttttgagacagagtcttgctctgtcacccaggccggagggcagtggggcaatctcagctcactgcaacctccgcctccygggttcaagtgattctcctgcctcagcctcctgagtaactgcgactaacgtgcataccaccacatctggctaattttagtagagacggggtttcaccatgttggtcaggctggtctcgaactcctgaccccaggtgatctgcccatgttggcctcccaaagtgttgggattacaggtgtgagccatcacacccggcctttttttttttttgagacacaggctggagcgcagtggtgcaatcttggctcactgcagcctccaactcccaggttcaagtgattctcctgcctcggcctcccaagtagctgggattacaggcatgcaccaccacgcccagctaatttttgcctatatggtttttgtttcatgataacaaataccagcctaggactttttggygcacctatatgttccaaaaaccatgatgtgtgtgctcttcctgtctggatgattgatgtctgctgtggtcatgtggctcccccaagggtgcctgcaccggtgatgctggagatatcctgtagaacgcttccctctggggtctgcttcagagcccactgacaatcatcctctctgtctctctgaggccagatttggaacaccttcttccacgggcgctatctgatcctacttatgggcatcttctccatctacacgggtttgatctacaatgactgcttctccaagtccttgaacatctttggctcttcttggagtgtccaacccatgttcagaaacggcacatggaagtgagttgacagacagrgatggtgtagtcgctggccatccaggtggcctcagtgactgttttcatggttgggggagtctacacctaggtctactcagaggtgcacttgaaaattcaaataggccaggctcagtggctcatgcctgtaatcccagtgctctgggaggctgaggcaggtggatcacctgaggttaggagttcgagaccagcctggccgacatggtgaaacctggtctccactaaaaatacaaaaattagccagatgtggtggcaggtgcctggaatctcagctactcgggaggctgaggcaggagaattgcttgagcctgggaggcggaggttgcagtgagctgagattgcgccactgcactccagcctgggtgacagagtgagactccatctccaaaaaaaaaagaaaaagaaaaaatagccaagtgtgttggcacgcctttagtcctagctacttgggaggctgaggcaggaggatggcttgggccaaggaggtcaaagctgcatgagctacaatcacaccattgcactccagcctgggcaacacagcaagatgctgtctcaaaagcaaatgagaggctgggcacggtggcttacgcctgtaatctcaacactttgggaggccgaggcgggaggatcacttgagttcaggagttcgagaccagcctggccaacatggtgaaaccccatctctgctaaaaatacaaaaattagctgggcatggtggcacatgcctgtaatcccagctactaaggaggccaaggcacgagaactgcttgaatccaggaggtggaggttgcagcgagccgagatcacaccattgcactccagcctgggcaacagagcaagactccaactgaaaaaaaaaaaaaaaaagcagatgaggaaatggttggttttgtaatgctgtctccctgtatttgtcctgtggctgacagagttgggggcaggggacacctggtaaggatatgtgggtactgtagaatagagagacctggaagctctctaaatccccacagtccacccttcccctatgcattctacagtgattttatgcagttaatcagacaagcagacttcagaatggaaacataaccttttaggaatggagacttttatggggagaaagattttagagtttgagaggtaggtccatttaatgaactgggggagaacaggggactctggaggagaggggactgtgaagtgaacaaatagaaattgcgacagcctcttgattttgggggtgatcttaggctacgtgcatcacgtacctgagattcccacagtagcgtgagggctaatttgtaaaacctacatatcaatggtgacgtttcctaacatctgtctctgcccatctcctttgggtcagcttaagatttccctgtctcattctggaactttcctttgaacaaatgagaaaagaggaccaaagtgaagactgagctaggtaaacatgttcacaatctcttttcccattcttcctctcccaaggaagggacttcacgggtcttactggctcaccaaaatctgtggtgaacgtcataaatgggggacagaatgaacaatcaatttcatccaagagtttttcagttagaaaagattcaatcctgggtttatttattttttttctttttctttttctttttttttttttgagatggagtcttgctctgtcacccaggctagagtacagtggcacaatctcagctcactgcaacctccacctcccgggttcaagcgattctcctgcctcagcctcctgagtagctgggactacaggcacacaccaccacacccagctaagttttgtatttttaggagaggtggggtttcaccatgttggccaggctggtctcaaactcctggcctgaattgatccacctgcctcagcctcccaaagtgctaggattacaggcatgagccacacgcccggcccaatcctgggtttcttttgacaaagctttcctgagggcattcaaagggcttgatgttggcacagagaggctccaagagactgtagaaatatttagtgtggggcaaggagattctaacgcagtctcttcttgtttctctgctaggcctaagttccctgaagtagagatgggattccccaccttaaatatagaaaaacaaaaatatagaaaaatgaaggataaaacgttttctggaatgacatacagacagctatatctgtgatttttttttttttttgctttgcaattagtattctaaagagatgcccaaaagaacaaaactttcataaatttaaaaacaaattaggttgagcacggtggctcacacctgtgatcccagaactttgggaggccaaagtgggaggattgcttgagcccaggaattcaagaccagcctgggcaatatagggagaccctgtctctacataaaatgaaaaaaaaaaaaaaaattagctgggcagtggcacatgcctgtgcttccagctacttgggaggctgagacaggaagatcatttgagcctgggaggttgaggctgcaatgaaccgtgatggcactgttgcaccccagccttggcaatagagcaagaccccgtctcaaacaaacaaacaaacaaacaaacacattcattcttacacttagttctgctctttagatttaaactcataagtatagagatgagttttatttttttatttatttattttttattttgaggtggagtctcgttctgtggcccaagctggagtgcaatggtgcgattttggctcactgcaacgtctgcctcccgggttctagcgattctcctgcctcagcctcccaagtagctgggattacaggcgtgtgccactacacccagtgaatttttatatttttagtagagacggggtttcaccatgttggccaggctggtcttgaactcctgacctcaggtgatccacctgcctcggcctcccaaagtgatgggattacaggtgtgagccaccgtgcccggccgagatgagttttgaaacttgttcaatctgcataatttcgccagcctaccaacatgaaattccatttcccrtagagtatgattgtgaaaggccygaattaactgtcttgttaccactctgcagacatgggtatgaatgctgttctcttatgcacctgcaaatgtcttcttccccaattcaagactctttggtcttgaattggagcaatgctcagccatatgtgaagggtcaggagtataaggcagaacctcattatcactgtggcagaagaaaacgacagctgaagtacacagtgagctgattctggtcaccagctgcgacctgggtcttggacctgcttccttgatggttgaaagaccactgaaaacattcctgtagtcactggagttgggcgtattgactcaacaagggaaatggtgcatcattgggaaaaccatctctattaagagggtattagaaagggcttagaggatttagcctttgttaggaggcggggatgttgggtcatttttgtggtttggaccgtgtccttctttttgcctgtatcgaggtatgattgtggaatgatcttgttttttctcactctatcatagtcgccaggtggccttgcctgatgttgctgttctatgaagttgcttatgctcagcaggagacacgatggcttagctatgggtgccaggccagttccttcctgtcaggggtgacttttccctttatgaacacacaaacacttctctgctatggaaatccagccatttgcactgagtcatgccattaggatgggggtcacgtctgggcaagcgagtcacggtcagctgctgccactgcacattgagggccaggacagtaggccaggcttcccgattccctcagctgctacctaaggccctcagcacctcactgcagaagggagggagtgtatttctgggcagcctgtcaagactgtctgctgtctgctcttcacatttcattattttttaatttaatttaatttattttttgtagacggagtcttgctctgttgcccaggctggagtgcagtggtgcaatcttggctcactgcaacctccgcctcctggtttcaagtaattcttctgccacagcctcctgagtagctgggattacagtcatgtggcaccacgcccaactaatttttgtatttttagtagagatggggtttcaccattgttggccaggctggtcttgaactcctgacctcaagtgattcacccacctcagcctcccaaagtgctgggattacaagcatgagccaccgtaccaggcctgttcctcatcatttcaaatgctcattccttgggcccttccacagatgcagttcttaaaaaaaaatcaactcaacattctcatccccttaaggcttgcagagacagagtaagaaatttctgggccgggcatcgtggctcacaccaaatcccagcactttgggaggccgaggcaggcggatcacttgaggtcaggagttcgagaccagcctgaccaacatggtgaaaccccatctctactaaaaatacaaaaattagtcgggcatggtgccacatgcctgtaatcccagctgctcgggagcctgaggcaggagaattgcttgaacctggggttggggggtgggggtggcggaggttgcagtgagccaagatcgtgccattgcactctagcctgggcaacaagaatgaaacgcagtctccmaaaaaaaaaaaaaaaaagaaatttcttcccattgacatccattcttctgggtgaaaaggggacacagatttaaagacatacaatgggctacatgtttttagagttaagtttcatagcagttgaggtgtatatgtgaaaaaacaatccatccttcagaagcagccccagtgttccctggggagacttcccaagcatgtccctgggctggggtttctttcctgtgtgctcccagcatccctgctttctacctcatttctgatgtggtacaaatcctgatctcccttccttttccttccctttccccttctgtcccctctcccccttctcccttttttttttttttcctttcaacagagtctcactctgttgcccaggctggagtgcagtggtacaatcatggctcactgcagccttgacctcccaggctcaaggcagtcctcctgcctcagcctcccaagtagctggaactaaaggcatgtgccaccacaaccagctggtctcaaactcctggacttaagggatcctcccacctcaggctcccaaagtgctgggattatgaatgtaagccactgctcccggccctgagtttctttactatagcacatcaggctgagatctctttgcaaactcagattgtagcctcagtgtttaggacaatacttgatgtgtagtagatattgaaccaaccaaagtgatgaattgcaccagtagttggactttgatgggcaagttcgtgactggtggtattatagtatcttttctgccccggttgatcattgtttgtttttctccttttctccctctaaagtactcatgtaatggaggaaagtctatatctgcagctggacccagccataccaggagtgtattttggaaatccatacccgtttgggattgatccggtaataatgtcttcttgggttaaatatttcttatgtgaactatcttgaggagacctctggagagagaagaaaaggccaacaaagcctgtcaaatcaacaaacttgtgttgagataaaataacttctgctgacgtttttgtgacacatagagccagagtcaagtaaaagttctgtctacaccttctacccagccccattttccatacagtcccccaaacgtctgcctctttctccatcartcatatccctggtggttaataaytgcttctttaaaaggcacttggttgcctggggagtatgcatattacatragctatttagcgtcctaatcaagtttaagttccctgctytgtattttcttgcagtgggaaacatttcccttttttctaaaaaagtgtggatttacttttatgtttgctttgttttactgcatagaattgacgctttttaaaaaaggtatttgcttcattttatgtttgttatatctatctcagtcagctagatttgagctaagcaaaacgatacttcctcgcagcctgtagatataaagsggttttgaggagatacaacacatgcccgttcatgtaaagctgttcatttctattggcccagtgcatgctgccaccaggtggcggccttgtgctccaaatgagcgtgagtagtctgaaattgaacctggcaaatgctgtccatgtttcttctaagctctttctttatgggagagaacctgagacctccgttttcgttgctgacaattaggagtaaatagtactagccctaaaactggtttccagtctctcccatcttacaggtcacctcctcttaagttttcctgtgtcattccgctatcgcccgcctccctgcccttataaaaacatgaattttgcccaggatttgtttatacttgccacccagggacacttgcattctaagttttatcaaaagtggtaaagtccttgaaggctggtgtgtaagttgcaaagtgctaaaaactaatttgaatttttgtggcctgcaagacgttgtccttggtcaaaggaatttcatgtttagtaagcaggtggagaaggaatctagacggggatgatcttagggtctggttgatcttcctttgtttggaatctcattgctccaatggtctcgtctctcccctccacagcccacagttaattcatcagcaaatcctgcctgtccatttctgctcctcagacagagtggagctacggtatttcacattgcagaactgagtgatcctgagtttctactctgatgcaattttgtcatctgcccacaagttagaaaagaaagaaaatatgtcagggtgaaagagaatgtgggatattgaaaataatgaaatctgttcctagtaacatttagaattttgaaaatttctggtctttctatcctaaaataatacatatatatgatttaaaaaaatctataccacacaaaatattatataaagaaaagcaggagttggccagatgtggtggctcatgcctgtaatcccagcactttgggaggttgaggcgggtggatcacttgaggtcaggagttcgagaccagcctggccaacatggtgaaaccttgtctccactaaaaatacagaaattagctgggcatggtggcacacaccagtagtcccagctacttgggaggctgaggcaggagaattgctttaacctgggaggtggaggttgcagtgagctgagatcatgccactgcactccagcctaggcaaccagagtgagagcccatctcaaaaaaaaaaaaaaagtaaaaataccaaaattagccaggcatggtagcatatgcttgtgatcccagctactcgggaggctgaggcaggagaagtacttgaatctgggaagcagaggttgcagtaagctgagatcacaccactgcactccagcttgggtgatacagagagactcttctcaaaaaaaaaaaaaaaraaaaagaaaaagaaaagcrggagttgcctttcctacctctccagttcctgcagtcctgttcctcagagataaccactttaacagaacacgtctgtattagtcccttttcatgctggtgataaagacatccctgagactgggtaatttatraagaaaaagattgtgtggggaggccacacaatgatggtggaaagtgaaaggcacatcttacatggcggcaggcaagagagagaatgagagccaggtgaaaggggtttccccttataaaaccatcagatctcatgagacttatgcactcccatgagaacagtatggaggaaaccacccccatgattcaatgatctcccaccagcttcctcccacagcacgtggaaattatgggaatacaattcaagatgaaatttgggtgggacacaaccaaaccatatcaatgtctgtgcctatgttagtttgtatcatatatatatatatatatatatatatatatatatatatatatatatatatgggcttactttttacataacacaaatttctacagtgcatttactgactgcgtttggcatctatttgtgaatcaaatcacaaaatatttggccttcatcatagcctgggctcttaacgcaggaatcagattgcctgtgtttaaatctttgcttttctatttacttgctctgtgagtttgagcacgttaacatctctatgtctgtttcttcacctataaaacgcatataataacagccctaggccgggcgcgatggctcacacctgtaatcccagcactttgggaggccaaggcatgcggatcatttgaggtcaggagtttgacaccagcctggccaacatggtgaaaccccatctctactaaaaatacaaaattagctgggcatagtggtgggtgcctgtaatcccagctacttgggaggctgaggcaggagaatcgcttgaacccgggaggcagaggttgtagtgagccgagattgcaccattgcaccccagcctgagcaacagagcgagactctgtctcaaaaaaataaaaataaaaataaaaaaaacagcagccctaactcctaggattgcttggcaaatgaaattatgtttacatgtaaaacygccagaacagagtcttatgcacaaacgtggtaaatgctccttgaatattagttcctcttatgttatttcttcctaggtatgtaagtaacttaatcttcctgaggttatgataaattaccttatctgtaaaatgagaataactatatctcatagagttttcagtagaactaaaygagataaacacatctaaattgcttagtatgtacttggtacttaactattaacattttaaaattttctttttatttatttatttatttagagacagagtcttgctctcttgcccaggctgtaatgtagtggcatgatcatggctcaatgcagcctcgacctcctgggcctcaatctccctgcttcagccttccaagcagctgggactacaggcacgtgccatgccatgctgggctaatttttgtttgtttgtttgtttgttttgagatggrgtttcacttttgttgcccaggctggagtgcaatkgtgcgatctcggctcgccacagcctccrcctcctgggttcaagtgattcttctgcctctgcctcctgagtagctgggattacaggcataagccaccatgccatgctgggctaattttttaaaaaagcttttgtagagacggggtctcactttgttaccagcctcccaaaatggtaggattacaagcgtgagccactgcacctggccaacatttttaatgtgtcagatttggctgggtctaaagtgtactagcagacccgccctcactgcattgagtgtgcctgtgggaactgtccaaacaggtgagcaaggggaatgccgagggctggggcaggcttggtgccacttagatgccaaagcccatgtgagggtagaggaggcatctctggggtctgggcacctgttattgaagtcccttctccccgcttcccagcagccggctcctcagtgggtgcccctctggcctggctcaggacattgcaaaggaaggatcagtgcaaattagcacctgactgtgtgagcacgtgtgtgtgtgtgatggagggagcgagatgattgtgtctgaggttgtgtctggttggatgttggcsccttaacagaagcaaagaagtttggaggaggaagtcatttagcagaaaaggtgagaaagccattgtgcccttgtcgcctttgacatgtcccagagcaaacctgaaaacaatttgggatgtacctcaagtacaggtggggacaggsgaaggagcaaggacttggaatcctttccacagagtgggagtggagaccatggggctgccgagatttaaatggggaagaygaatattagtgactctggtccttagcyagtgtgagaccctaactaacccctccacccaccagccccctgcacgaccacccagtgtgcttttcctcatgtcagtatcatcgatatcatttggggcaggacaggtacacatgatccccacctggcagtgctgtttaaaatgggccatgtagaaggcagggactgtgtcttaygcatcgtgcttgcaaagattggctacaggaacggcttcttgagaaaggtctggggaaatgctttgtaatgcgaagcactacagactttcagagtaagaggtggtgttattaaaaaggattggatacattcatgggccaatgagctataggccatgattaaggaaactgaggcaagtttgagatcttgccgtaatggctcagattagctttcctcttttttttttttttttttttttgagacagagtcttgctctttcgcccaggctggagtacaatggtgcgatctcagctcactgcaacctccaccttccaggttcaagcggttctcctgcctcagcctcctgagtagttgggattacaggcacccgccaccatgcccagctaatttttgtattttggtgtagagacagggtttcrccaggttgaccagacyrgtctcgaactcctgagctcaagtgatacacctgcctcggcctcccagattatcttttcacgtaggatttttctcccctgtttccttccagcaatttgataatagcactaatgatcctgttacttttgtcattaaagttgcatttataaagggtttcatccttttttcctttttggactctaaaatgtatgcattgagctggactgaaatatgaaagtgcagttcccagagcggtttgctyagggaaagttgtgctgtagccctcaactccagtagaacttctaagactctctctcacttggttttttgtcccatttcccatccagatttggaacttggcttcaaacaaactcacatttctgaactcgtataaaatgaagatgtcggtgatcctrggaattgtccagatggttttyggtgtcatcctcagccttttcaatcacatgtaagtttcttgatgcactctctgcctgctctgtctgatcacactgatgatgaatggtgacagagccactggtttgggaactgcatctctctgtgcaagttttcttcctatgaggggtacttccctgggcatctgggcttgagccaagacaagctggttggctggaaatggcagcacctccgtttctcctgagcagagtctctccaaggtaagtgctcctctggccccagaaatatttgagggttcaaaaaaagactggaggccaggtgcggtgtctcacacctgtaatcccagcgctttggaaggccgacaggtggatcacctgaggtcaggagttcaagaccagcctggccaacatggtgaaagcccatctctastaaaaatacaaaaattagccaggcatggtgtcgggcacctgtaatcccagctacttaggaggctggggcaggggaatcccttggacctggaggcagaggtggcagtgagccaagattgtatcgctgcactccagcctgggtgacagagtaagactccatctcaaaaaaaaaaaaaaaaaaaagagaaaccattcttaacttccaggctgtacagaatcagatgatagtctccattggcctgtgggccacactktgcagacccctatcttagagcattcttaggaaaaagcttccargtccccattatatatcctcttgcctttaaatgtgcaactctgagctaggtctgcatgcgaagctgtagtcagatcaccaccctctctgtgtgggcatgacctttgctttagacgttacttctagaccrtggttctctctgactcttttgtgcaaaagcactttccagtatttcctttcaattttcttttctatgcatccatacaggattgctgtttgctgggggggtggggggtgccgttgtttgccagtagtgcaaaaaaaaaaaagatagaacattttgtgcttttgtgctttgagagaataattaagtcctaaygttcccttgatgttctatcttgtgtatgtgtgtgtcttccacccccagatacttcagaagaactctcaacatcattctgcaatttatccctgagaygatttttatcctgtgtctgtttggatacctggttttcatgatcattttcaaatggtgctgctttgacgtccaygtatctcagcacgcccccagcatcctcatccacttcatcaacatgtttctgtttaactacagtgactcttccaacgcacccctctacaaacatcaggtatttctgctatttttttttttttactcttcttttatttacttgattatgtcaaatttctctcctactctttttttttttttgagaaagagtcttgctctgtcacccaggctggagtgcagtggcgtgatcttgactcactgcaacctccacctcctgggttaaaacgattttcctgactcagcctcctgagtrgctgggactacaggtgcacgccaccacgcctggctaatttttgtatttttagtagagacaggatttcaccatgttggccaggctgctctygaactcatgacctcaagcaatctacctgctttggcctcgcaaaatgctgggattacaggtgtgagccaccgcacctggcctctctcctactcttgagtgttgcaaagagtagttatttgtaaaactgagccatcttggcatccagtggagggtgttacatcctttacatctcaaaagtgtcttattaaatgaaggtgcaagcactgagggctatagtgtggctccaaccattcttgttggggtaatacatgaaagggataattgcagagggattgaagattgtcttgtacattggctatgaagaaagaaaaaaaaataacccttcaaattgttaggcttgcagctgtagaatgttctatatggcaccttaatacttaataatcttttattcaaagagtgaactctagctaaattaacaagaataataattgaaatagaatcagaagacaaagccctgtattcacatgggcagacagtttctggaaaagcacgaatcaaactcatgctcttctgtgagcttccaaagctggcgggagctgctgttttcattttttgctcctcttccagagacagttcatcccaacagttgcactttattgccactctgatttcttccatttcttttagcctcattatcaacttaatattttatttatttatttatttatttatttatttatttatttatttatttttatttttggagatggagtcccactctgtcacccaggctggagtgcagtggcacgatcttggctcattgcgacctccgcctcctgggttcaagtgattctcctgcctcagcctcccaaggagctgggattacaagcacctgccaccaggcctggctaatttttgcatttttagtagagacggggtttcaccatgttggtcaggctggtcttgaactcctaaccacaggtaatccatccacctcagactcccaaagtgctgggattacaggtgtgaaccaccacacctggccaatattttatttttaaaaggtatacaaatcctattggggctggatataaaaataactcagtgagtaattctttgatgacacaaataacagtagctttttccccctggcctctcccagtgattaacctgatcatattatctgagggtagattttcactaaaaaagacccatttctataggtcctgattcctctggatgaagccctgtgactagttccacaaggccagctgcccttcagtgcagaggttgtctgttggggattgcacccatcagatgtcrtagttaatgtcatgcttctayggccaygccccttctcatgagttcagttcctagttgtgttctctttccctacccaagcatcaataagaaaaagaaaaggctgggcgtagtggctcacgcctgtaatcccatcactttgggaggccaaggcaggcagatcacctgaagtcaggagttcgagaccagcctgcccaacatggtgaaacaccatctctactaaaaatacaaaaaattagctgggcatggtggcaggtgcctataatcccagctactcaggagactgaggcaggagaattgcttgaacctgagaggcagaggttgcagtgagccaagattgcgccactgcactccagcctggacaacaagagcaaaactctgtctcaaaaaaaaaaawaaaaaaagaagaagaagaagaraaaatgccttgtaatcaggttttcataaggagtgagtgtagataagaatcagaaacaggtgcattactgttgggcaccattttgttatcacagatggtaaccatgagccatccccagaatgttgacatgaactgaacgtattttgaaggttcatttactcagtgctggatctaaacaaacatttatttggatttcccaaataactcttctgttttaaggcagagaactcagattcaccaaaatagttcgtgtgctaactgctttcattaagactgaagtcctcacttagtctggaataagcactgagcattgcacagtgaatgcgtggcttatccaactttttttccattcaaaagcattatttggagttggttggttttcacacaccctagtgtgaagattaattgtcttgatacagtttgaagttttcataayctcatttcggggttatgcagctggaagaggcaatacaagttaataaagtcccttcccaacattgtcctggctgtctttgaatatcaaaggatagcyacacacacacacacacacacacacacacacacacacacacacactcatcccrttgctttgtacgtcatcgggggaaaatcctgttgcataaaaatggacaaagggccatgagacagcattgtgtgcgggtactaggatggataagttcagcttgggttcacatggtctcccttcctcttttggacatttaaaagtagagtgaggccaggcgcggcggctcatgcctgtaaccccagcactttgggaggccgaggcrggcggatcacgaggtcaggagatcgagaccatcctggctaacacggtgaaaccccgtccckactaaaaatacaaaaaaattagccgggtgtggtggcacatgccggttgtcccagctacttgggaggctgaggcaagcaactcgcttgaacccaggaggcagaggttgcagtgagccaagatggcgccactgcactccagcctaggcaacagagcgagactccatctcaaaaraaaaagttgagtgaggatggaagatggaaccgataaagtgttcactctattatcagggggaatcttgttacaattgggataataaattgtctcctggcatttactgcgaccttggtcagaatgcttggagaaacgtgaaggctcaagaaatgtttttctatttccttccagcaccgtgctctcaatccttctcagcagccctgaccgagccttccgaggctggctggttcttttgaccatagcagctatgagtcactcctctaaactggtcactggggtgtgtataagaaaggaggcaggggcgtgaggatgtgaaaggtgatctggagcaggaatataacagggactcctccagggtttcagcagaggcctgaagaccgcagctgcctcactccaaagggaaggcgagagagaccgagagtgagttcaaagtgggtaacccagagcctgttgagtaaattgcccacatggaagggatgaaagtcaggtagcgatggtgaggaacttcttttttcttttttaagagataggagcaagagagctcagataattttctaggactcaaaatataaaattaccggttgaatactgtttgtgacttaaagtgacccaaggacttttgagtaccaccgagtgactggtaaagtcatgaggcctgccatagttttcatgcaggcccaggtgaaaacgacccccatgggacagagttcaagacaaggggtgcctttataatgtttcatgcgtacttcttgtttaaaagattggttacgtatggtacaagggactactcagaataaggaatacagagagtttccagtgtctaccccgtgtcgaacatttggaaacactggacagatatttctctatctgcaaggggaatattccaggygtgaaggtgaatggattcattgaaatgctttagatctctcaaaataaagtgctagtgaagtggcccatagtggtcattttcatcacgtaaagtgtgctgttctgccatgtgaaaatgatgagatctcgccattttggtcttgcagcaagaagtccaaagtttctttgtggttatggctttgatttctgtgccgtggatgcttctgattaagccgtttattcttagagccagtcatcggaaatcccaggtaagggctgtttgtttcagttcaccctactttgcataagaatgtgggtttctggaaagatgaatcttgggtttagagagaatcgtcctgggctgccagggccagaagaatggtgttgaggaactgacccgccctgagtatgtttcgttctgtggagctagacttttccactgggccgtcttatttccaacgagatgctctattaagggcaaacacgtttaagccttatgtctcggctggtcgcagtagcccacgcctgtaatcctagcactttgggaggccgaggcgggtggatcacctgaggtcgggagtttgagaccagcctggctaacgtggcgaaaccccatctctactaaaaacaccaaaattagccaggcatggtgatgggtacctgtaatcccaactacttgggaggctgaggcaggagaatcacttgagcccagggtggtgggggagattgcggtgagccgagatcacacttcactctagcctgggcgaaagggcgaaaaaccgtctcaaaaaataaaataaaataaaataaaccttatgtctgacagactttgttcagggtgtatgtgtgctgagtctcgtggtagttaatgatttataagggtctgaatgtggttgttttattagttataaataatattttattatgattttacttttaaaacaaatattaaaagcttttttcattaatattctaaagttgtgagactttactgtattatgttacagattgtgtcagggaattagaagagtaaacaaattcaattaggtcagtttttgtttgtttgtgatttttcccctgttgccaaataccaggttcagcccactttctctttttgtctaaactgcccctgagccttagatgtactaggggggtgaagcagagtttaatatcagcctgaaccaaataggatttagtaagattaaccttccagaggacatcagcgtctagctctgacacacagacggtttgagatggtcgttctctgctttcctctattagtgcaaaagattaagcggaatgtgctgagaccgtgtatgttttaaatggttgtagatatgttcagattaaattctatttttctgagatctttgttggatattgacctggacaggcagcagagtcagggacctagacatgacgagacttgagttcaggaagtttgtccctatgtgacgctctgtttctctgtcacctgcctctcctcccactgtctccttatgccagtccgaactcgttccaaagcttagctgaaacgtaatctatatgaggtattcataaagaggaagacaaagcaaggaagacttggttattgtttggttaactggtgggagagcaaggtggttgagggttgttgaggtgggtgcttgtccagacaggtgaccaagtatttcaaagagggtggcaaatacctgtttggagaagtagatgcaagttttttttgttttgttttgttttctagagacaaggtctctctctgtctctgaggccagagtgcagtggctattcaccagcacaatcatagctcactgcagcctccgactcccgggctcaagccatcctcttgcctcagcctcccaagtaacaggcatgcccccctgcctggctcagcatttttttttttttttttttttttttgagatgagctctcactatgctgcccaggctgctctcaaactcatggcctcaagtgattgtaattttttttttctaggaactaaatctgtccataagccaagagccaggttactgcaggctctcctgagttcsaggactgtaaaatratagcttgtcttgctctttgtaccacacaagctctttaaatagttgctgatctcaaagtggtagatttctcctttgcgccaccagatgacttaaatagagggaaggagggagagagggttttcctagtctgccttcatggatgatagctctgaaactgactggtaacaggagctcctgaagacggcgtggaggcctgttcccttggcccttgggatgcacggctgttggttgtttcctcaggcggctgcttagggtccttttcgtgtcggaaacattaccacctccrttcaagagatggtcctataatggcattatttgccccttctccacctctccttcatgaaatcctacagacctaatacataaacaatttgttctsacggacttcaggtgatatgaacaggggtcctgtctattagcctctcctacaacctgggtccctgcagaatgtggcctgggaacctctccactagagggccgcctgtggcgtggccctggtgacatgccccgtgggcagcgagtgagtacacatctccttccgagagcccttgtggccagccaccaggccccccacgttctgtttccccttctgacttgctgctatgaacccaggtccccccatactcccacatctcaggtcacagtgaaataactgtgtgtttctatttaaaatcttcggccgggcrcggtggctcacgcctgtaatcccagcactttgggaggccgaggcgggcggatcacaaggtcaggagatcgagaccatcctggctaacacggtgaaaccccgtctctactaaaaatacaaaaaattagccgggcgtggtggcgggcgcctgtagtcccagctactcgggaggctgaggcaggagaatggcctgagcccgggaggcggagcttgcagtgagccgaaattgcaccactgcactccagcccaggcgacagaacgagactctgtctcaaaaaataaataaataaataaataawcttcatttcaacatgtgcgttttttatggttaatgttattgaaacatataacatacagacaagtgcatgaataacgaggcaccaatccatgaagtatcgcagcatgaacacgttcgtgtcaccagcacttaaatcgagaaatgggtcatccttagaacttgagagtcctgaccgggcacagtggctcatgcctgtaatcccagcactctgggaggctgaggcaggtggattgcctgaggtcaggagttcgagaccagcctggccaacatggtgaaaccctgtctctactaaaaatacaaaaattagccggcgtggtggtgagtgccttataatcccagctactcggaaggctgaagcaggagaattgcttgaacctgagaggtggrgatggcagtgagctgagatcgccgccattgcactccagcctgggcgacataagcgagactccgtctcaaaaaaaaaaaaagttttttktgccttcttcctgtcactcttaccccaagagcaaacattgtgctgacctccaggactgtcagttcgttttgcctgttcttgaactgtatttaaatgaaatcatccagaatgtcttctttgggatctatcttctctcatccaacattgcagtgttagtaattacaaatggtgatactataaacatccttgtatatatcttttggcacatgggtttgaatttttatttattttatgtatgtatttttagatagggtcttgctctgttgcccagattggagtgcagtggtgggatcatagctgactcacctcctgggctcaggcaatcctcccacctcagcctcctgagtagctgggactgcaggcctgcaccacaatgcccagctattttttaatttttttggtagagatgaggtcttgctatgttgcccaagctggtcttgaactcctgagatcaagtgatcctcctgcctttgcctcccaaagcactgggattgtaagtgtgagccactgtgcccagccacatgtgtttttagaaagttgccagtagctaatttacaatgattgctrtatgttttatttcatacgccacccagcttaagcattgtgcgattttagtaagaggactgcaagtaagtatctggaaggaagatagtcactaggattcacaagtccagtatcacacttctacaaaattattcatgttcattttaactaattcaagaataatgagcagaaaagggtagagtttagggttggaaatggagaaaccgtaatatatctctcctttgatattttcttctataagttgaaggagagagaaaataggatttcgagatgacaaayataaagttaacttgagccacgtccctccccatgggataaagaaccacaaggtgttggggacagcctaacctagaagctggctcttggcacctggcaccctggactcttgtctagatggacctgagcccacttctgggtcctacagaggccttgttcctcagtctcctgagggcagaccaggccactggcatggacaccacgagtccctgggtggccaaggggcagctgtctgtagggaatgcgagcagaacttagacattttgggtcagggtgtctgtgtgcacatacaaggccctcatgatataggatgaagccagaggtgaaaaaaagagggctccctggtccagggccagctcccatgctgccatggcatggcgtgaattctgaatttcaacatagccttcccagtttttacaaagatttattttttaagctagaacccctatacacacactttttttttttttttttttttgaggcagagtcttgcttggtcacccaggctggagtgcagtggcgcaaacactgctcacttcagcctcaacatcccaggctcaagagatcctcctgtcctagcctcctatgtagttgggacaggtgctccctcagccaggctaaattttttttttttttttttttgagagatgggatctcactttgttgcccrggctgaccttgaactcctaggctcaaacatgaaacatattttatttaggaatttgttggcttgatgtataacttttaaatatttcaacctatggcatgtgaactactgtctttgctcttgcccagagccctgcaaatgttaagtgcagacctgctaaagaaaggagggccctggctgggtgtggtggctcacgcctgtaatcgtagcactttgggaggccgaggcaggtggatcacctgaggtcaggagttcgagatcaccctggccagcatggagaaaccccgtctctattaaaaatacaaaaattagctgggcgtggtggtgggtgcttataatcctgggtactcaggagagctgaggctggagaatctcttgaactgggggacagaggttgcagtgaaccgagattgtaccacttcactccagcctgggcgaaggagcaaaattccttctcaaaaaaaaaaaaaaaaaaaagaaaagaaagaagggtccagatacgttgatgcctaatttgcaatacccctcccatgaaatcattctagaaaaactttggacatgggacattaagcttcatggtgacttgaaagaaatataccattcacacttaggggtaaaaccagaccaagttgaatggtgactatgcctagatttttttttccttgaatttttcctaagctatttttatagttaatttcacaaggctacatggaaggtacgactgatgatttatgaccatgtgtatttcttttaacaatggaaaggcacttttgtacttgcattgctttagtgtcaagactataatttggcacattctggagcattgtggagaaaaagcacatgcactggagtcaggcaactgagtttgaattatggctctgccacttaccagccttgccagctgtatgatcttgggcacatatttttctttttttttttttttttttgagacagtctcactctgtcccccaggctggagtgcagtggcacaatcttggctcactgcaacctctgcctcccagattcaagcaattctccttcctcagcctcccgagtagctgggattacaggcatgtgctaccatgcccaactaatttttgtatttttatggagatggaatctcgctatgttgaccaggctggtcttgaactcttggcctcaggcaatcctctcaacttggcctcccacagcactgggattataggcatgagccactgtgcctggcctttaacttttttttttttttttttttttttttgagatggagtctcactctgtcgcccaggctggagtgcagtggcgtgatcttggctcaccgcagcctccacctcctgagttccaatgactctcctgcctcagcctcccgggtagctgggattacaggcatgcaccaccacgcccagctattttttgtatttttaatagagacggggtgccaggctggtctcgaactcctgaccccaggtgagccacggtgcctggcctaatttttgtatttttagtagagatgggttttcaccatgttggccacgctagtcttggactcctgacctcaagtgatctgccagcctccgcctcccgaaatgctgggattacaggcgtgagtcaccacacgcagcygggcacatttcttttctttttttatttttattttattttatttatttatttttttgagacggagtctctctctgtcgcccaggctagagtgtagtggcacaatgtccgctcactacaagctgtgcctcccgggcacatttcttaacctttctgtgctgcagcttacttctctagaaaatagggtgataattgtgcttatataaaatggttgttgtgagggcttaatgagatagtgtagtgtttagaacagtgtctggtacataggtagtatttgaggagagcctttatttatatttatatgtgttasaattctcagggtgagttgagcgcattcctcatttccctgcttgttgtcagctgcaggcatccaggatccaagaagatgccactgagaacattgaaggtgatagctccagcccttctagccgttctggccagaggacttctgcagatacccacggggctctggacgaccatggagaagaggtatctgggacgagagcccctgaggaagactccccagtttgtacaaattctagaatggacataggcagtagagctgggtgggtctggagggccccacggggcagtagccctgtcactgctgagtcctgggaagctgtgaaggtctcagggaaggggacctactagctagtctaagaggatcagaacagctatttagcaaccaatctgggcacattttaatatttctagtccaagtacygctgcatctgtatgtgtcaggtgaatatcagcctcrgatctagtgacatagaaggtcctgcgtgtcactgaggactccttggctcagcaccacgcccctataagctctcttttttgtttgtttttgagatagagtctcactctgttgcccaggctggagtgagccaatttcggctcactgcaacctccgcctcccaggctcaagtgattctcctgcctcagcctctctaatacctgggattataggcatccgccactgcacccggttaatttttgtgtttttagtagagatggggcttcaccatgttggccaggctgatcttgaactcctgacctcaggtgatctgcctgcctcggcctcccaaagtgctgggattacaggcatgagccaccgtgcctggccccctatgatctctttataatgttatctgcctctcatgtgaattcataaattgttttgttccctcatccctccctgcccctgcctgtgcaaggacagccactgcccctcaggagcccgtgccacatcctcccagatgaaagcagctgtctgttccatgtgttgactgaagtcagccacatttgtgaatcccaagctggaggctttaaccggagctctgttctaatttgggagtgggaactgggtttccatgagggccacagatgctataaatggctccatttgtggtgttaattgcttattttaaaaagttttctcttgatagccatgtgtggtggctcatacctgtaatcccagcactttgggaggccaaggcgggcggatcacttgaggttaggagtccaacaccagcctggtcaacatggtgaaaccctgtctctactaaatatacaaaaattagccaggcatggtggtgagcacctataatcccagctactggggaggctgaggcaggagaatcacttgaacctgggaggcagaggttgcaatgagctgagatcatgccactgtactcccagcctgggcgacagagcaagactgtctggaaaaaaaaaaaattatcttgattaattagaattaatgaaaaatctcaatcgtgaaaattcttcccaagaaaattctaggtacagagtgatccacagtagtggctgttgacattaccaagtctgtcagacttgctggaatgttttagaatccaacccacgcatgttctgactcctcaagtcctggcctgtccagggcaacctccctcatctcttctcctcctgccctcaatctatatccagacaatttccacctgccacctccaacatgagcaggctgcccttgcttgggcaactttagtcaccattcatggacctctttcccccaggtctaatcatacatgggtctcccgtctccaggcaaatgtgtgcctccccctgtttctctttcaagttccttgcttgcttctctccacggtagggttagccaaactcaaggttaagggtgcagtccttgactgtcacatctgcccaagactgatcccagccgcaagtytgggggttcccagggccaccctcacttcaggcaagctgactatacattcgcaggacccttagggtcctttggggccaaaatgactcacagaactccggaaagtgctatgctgacagttgtttttgttttttttttttgagacagagtcttgccctattgcccaggctggagtgcaatggtgcgatctcagctcactgcaacctttgcctcccaggttcaagcaattctcccgcctcagcctcccgagtagctgggattacaggcacccaccaccatgcctggctaatttttttgtgtgtatttttgtagagatgggatttcaccctgttggccaggctggcctttaactcctgacctcaggtgatccgcctacctcggcctcccaaagtgctgagattacaggcgtgagccaccgtgcctgtccacttacagcttttgtagcaaaagaatttaaatcagacaggcagagaggatagggcagtatctgggacagtgagttccaaatgaggagctgtgtccttggaggcacattactgtccccacattgatgtgtggcaagatgtgcagagaatcgccagcctaggccggtcacccaagcttcagtgtccaaagttttactggagtttcctcatgcaggcaggattgactgattgattgactgatgattgattggtggatgcagccccagcagttgctgcagagtccccagctctctcccaccttgcagatcattcccaactctctaagcatgtggttggtctttctggtgtggccagaccccacttcaactataaggtgcccaacttaagccactgcattcgcataaacgatcaggtgtggtcccaggggcccagcatgaataacaaagaccctttcacgtgggaaatgccagtggtttagaggttacctcccaggagccaagacaaagccagtcctgttcggtaaggttaattatgattattataattactattttgagacagggtcttgttctattgctgaggctggcatgcagtggcacaatcatggctcacagcagccttgacctcctgagcccaagcgatcttcctgcctcagcctcccgagtagctgggaccgcaggtgcatgccaccacacctgcctaattttttgaatttttggtaaagatggggtctcactttgttgctcgggttggttctgaactccttggctcaagtgatcctcatgcctcggccttccaaagtgctgggattacaggcatgagccaccacacctggccaagatgaattctttcttatgcagttcttctttaccttgactctttctacctgctcactccatctctgcccatccctgtcccttcaattcctcacagctgctttcattgctaaattgaggttctcatttttatcttgtccccataacctctgacatcagtgactgcaccgccattccttcctggacgtctccctccgcagacatccgtgactgcaccccccccccccgccccgaattccttcctggacgtctccctccgcagacatccgtggcggcacctccccattcctccccattcctccccattcctccccattccgccccatgcctctccggatgtctccctccgcagacatcggtgactgcaccacccgccccattccttcctggacgtctccctccgcagacctccgtgactgcaccctccccgccatcccccccattccttcctggatgtctccctccgcagacatccgtgactgcacgcccccccttccttcctggacgtctccctccacagacatccgtgactgcattccccccttccttcctggacgtctccctccgcagacatccataactgcacacacacacacacacacacacacacacacacacacacaccgccattccttcctggacgtctccctccgcagacatccataactgcgcgcacacacacacacacacacacacacacacccattccttcctggacgtctccctccacagacatccgtgactgcatccccccttccttcctggacgtctccctctgcagacatccgtgactgcacccccgccccccattccttcctggacgtctccctccacagacacccgtgactgtacccccccactccttcctggacgtctccctccgcagacatctgtgactgcagcgtgactgctctagcttctttgatcttttcttttcctcatcagtttcttgttttgttatctcatctcactctttttttttttttttttttttccgagacagagtctcactgtgtcgcccaggctgcagtgcagtggcaagatctcagctcactgcaacctccgcctcccgggttcaagcgattctcctgcctcagcctcccaagtagctgggactacaggcatgcgccaccacccctgtctaatttttgtgtttttagtagaggtagggtctcaccatgttggccaggctggtctcaaactcctgacttcaagtcacccacctgccttggcctcccaaagtgctgggattacaggcatgagccaccgtgcccggccttgttttgttatctctgaatgaagatgtttcccaaggctgggagcgcctctttcttttcttttctttttctttttctttttttagacagagtctcactctgttgccaggctggagtgcagtggcgagatctcggctcactgcaacctccacctcacaggttcaagcgattctcctgcctcagcctcctgagtagctggattacaggtgcacgccaccacacccagttaattttttaatttttagtagagacgaggtttcaccgtgttcgccaggatggtctcgatctcttgaccttgtgatccacctgccttggtctcccgaggtgctgggattacaggcgtgatctcctctttccttgatctttcccttgttgatctcctccatcctcctgcagatgcagtctcaggagtccgtttccagccgggacttttcttcggggcttcggtagttccacctgagctcccatgtgcagagtgtctactgataaggcccactgccatctgaaactcagcatgtggagagccaactgcccacctcctctgtcaatgtcattcttccagctacttgggcttaggagcctcagagccctggctgccctggccctgagtgggtaaggggccttctctgtgttcccacgataccactgcatgccctggtcattgcgcttcccagagtgtggcatgggaacccttctacataytctcctgactagkctgtgagcaacttgagggcatgtacagcaccagtcaattgtcccccatggccaggcacrgtggctcacacctgtaatcccagcactttgggaggctgaggcaggcagattgcttraggccaggagttccagaccagcctgggcaacatggtgaaaccccatctctacaaaaaatacaaaaattagccaggtatggtgatgcatgcctgtagtcccagctactcggtaggctgagatgggaggatcacctgaacctgggaggtcaaggctgcagtgagctatgattgtgctactgcattccagcctgagtgacagagcaagaccctcccccccccacaaaaaaaattgtctgtcacatcagagagcatgaggggagaatgagctatggctgtcttcttcgttctgttatttacttctttcctgtgttactgagctcataaccmaattgtccytttttttttttctttaaggctgtcccttctctaaactrtgatgctaccagagtaacctgcctctatggctcctcactgaatccaggttgtttcttcaactttacccatagcttgcctttctagaaacttccacacaggaggactgtcttctattcctcacctaaacaagctcccagttccagccaaattgttttctttccgacttgactaggtgatattcccagctacctgtttctttcccaaccagggatccttttgctcctcaggaacaatttcttgtccttcaagtcacattcctacccagccttcctggcacagcacaaatctcatctccccttaccacccakttgtcatctttgagctttttttcagctattgctggggaacgttaagacacacataacatacractttgtgctgataattctttctctaagtctattactatttcttttcccctagttagactgaaagtgtctgaacagcaaagcccatgtcttattcatctttgcatcatttggaataacttttgtgtagaaaattctcaatgaagtaaaataaacaattccgtctttcagttcaactttggagacgtctttgtccaccaagccatccacaccatcgagtactgcctgggctgcatttcaaacacagcctcctacctgcggctctgggccctcagcctggctcatgcacgtgagtgagcagcccatcggggggacagtcagctctccccaacaccccaggaaataggtgccatgtatttggaagtaaaggtgacttctccgagctatttgtggatgtttgccaaaagaatgactcttctttcccaggcacaggtgccttttctgtgggtctggctgcacgttgctggggtggtcaccctctatattaatagtctcctactgctgctgtaacaaattgtcacaaacactcgtggcttaaaacaacacaaatttggccgggcacggtggctcacacctgtaatcccagagctttgggaggcagagtttgggcgaattgtttgagcccaggagttcaagatcagcctggccaacatggtgaaacccgtctctactgaaaatacaaaaattagctgggcatggtggcgggtgcctgtaactctagctactcggagactgaagcaggagaattgcttgaacccggaaggcagaggtcgcagtgagccgagatcacatcactgcactccaccctgggctacagagtgagactccrtctcaaacaaacagacaaacaaaaaacccaacaacacaaatttggtgtcttccagtttttgaagccagagtcctaaaatcaaggcgtgggcagccgtgctcctgctgcaggctgcaggtagaatttgtttcctggcctttccagcctcttgaggctgcctgcattctgtggcttgcggctcctctttgcatcacttcaacctctgcttccagcatcaaatctcctttttctctgactgtgactctcctgccttcctcttacaaagactctagtgatgacattgggcatatccagataatccgggataatgcccctctgtcaggattcttggcttaatctcatctgcaaagccactgttgccatgtratatagtatgttgacaggttattaggattagaattaggatgtagacatctttggggatgggggaacatattttttcaggctaccatgcccttctgcaaggtgctgacctttaagagaacrcctgccttggttatgagcattgcggggagtcagttggctgcctgctgagctgaccctcaggaagtgctcaccacctttgtgaattcacagcagtccaggatcagtcrggccaggcccagaaatacaattgtatctatctatctatcatctgcctgkctgtctgtctgtctgtctgtctatctatctatctatctaaaagagacaaggtctcactatgttgcccaggctgatctcacactcctggcctcaagggatcctcttgcctcagcctcccaaagtgctgggatttcaggcattggaaatacagttttgataaagatccgagcccctggggttgcctaacgtcaggaatcatgactcaccaactcacttgtaagccccatcttgatctctgggtccttctccagtcttgtttcttgtcagttttccttagtgccccagcrctccagacccatccgtttcatatgcagtggccctgaggagcgttttttttttttttttcctaagacagggtctccctctgttgcccaggatggagtgcagtggcgctatcacggcctcgaactcccaggctcatgtcattctaccgcctcagcttcccaagtagctgggaccacaggtgcatgccaccatgcctgggccaattttttttttttttttttttggtagaggtagggttttgcctttttgcctaggctagcctcaaactcttgggctcaagcagttctcctgtcttggcctcccaagtagcagggactataggcacacaccaacatacttggcgaacttttttttttttttggtagagacagggttttgccatgttgcccaggcttgtcttgaacttctgggctcaaacagtcctcctgccttggcctcccaaagtgctgggattacaggtgtgagccattgtgcctggcctgaagaactatctcctgaagacgcagtactccctgggcccctctgtgtgtttgcccctgcagcccccttgcctgaaatagtcccttctttaattctctctctatctgatatttaattcgtccttcataactcagctggaaatcttctttcctagtcccccagtctggaagatgccttcctgtggttctggggcatgctcttaacctagcttcaattrtaattgtcttgattagcctgtcttcctactggactatgagctccttgaaagcaaagaacctgacttttatcttagcattcctggcactgagcataawgcctagaacagagaagccaggccaaggtgtgtgctgaagggatagaaacgaaactccagtactcagcattcgtgtgatcttcacagctcagctgtgttcatttcctcccacaaactcacatacacacactttcacatgcacatgaacgctgatgcacacactcagccctgcaagtggctgcagcacagacacccataagcatatctttttttttttttttttttcaggctggagtgccrtggcgtgatctcggctcactgcaacctccgcctcccaggttcaagcaattcttctgcctcagcctcctgagtagctgggactacaggtgcacaccaccatgcccagctaattttttttttttttaatttttgtattttcagtagagacggggtttcaccatgatggccaggatggtctcgatctcttgacctcgtgatctgcccgcctcggcctcccaaaatgctggaattacaggcktgagccaccgcgcccggccgcatgtctttactcctgtgcactgctgtgcattcatgtgaagtggctgtcccaggactgtcacctacttgttccttagagtggatctcagcgcttcgtgcagtcagtggtggtaatgttggtcttcagctctaaccccagcagtagttggaggacttgagtcataatagggctgagtctagataagacaggaggaggagttttggtattcttggccctatgtgtcggggtgtcctctggccagcccatacacacactgagggggtcatttgattcctaaaaacccatatggttcatggctgcctgccctgattcacccactgggtcattctagaagtccctgctagacgtggctyccagtccatactaacacagttgcttaaagaggtaatgtggaaaaatggggaaaaaattaaaacactgacttaarttctggttccttttctaccacttttggctgagtaacttatacaagaaatttaacctttgtgtgccggggctttcatcagtggtcctagtagttagcctcctgcactggtcaggttaggctaaactctgttgcaayaacaacttaccctctaaatctcaggtccctaggccagagtttggcactatgtgttggggtgtcctctggccaaaattcctcctgtcttatttagayccatccctggtatgacccaagtccttcaaactactgctgaggttggagctgaagaccaacatcaggaccacggatgacttgaagcgctgagatccactttaaggaacaaagtggggccgggcrtggtggctcacacctataatcccagcaytttgggaggccaaggtggtggggggattacctgaggtcaggagttcgagaccagcctggccaacayggtaaaaccccctctctactaaaaatataaaattagctgggtgtggtggcacaygcctgtaatcccagctactcgggagggtgaggcaggagaatcacttgaacctgggagctggaagttacagtgagccgagatcacaccactgcactccagcctgggtgacagagcgagactctgtctcgaaaaaggaaaaaaaggaacaaagtgggtgacagtcatgggatagccacttcacacgaatgcacatcagtgcacaggagtaaagacatgctcatgggtgtctgtgctgcgggtacacgcagggctgagtgtgtgcatctgagtattcgtgtgcacgtgaaagtctgcgtatgtgagtttgtgcaaggaaaygaacatagcctgagctgtgaagatcacacgaatgctaagcactggagtttctactgtaaatctcaggtacgggtctaacccgacgggggtgaagctgctcccattgatgaaagactctgcatcactgtagcaggcagaaaaccagatcttgggggrcagcaagcaaataggggtcctcttccttgcgttccatgtctctgcktttatcatgttctgatagccryttgcaagtggcaggcctgtgtctctctgggctacatcattgtgaccttttagcaggggccttcaaatctcaagccaaggatgtaatgatgctatttccctgcaaggtgcatrtcccaggctgttgggcatgataactagggaagaagcattcacaygtgctctgtgaccagggacacctaagcatggacccttacttgcataggttggacagtgagagcccttgtagggcagttagctggggacacggrctcagctacgagtccgggttttttccgatccccatccatgacctccctcctcttggatttcactcccctcagggccttttaaaacattccccgactgtcagcctttgagagactccatgggcatgtaagaaatgtgtagaaaagacctttagagctgggggtgtgggaaacagctgaggaggtaacgggtagggaagtgggggtggggggacggtggtgtcataggaacaggccagagggggctgtgtggcatttgcccctgaacttttcggaactttagtttccttatctatgagatgggcatcataaaacctaatttatagggttgatatgggccttactgggataatatgtgtaaactgcttcgaattcctctgacttggctcttaatttggagtctgtggctgaacttcaggctttctgtaaatcccctgaaactacgtataagatgttgttgggcgtctctgtgtgcatttttctggggaaaggattcatgactttcttcagattccagaggggacccgtgaccaccaaagagtgaaaagagccactttcccgagtgaggctgaattcacctcctgtgctcagtacctggcatgtgcccttgtacattgcagtgactgaataaatattagctaaacgttttttgaaatgtggttaggatttcaatctttttaaaaacatttttactttgaaatatagcatgtttacaaaaatgcataaaatatatattcagcctaatggatttttgtaaagcaaacactcatgtaaccacttcctggtcaaagaagaggctgtggctgggcgcggtggcttacgcctgtaatcccagcactttggaggccgaggcgggtggattatgaggtcaagagattgagaccaccctggccaacgtggtgaaaccccatctctactaaatatacaaaaattagctgggtgtagttgcatacacctgtagtcccagctactcgggaggctgaggcaggagaattgcttaaactcgggaggtagaggttgcagtgagccaagatcacgccattgcactccagmctgggcgacaagagcraaactctgtctcaaaaaaaaaaaaaaaaaaaattaacagacagtggcggcacacttctgtggtcccagctacttaggaggctgaggtgggaggatcactggagcctgtgaggtcaaggctgcaatgagccataattgcactatggcattccagcctgggtgacacagtgagaacctgtctcaaaaaataataataaaataataataatctgggctggatgtggtggctcacgcctgatttcccagcactttgggaggctgagacaggaggattgattgcttcaggccaggagttggagaccatcctaggcaacagagtgagaccctgtctctatttaaaatatatatatatttttaattaaaaagatgagaaaatacaataaataacaatctgcatttacaagataatcccagtggtttctcrtaccttgcagaactgtctgaagtgctctggactatggtgatgaacagcggccttcagayrcgaggctggggaggaatcgtcggggtttttattatttttgccgtatttgctgtcctgacagtagccatccttctgatcatggagggcctctctgctttcctgcacgccctgcgactgcactggtaaggatggttgtcccctggaagctcaatgtggtgttgggaaagggagtgggctgtggggccagccgactgggttcagatcgtgagctgtatgtgactttagcagcttacatacctctttggagccttagtttagtcatctgttggtgtaatattaaatgatgtaatatatgtgtatatatatgtatatatacatatatacacacacactcattcatacttattcagactctcatatatgttagttctcatttactccttcccttttagatgatcagtgttcatttgttattacaattggctttaacccaagtgacatttccaagtattggcaaggtggcatctgagataggctcacagaagacatgcttagaaaatctggaatatttggctttttttttttttttttttttttgagacaggctctcactctgttgtccaggctggaatgcagtggtgcaatcttggctcactgcaacctccacctaccgggttcaggcgattctcctgcctcagcctcctgagtagctgggattacaggcgtctgccactacgcccagctaagttttgtatttttggcagagacggggtttccccatgtttgctaggctggtctcgaactcttggcctcaagtgattcacccgcctcagcctcctgaagtgctgggattacaggcatgcaccgtcacacctgactaatttttgtatttttagtagagatggggttcccctatgttggccaggctggtctcaaactcctggcctcaagtgattcatctgcctcagcctcccaaagtgctgggattacaggcatgagccactgcgcccagtgaatctgggatgtttggctcttgttgctgagtagaggagttataccaacaaggtatgaaaatctcaaaagtggaaagagaaggagggtaccaccaggagggagacgctcaccgggagccctggacatgcacagatgtatccagtgacaatcagccgtcgttaggttgatgaatatggaaacatgtttaggcctctggttgtcttccaagttacatttcaaccaagaattctgagtgtgcagtgcatgcccttcagctgcagagactgtacccagcttgccctgatgttttcttcctccctctatggccactattcataaagaagcctttgcacttcatgtactgagtgaggagagccacagcatcccctgcctccatgatgacgtcattcccctccatgtcattgaggagaggaactgaactctgtaaattaataaaacataaatgaggctgggcacggtggctcatgcctgtaatcccagcactttgggaggccaaggcgggcggatcagctgaggtcaggagtttgtgacctgatcgacgtggagaaaccccgtctctactgaaaatacaaaattagctggggtggtggcgcatgcctgtaatcccagctactcaaggggctgaggcaggagaatggctggaacccgggaggtggagcttgcagtgagctgagatggagccactgcactccagcctgggcaacagagcgagactccgtctcaaaataaataaataaataaataaataaataaataaataaataaataaataaaataaaacataaatcatccgacatggtatcagttatgtgagttacaaaaatacaggtcaagggtctttgcgttctataatatgtgagtcccacattttagaattagctggaaatggaaaatgacatgagagagtgctgcacagtgagggtgtcttggcttgtcatgggggtggggaagctccttccatgaaggaagagttgttatgctgtgrccatgagcccacaagcagagaggcctggaggaaatgaaggggaggggaaggggaaggtggtaagagacagatgagagaagggcttaaaaaatcctcagattcatggcctggatgcagtggcttacacctgtaatcccagcactttgggaggctgaggtgtgtggatcacctgaggtcaggagttcgagaccagcctggccaacatagcaaaacctggtgtttactaaaaatacaaaaattagctgggcatggtggtgggcatctgtaatcccagctactcggaaggctgaggcaggagaattgcttgagcctgggaggcagaggttgcagtgagctgagatcgcactattgcactccagcctggaccacaagagcaaaactctgtctcaaaaaatatatatatataatatatttatttttatatatatataaatatatatataatataatatatattataatatatatattataaatataaatataaatataaataaatawaaatatatttataatataattattatatagaatatataatataatatatattctatataatataatatatattatataatatattctatataatataatatattatrtaatatatataatatattatataatatatataatatattatatattaatatattaatattgatgtatatataatattatatataataatatatatgatatattatacacacacacacacacacacacacacacacacacacacacacatataaattagctaggcatggtggtatatgcctatagtcccagctactcaggaggctgagacaggagaatctctcttgaacctgagaggcggaggttatagtgagccaagatcacgacactgcactccagcctgggtgatggagcaagactctgtctcaaaaaaaaaaaaaaaaaaaaatcctcaggattctcatggcagccatcagcctgggtgccygccgtggccaacccttctgactttgtgcttgattttacgaacgctctgcttcctccttccctccaccttccagcctctaactgatgtgtttcaatctcccatttcttaccccacggcctcccctcaacaacagggttgagttccagaacaagttctatgtcggggatggttacaagttttctccattctcctttaaacacatcctggatggcacagccgaggagtaggctgagggctgcacctcccacggtggtcaccatgccaatgaaggaagttcagtcttgtctttgatatcagccyctgcaaggcgctcaatgggaaggttgttcttggctcacctgaagcatgaaactgtgtattatttggacgtcagcctgtggatttgatacgacttaaccacgtcagaggaaggactttggcaagtgatattgtcttcatgtggggtattaattctcaaataataaartaattgacaaatgaggggagaatgctaaacagatgtcttcttgcaatattttaaatattgtatttgagaaaataaacatctgagtcattcactttttccttaagatgtctttattcggccaggcacagtgactcacgcctgtaatcttagcattttgggaggccgaggcgggtggatcacccaaggtcaggagtttgagaccagcctggcaaacatggtgaaactctgtctctactaaaaatacaaaaattagctgggcttggtggcaggtgcctgtaatcccagctactcgggaggctgaggcaggagaatcgcttgaaccccggggggctgaggttgcagtgagccgagatcacaccacttcactccagcctgggcaaaagagcaaaactccatctcaaaaaaaaaaaagatgtttttactcaaaattattccataccagtctgggcacagtgactcacgcctgtaatcccagcactttgggaggctgaggcgggtagaatacctgaggttgggaatccaagaccagcctgaccaatatgttgaaaccccgtctctattaaaaataaaaaattatctgggcatggtggcaggtgcctgtaatcctagctacttgggaggctgatgcaggagaattgcttgaacccaggaggtggaggttgcagtgagccgagatcaagtcacctcactctagcctgggtgacagagcaagactccatcttggaaaaaaaaaaaaattattccataccatttactactgacaattataggccaaagctgaacaatagagctacacaaactaatcccagagaaggatcatgcatattgtatttcctcatttcctccttcctcaaacacctttttccgttgtctagggctaagcattacaagcttaggaactttctcatgaattttcactgaggaagaagagataatgttctctgtttggagggagggccgcccccggtgtggctctctggttgctaaatcctgtgaaatgaagtgtggcaacatgacatcatcgaggactttgtttactgtcaatgcacgttatgctggagtaactggagaaagagatttggaggcttcgacaagttcagaaaatggtgtgctgggaggaaaaccaccaagaggtctggcccgttactccctggctctgtgggcaccaaagtcattagtcatttcttaagtgcctgcactaacaaactcctaagagtccgataagatatatatatgatacacaagatatatatcatatatgatatatgtgataaacaagatatatatgtttgcatatatatatagagaggtagggtctcactcttgcccaggctggagtgcagcggtgagatcacagctcactgcagcctcagcctcccaagctcaaatgttcctcccacctcagcctcctgacgagctgggactacaggtgtgtaccaccatgcccagctaatattttttagtttttttgtagagttgccgtgggtagggggtgtctcactgtgttgcccgggctggtcttgaattcctgggctcaagctatcctcccgcctcagcctctcaaagtgctggggttacaggcatgagcacccggccccactgactgttttgtctgaatggactttatccatgtaggttattatcttcatggtaactatactgatagaattaagtataattatctttttttttttttagtgcttttaaaatttacaaaataatagtatcttatttaattttaaattttctttttctttcttcttcttttttttttttttttgagacagggcctcactctgtctcagggacttgctggagtttagtggtgcaatcttagctcgctgtgacctccggcctcccaggttcaagcaatctccagcctcagcctcctgagtagctgggattacaggcaaccgccaccatgcatggctaatttttgtacttctagtagagacgtggtttcactgtgttggccaggctggtgtctcgaaatcctggcctcaagtgatccgcccgccttggcctcccaaagtgctgggattacaggtgtgagccaccgcatctggccagttctaaattttcattgttagtaaagttctaaaagagctgattaaattcaaaatatgctttggatgagaccctgttttttaagtgcctacgtgccctgtgtgtggtaaagctgattggtgctcatggaagcggcattgctcaaacctaaaaggaagcttctgtgtcaccttccatgtcagtatcatgacttttccagcacagtggaaggcacatattagatgctcaatattcacttaatgagattgagcaaaagaatgatagctaaggtcagaaggtgtacatgtttgagtcccaactttgatgctttatcatgagtgccctcaggaaagaaatggagttgttcccctcattgccgaatggaaataatgatctccacctctctggactgtagaaaaggtggttgtaaagccctgggtgtggaggagatactgtcagtgatggttgaactgggagaatagactaagacagcatgcaaatggagggataagaaatctaccaatcccatgctgccatggccactggacgattttcaggttctcagctcacaaatgtccttctcaacaactatctaaaaagaaccctgtgcttaaatggatcaccagcctgttgatccttaagtctattttttttttaatttttatataccactgtgtagttttaaattagaattaggccaggcatggtggctcacgcctgtaatcccagcactttgggaggtcgaggtgggtgaattgcttgaggccaggattttgggaccagcctggccaactggtgaaactcctcatctactgaacgtatgaaaattagccaggcatggtggtgtatgcctgtaatcccagctactcaggaggctgaggcaggagaatcacttgaacccgggaggcggaggttgcagtaagccgagatcacgccactgcacttcagcctgggagacagagcgagacaccatctcaaaaaaataaaaacaaaaaatttttttaaagtaaaaaattagaactacctaaaagacattgcacctttcaagtgtatgacagtgtaacagtgtttaacagttgttttattaagtgaatgcttgaacgtattcaacattaaattcaatttacttcacagtaatgtttgcaaatacattatcacttcttaaatatttcaaatcaagcaacttgaagttcagaaggcttgctctcaaataactcttctacagtgacgcaaagactgaaaggagcctacaacttgagtcccagtctctaaccaacaatgactgtgtcctcactggtgaacccatatgagggagctccaagctcaagaggtgcaggccccttccagatcctcccagatgcatctgtgtgacccccagcaagggcagtaatcaccaccaaaatcttcatttgcaataggtgtacaacaggatgaatgcaaacgcctagtaaagaaactcgaatgggttaccctgataggcattgcactcattctttactccttttttatctttttttttttttttcagacagagtctcactctctctcccaggctggagtgtgcagtggcgcgatcttggctcactgcaacctccgcctcccaggttcaagcacttctcctgcctcattctcccgagtagctgggattacaggcatggaccaccacgcctgactaatttttgtatttttagtagagacggagtttcaccatgtttgccaggctggtcttgaactcctgacctcaagtgattcacccgccttggcctcccaaagtgcttggattacaggtgtgagccaccactcccggcccatcctttacttcttcttcttcttcttttttttttttttttttgagacagattctcactgtgttgcccaggctggagtgcaatggtgcaatctcggctcactgcaacctctgcctcccaggttcaagtgattttcctgcctcagcctcccgagtagctgggattacaggcacatgccaccacgcctggctaattttgtatttttagtagagatggggtttcgccatgttggccaggctggtcttgagctcctgacctcaagtgatctgcccacctcggccttccaaagtgctggaattacaggcatgagccactgtgcctggcccttaaatcatgctatgggccctcagctgggactcttcaactgcaggttcttggtcaatttccttcttggttctgtggcatacaaacagggatttgcctctccatttgaaagccatgttcttgccttctggaatatcaaataacttgattgcaattttcgacacggccgactcatcagcagaagcactgatgctggaaacaaactgggagatgacattcttggcagcatatgtgacacccacagcagttgttgcagttaccaaataggagaaccctttcctagcctcgccatcctcttttgaagactttgtcccatcaaaaatctcaatgcaacagtaatcagggaagtcaggcacattgatgtctgtatgggaataacgaacagaagcagggacattgaggcccacagagttgacccaagacaggctcatggcctggccactcagtgactcctggcatagcaaaggctgctccttgtacagcacaggcagcttcagggtggcaggcaccatggcctataccaggggctacagcatgcctgccaccctgcaggatatggctgacaggatgggcatgaacctgctccttaattctaagcaatggctgtgagcaaatgtttgcaagggcaaagcttccctctgccccttgcctaggtcttctctttcagaaattcttccagctgtcctgagaacaacatagtaatttcctccaaagttcggcagcctctttcagtcttaacaagaaatgtaatttcccctttaaaaggagatcaagtgcaggctgctgagaagagggtgtgccctaggtgtcattcacttgcccagaatgcgaagttggcccttaaagaatcctgatctgagacccgacctgaaaggagaggataagaccagggagccaggcgtcttgggaacacaagtctggccacccctgagaagccatctgtgctccaatttccgtctaagacttggccacggtgaggggagcaaaagagcctgaaattggaagactgtccaaggaatatacagaggtgagaaatttgtgggcaacattgatctggacttattttttcctgctgctgtagagggtggggtggggcattgactgttagtttgtggccgaaggcaaatggagcatgaaaatttccttggatattgcaaaacaaattacatcacacatcacacacaaaactcagtttaaaaaagatctactgtggcccaattatttctggttaaaaaacaatcagtataacaaaatacaatagaataaaatgtcaatcagtcctttagaatttgttttaatgaagcttgaactccatctgagttcagggaaaatccccaatctatcagtttctcaccaggttttgtgaaggtaggtcatggattactttcccattgtagctttttaggaacttatagtgagggacgcgaagcattcttttccatgttattccctattttcctgagttggtctaactgatcatccatctgccatccatccatccatccatccatccatccatccatccatcctcttactgggttagaaaggatttagaatgacacaggaaaccagccgggtgcggtggctcacgcctgtaatcccagcactttgggaggctgaggtgggtggatcacaaggtcaggagttcaagaccagcctgaccaagatggtgaaaccccgtctctactaaaaatacaaaaaaattagccatgcatggtggtgggtgcctgtaatcccaggtactcaggaggctgaggcagaagaatcgcttgaacccgggaggcagaggttgcagtgagccaagatcacaccacggcactccagcctgggcaacagagtaagactctgtctcaaaaaaaaaaaaaaaaaaaaaagacatacggaaccaaagaacagagtatgtcaattcagc

SEQ ID NO: 93309 - DNA, 13509 bp, Homo sapiens
tctaggaaacaagcatttctctacatgagagtctcaagggaagaatatttagatatacaattctgtctgcattaagacaaaagttatagaaccctgaagagcactttagcccttagaccacaccttcactttagaaagtgtcttcattcacatttgcacaactaaagcaaaatgagaatggttttcttagaactcagagatggttgacctccatgtaaatcaaggctttccctctagcaggccgagacttgtttgcatattttaaatgacaattgttttctattttcagtgtctactctcagtggagcccagtcttaatataggttaccctctcacacatcaaaaccaactctttttctctccttaataccatcccaaggctctggtctacatccttggcactagaatacaaagagaaatcaacacaaatgctgtctctgggaagcccatacttgtgttggggagagagatacaattgtatatacaattaactataataaaaataagaatgagtcaaaatacagttacaacctaattctagaggtcctcaaaggtagaattaatggtgatgacccagactagtgacataaagatcatgagttaatattttagcaaccattagcatctgcatgccacctgccatgactgctttctcaatagtatgcacatatgcagtgaacaggtgttataaataaagtttcattgccgcaaaagaaatagcactcaaatataaaatttttctgctcagcaaggcaatattcttctatagaagggtgcgccttcacagatggagcaatggtgagcgcacgcctggacaagggaggggaagggggtcttattcctgacgtgcgtggcctctgctgctgtgtccttcccctattggctagggttagactgcacaggctaaactaattccgattggctaatttaaagagggtgacagggtgagtgatttggcaggaaaaatggttatggcagagcaggaaatagaaatgagttgggctggaggatgagcaggtaatcggaatgagtcagggtgaagcaggtaattggaatgagtcagggtagagcacgtgatcgaaaaaggttgctttatgaggaagttaagtttaaaagtagaaggcaaagaattgaacatactgacattgattctctgaagagaaatttagaactcatatctaacaatggtatgcttgtatacacttagaattttgcattaagtccatgtatttctattcaaaaaaatgcaatttcatttttaaaaatcacaattaggttttttaaatagaacttgaaaaactaattgcaaagtgtatttggaatagtaaacattcaagaccagtctaaataatctgaaaagagaaatacaacagagtagatgtagcctcttagactgaaatactatataataaagatgcataaattagaagtgtatttaagaatagacaaatcaataaataaaagggagacacatgcatatatggaaatctgatataagctacaggtggcatttcaaattacagagaaacagatgagccatttaatgaatgtggttggtaccactagtcatctatatgaaagtaagaacaaatttggttttccttcccttccccaccttcggaaataataaaatgttcatgtcacagagttgttattatattacatgattgtgcaaaagaataaggtatatttatgtgcaaaaatatgaagaaatcttcagactgtaaagtaaaaggggtaagtcacagaaaaaatatatatagcacaattctatgtgtgtgtgtgtgtgtgtgtgtgtgtgttgggttggggaagacaaaccccaggctccaagtgcacatgtgtatatgaatacatatgcagagaaaaataccctggaagtatgtacaacaactgttaccatggttaccataaggaggagagtaagaggtgggtagagctgtgggagccattattattattattattattattatttattttttttttagacggagttttgctcttgttgcccaggctggagtacaatggcatgatctcggctcactgcagcctccacctccctggttcaagtgattcttctgcctcagactctcgagtagctgggattacaggcatgcaccaccatgcctggctaatttttgtatttttagtagaaacggagtttcaccatgttagccaggctggtctcgaactcctgatttcaggagatccactcatctcaacctcccaaagtgctgtgattacaagcatgagccaccgcacccagctgggagccattattctttattccaagcttccatagtggttaaatttaaaaataaataatactgtgaaacagtcacacggaaagtattataaaaattctaaatctctaaataaatatatggttatttaataaatcaagcagttcaattggctttttttaattaaaaaatgtttttccttttttttttctttttattttctagaagtcgtagctttgaagggtaaaaaaatgttttttcttaaagatgcaggtttttgctatgttgcctagactggtcaagtactactgggctcaagggatcctcccacatcaacaaacaggtacctgtcaccctgcctggctctcaactaggtttttggaaaagttttctacctgctagtcttggggtggggcagtggttctcaaaatgtggtgtgagaaaccctaatggtccctgatgccatttcagggggtctgtgaggtcaaaactatttttaaaataatactgatatgttatctgtattttcctcccattctttaatgagtttacagtagattttccaggagagaaagagggtcatgaagttaatgagatagatgggactatgggaagtagcaagatttttcactgtctagctttcttgttgtattttaatctttaaaccgtaagaatgtgttacctattaaaatatatacattagaaaatcttcaagatgaatacttgtataatctctgggtatgcgaggtgttccggttgccttgaatgatggagaagtggagctgtggccccacccaggtctacgttatatgacggagaagtaaacttgatattatttgagccacggaaattgtcatatcgttctaactcataactaaactaatagaggcttaaatgtctcttcttcttcttttttttttttttttttttttgagagagagtcttattctggggcccatgttggagtgcagtggtgcaatctcagctcattgcaacctccaactcctgagttcaagtgattctcatgactcagcctcctgagtagctgggactacaggtgtgtgccatcacacctggctaatttttgtagttttagtggagaaaaggtttcgtcatgttggccaggctggtctcgaactcctggcctcaggtgatccacttgcctcggcctcccaaagtgctgggattggaggcatgagccactgcaccagccaaatgtctcttaatacagctcctctccaaccagttatgttatagaataataaaccagcattcaaatagattttataaatctatagatgtccatatgtattactgggttcctttatctacttgcggtgctataacaaagtaccatagactgggtgacttaaacaacagaaatatctctgttctgaaggctgggaagtcccaggttctagccagttccattcctggggaagacactgttcctggcttgcagacagctgtcttctccctaggctcttacatggccttattatttatctatttacttatttatttagtgtgtgcctgtggaagacagaccatagctctctttctgttcttatgaggataccaattctatcggatcagggcttgtgataagataaatatatatttgatctttgtcccagtttctgacacagaacccctaaagttcttgtaatttcctgagtgataagtgtgctaggagtaccttttgttctaatatttggtctttgaccctggttgcagacacaagaatttctaaaactcttggagtttcttcagggatggggaatggggatgggcagtgccttttgttattcataataagaaccttttaaccatagaagatttgtggtaatgatgtgactcttgcaaggtggaatctggtaaccagaaagacaaacacttggccgggcacagtggctcacgcctgtaaacccagcactatgggaggctgaggcgggtggaggtcaggagttcaagaccagcctgaccaagatggtgaaaccctgtctctactaaaaatacaaaaatgagccaggtatgatggtgggcacctgtaatcccatctacttgggagcctgaggcatagaattgcttgaacccaggaggcggaggttgcagtgagtcgagatcacaccactgcactccagcctgggcgacagcaacagaacgagactccatctcaaaaaaaaaaaaaaaaaaaaaaaaaaaaacaaccaacactttgttataaataaagttttgttgctgcaaaagaaatagcactcgaatataaaattttctttttaattctcagcaaggcaagttacttctatagaagggtgagcccttacagatggagcaatggtgagcgcacacttggacaagggaggggaaggggttcttatccctggcacatgtggcccctgctgctgtgtcattcccctattggctggggttagactgcacaggctaaactaattcygattggctaatttaaagagtgtgatggggagagtggtttggcgggaaaaatggttatgacagagcagataatcagaatgagtcagggtagagtaggaaatcagagtgagtcagggtggagaagagtcagggtggagtaggtaatcggaaaaggttgctttacgtggaagttaagtttaaaagcagaaggcaaagaattgaacatacatattaattctttgaagagaaatttataactcatatttaataacttcctcctcttgcatttttccttatagctttttctttaactcctttaacatgtcttggcttagttgttctgcctgattttccaaaagaaggagcttctctggttaaggtggagaatagttaagggagatcttagtaagtaccacttctgtgagcctcggcaccaacccatggatgcatgatatgacacagcacccgacaagattaagtacacctattacggctacgagggaggtaagaatcgaggttattactcctttccatttaccaaaccacttttctagccatcctgtaaaggggtcatttacccccgagttgctggctaattcattggatagagcagtcagtcctttcaatgcctttgttatacttccattaggggcggtgttgaaggtgcaacattgagttttaatcatgacgtaaactcctcctctttttgctaatatcatgtctaaggctatcctattttctcaagccatctggctagtagcccctaactgctcagctattcctttaacagcatctctagtgtagttaataaatcgctgtgggttgtaatagatgtagtttatccaatctacatttttattaattgtcacccaccaaaatattgaatcaaatcctgcagctatttcatttcgggctttaaattgatctggtattccccgtgggacttcaattgtgtctaaatagatgtgagagtcgaaagacccataagggacttctctcactttacgatgtcttatttttccttcctctggttgatgaaatgccagggtgaaagggatacccaactggactaaagcacaagtgccactccagttatttggcagtgtccagtaaaggtccaccacaatactactacacatccgctcggggatgaacaagggctgactgattggtaagctcttgaaaattcttaagctcgagcctgcccggcctgcggcaacagcatggacacggtgcagtgtcagcagcagcagcggcagcagcagtggctggcagccacgcaggtgtttatgtctggtcgtggggtctcgcggcagcatggcagactacctgatcagaggcggcaccagctacatgcctgaggacgggctcacggcgcagcagctcttcactggtgcagcagctcgcgaccgcctcacctacaacaatttcctgattctcccaggattcatagacttcatagctgataaggtggacctgacctcagccctgacttggaagatcacgctgaagatgccactgatctcctcccccatggacgctgtgacagaagctgacatggccatcgcaatggctctgatgggaggtattggtttcattcaccaccactgcaccccagagttccaggccaatgaggtgcggaaggtcaagaagtttgaacggggctttatcatggaccccgtggtactaagcccctcacacactgtgggtgatgtgctggaggccaagatgcagcatggcttctcgggcatccccatcactgagacaggcaccatgggcagcaagctggtggacatcgtcacctcctgagacatcaactttcttgctgagaaggaccacatcaccctcctcagtgaggtgatgacaccaaggattgagctggtggtggctccagcaggtgtgatgttgaaagaggcaaatgtgatcctgcagccgtagcaagaaagggaagctgcctatcgtcaatgatcgcaatgagctggtggccatcatcgcccacaccaacatgaagaagaactgagactaccctctggcctccaaggattcccacaagcagctgctgtgcggggcagctgtgggcacccgtgaggatgacaaataccgcctggacctgctcacccaggtgggcgttgacgtcatagtcttggacttgtcccaagggaattcattgtatcagatggccatggtgtattacatcaaacagaagtacccccacctccaggtgattggggggaacatggtgacagcagcccaggcgaagaacctgattgacgctggtgtggaagggctgcacgtgggcatgggctgcagctccatctgcatcacccaggaagtgatggcctacagctggccccagggcactgctgtgtacaaggtggccgagtatgcccggcactttggtgtgcctacatagccratggcggcatccagaccatggggaacatggtcaaggccctggcccttggagcctccacagtgatgatgggctcccttctggccgccaccacggaggtccccagcaagtacttcttctcagatggggtgtggctcaagaagtaccggggtatgggctcactggatgccctggagaagagcagcggcagccagaaacaatacttcatggagggggataagttgaagatcgcgcagggtgtctcyagctccatccaggacaaagggtccattcagaagttcgtgtcctacctcatagcgggcatccagcatggctgccaggatactggggtctgcaacctgtctgtccttttgtccatgatgtactcaggggagcgaaagtttgagaagtggaccatgttggcccagatcaagggtggcgtccaaggcctgcactcttacaagaagaggctgtactgaggacaggggtggaggccgaggtggtggagggggtgcaccccagtgtccaccttcgggcgcagccttcctccataactgagtggtccacagatttgcactacgggttccccagctcctttccagggagagaggaggagaggtccagaggggtccgtggccccttgctgggcacccctgcagagtcaggactgctccctgggccagactgccctgggagccccatcaagcctagccagccgggctctcaggcctttcttgcttcagcctgctccagcctggcccccaccccaggggcaggtagcccctcctggcttctcctgtagggcacctccctgcccccagccccccaggaaatggtgctctcctggccctgcctctggcccttcctgggccgctgccccctcagcctgtggcacttctgagctcctgacctaggccaaggggaggtctctgcccccttccctggccctggactacccttgggccctgctcctcaggccacttccctgtccctgtccctggggaggaggcttccctggtcatggccgcttgcctgtcatttctgactcaccaccctccccaggtataccgttcctgccctctcctcagctgcagttgaaggctttaactttgcacactttgggatcacagttgtgtcattgtgtattaaataatcagaataaatcaagcaggtctagatagaaagaaagaaaggaagaaagaaagaaagagaaagaaagaaaaagaaagaataaaagaaagagagaaagaaagaaagaaaagaaaaaagaaagaaagaaaggaaaaaagaaagaaagaaaagaaaaaaagaaagaaagaaaattcttaagctcactgcatcccttcaggtctccaaggaacattaagtttcctccctgttgtgagagacatgaagtgaacttggtgttgggaaacggaagctggatggccctcaggggctgacccgcagggtatcagactttgggatatagcagagagagaggttggcatgacttgttaccccaggctgcagaatcctggaaaagagctaccatgcaacccatgcccagtcaactggaggaccaccctagtggaaaggggacaatctgggcttctggcctgccacgtgcacaagcataacagttgcttttgtttaacgtgtggatggaatatttgatccattccaaccaggcatttacatcttggtatccaatctcaattgtcaaagcttgttttaagtctttaacttctaccatcgctatcttggccttgtcgttagatggaggaggaacaatggttccgttgtgagaggttttggaaaaaggcttagaggaaggtgcaggcagtgggggatcaaagaaacgcatttcaaagaatcccatagggtctgttccagaaacctcagcctccataccataaaaccggcttaaagaaggaaaccggtttagaaaaggggaagaactttgggggcttgagataataacctgtataggattgcactggtttagctgacagttgagggtgctgtccctttagtaaaatgaatgtatggttttaggaaactacagaaactggttggggcactccatccttgctctttggtggttcacagaacattggaccaactacggcataaaagctctacatcggggggcaagactcccggttgccactggggtctttatcgaaatctccccagattaaatggtcccaattcactaatgcccagtctgaggagagccaggaggcacacaggcacttttctaaagcagagggctgtctttgacttaacaagtccccacagggtataacaaggcaagcatcaaatgcaatagtttgaggcaaaatggacttggttatgttaataactagatggtcagcgatagagcgaggaaagaagaaagagtaatagaatagatgaaagagagttacatttttcttagctttagtttggtagggtttccccccacgactatggtcgtggaccatagtcccaggcggtgctttcttgactggtgtggtgagtccatcctctctctgctgtgcggactgaggtttcagtagttaggagcactaagtaaggacctccccaggctggctcgagcttctcctctttccagctcttgatgaggacgtgatccccaggctgatgctgatgcaccgggaactccaagggcggcacctgtgctaatagacctttagttttaagataagagaaaatagaagatagaccaactatataatttgtaaggaattgatcttctgtttcaaaggtaggtatatcagcagtggagtgcaaataaggtaatccatagagcgtctcataaggagaaagaccaatatctttccgtggtgcagtttgaattctcagcagggcaataggaagacacttgttccatggcaatcgagtctctaagactaatttggttaagtggttctttagagtctgattcatcctttctactctccctgatgagggggtgtgccagggagtatggtgttcccatctaatgtctaatgtttgggatagctttttaataatgtgtgcagtgaaatgagttccactgtctgagtcaatattttctattagtccaaacctgggtactatattttcaattagggccctaactacattattggctgttgcatttgaaaggggatagcttcgacccagtgagtggggtggtctactatcactagtaaatattttagatgatctattggaggcatttctgtgtaatcaacttggatactttggaatggccttaagcctggattccttcccccgagaggtaatatttttatagtatgttaattagttttcttaaatactaagcaactatctgtaacctgtttggccagagtataaattcctatgcaatcataaactctgagaactgctctctggtcttgcagtatccattttccttctgaattctctttagcgcctatttttattagtttttctttttcagcagaagagaaaatggggattatggtaggaggagggaggcagggagttaagtgaaaaatacgcatttcagaagacacagcagcctgcttggctacctgatcttctaggttatttcctcgactttcaaaacaaaggcttttctggtgtccgggaacatggacaatagctatttcttctggcaacggaagattattcaatagttgggtgatcagctccttgtgaacaaggtcttgacctttactatgaatgagacctcgttcagtccaaattttcccaaacgtatgggccactccaaaggcatatctagaatcactatagatggttccttcctggtgctgcaagtgctttaaggcttggctgggtgcaaacagctcatacttttgagcagaccaactgttgggcaattttcctgactctatttctgcaagagtttctccaacaatcattgaatacacattatgtcttttttcctcaatcacctgggaagaaccatgtatgaataagtaccatccagtctggaagggggtttctcctaggtctggtcgaacctttgtatggtaatcaattaaatctaaacatgtgtgttccctccttatatttgaattccttgttaggaaacctgctgggtggagtgaattatcagtggtcaatgttaaatcatccttttctaacagaatggcctcatactttaagattctcgagtcagtaagccatccccctgctctatggtttaagatagttctaatttcgtgaggcgtgcttactgtcaattttctccaaaggttaactttctgctttcctcgactagtattgccgtagccacgatggactggatgcattggggccatccacgagtgactgggtctacgatctttgataggaaggctacgggctgccgatggcctctgtgttcttgagtcagtactcctaaagctaccccactgtccacattaacaaaaaggtgaaatggcttttctagggagggtaaagctaaaacaggggcagttatgagcctttccttcagcttctcgacttgatcaacttcctcagaagtccacaggagatggttaggcttctcctgggcaagtttttgatataacagtttactgtgtagtgcgtatgagtcaatccataaatgacagtatctgactaaccctaaacatttcctgagttcttgtttagtttgaggcaagggttggtacacgattccctcgattcgttcgggccgtattcttcacttgcctgcacttattaagtggcctaaatatttaacttcaggctctacatactgaagctttctttttgagactgtagcccttcaaactgcagatgtttaggaatatgtgtagagaagtcagttaccttctctatatcttcaccagatataagaatgtcgtccacatactgaagaaggcatatttgttctgggatgacaattctttctagtacttgttctaaaatttggccaaaaagattaggggagtctgtgaacccttggggcaagattgtccatcgatattgttgtttccgccctgagtggggatcctcccactcaaaagcaaatatatctcggctatcttcagccagggcacatgcccaaaaagcatccttcaaatctattacagcaaaccattgatgattatatgcaatcttgctaagaatggtgaaagtattggggacaatagggtgggtagtctggactatttggttgatagctctaaggtcctgtactagccagtatgacccacctgatttcttgactggcagcattggggtgttataaggtgacatacagggctcgagaagcccatccttaatgaggcctttgattataggtttcaaccctatcctaccttctagaggaatagggtattgcttcctttttactactcccggggtttttagcttgatgtgggttagaggcacttggagtttccctcagtttctgtctttggaccagacatttggattaacatatttttcatctgcggtggtgagtaggtttaatgaggtgaggaatcctcttgggctgacttgtagacttatggccaacttaacattaaattagttcctgcttcagggattaacaagaactgaatatgagctgagcaatcctcgtatctaatttctgtgctttctaaaatttttgctctaaatccttccccttttaccctggagactaaaagttcctctgaggaggagacaagattagatgggggaaacaaacagaggagcgaacagcccctgaatcgactaaaaaggtgataagctcatgtttaggccccacctccaaatgtatcaagggctcctggtgagactcaagataaaagagacagagcccctgacccccctattcttcctcgaaagtcatgagtggaagggcttctttctcctttcttagttcaggacatcctctcttgaagtggcctgttcttccacatctgtagcacctatcttgtccttcctccctcttagttctgggattctttaaccctgctcccccatactatttagggggcatggtagacgaggaccttggtcctccagatggaggctggggtcatttaaaagagggttcagactctttatagtttctggctccctggaaactttgtctagaagtacctgggtttggagccatctgttggaaggtggaaaacataagttttgtcttttgtttctgtttttctttgtcccttttcatgtataatttctgagcttccccaagaagctcacttaggggacggtcttcccaattgtctatcttttgtaacttttttgaaatgtctggccaaattttagtgacaaattggagtttcaacattccttgcccaaggggatcatccaaattgaggcctgcatactgcctcgtttgctccttcagtctgtctaggaatctcataggcccttcatccttttccagttgtatatcaaatgctttagaaagattttgggttcggggtactgattcccaaattcctt

SEQ ID NO: 93310 - DNA, 37916 bp, Homo sapiens
  misc_feature (1)...(37916): n = A,T,C or G
agatgaattctatcagccgtggcagctgaaatatcctaaattaattctccaagaagccagcagtgtatctggggagctccataaagaggctcaagaggccgggcgcagtggctcacgcctgtaatcccagcactttgggaggccgaggcaggaggatcacgaggtcaggagatcgagaccatcctggctaacacggtgaaaccacatctctactaaaaatatttttaaaaattagccgggcgtagtggtggatgcctgtagtcccagctactcgggaggctgaggcaggagaatggcgtgaacctgggaggcagagcttgcagtgagctaagatcgagccactgcactctagcctgggagacaaagtgagactccgtctcaaaaaaaaaaaaaaaaaaaaaaagaggctcaagaagcttttctcacactgcacaagcatggctgcttattttgagccctggttaggatccaaggcaaagatttgctcacttcagtatctcccatcctcattggtaatccaggttgcacctacaagtccctgaacactaggttctttatggtaccatggccagtgaaagggtctaatataaaatacaccgagggtcaggtgcagtgactcacgccctgtaatccagcaatttgggaggctgaggtgggcagatcacttgaggccaggagttccagaccagcctggccaaaatggtgaaaccctgtctccactaaaaaaaatacaaaaattagcatgatggcatggacggacctgcaatcccagctactcgggaggctgaggcaggaggatcgctcaaacccaggaggcagaggctgcagtgagccaagatcgtgccactgcactccagcctgggaaacagagtgagactctgtctcaaaaaataaaataaaatacaccaaggctgaaatagctgctgcttgtcagaccttcctcaaggtcaatgactacctgcagatagaaataatctaggctttggaagaacttgctgccaaagagaaagctaatgaggatgctgtgccagtgtgtttggctgcagatttccccagtgctggcatggggtcatcctgtgatggacaagaagatgaactggacataaagagtagagcagcatacaacgtaactttgctgaattcatggatcctccgaaaatcccacacctgaaagagaaaccttattttggcatgcggaaaatggcagtgcgctggcatcatgctgaaaatctggtggacaggccccaaagaggaaagtgaggacgactctcatcttgaaggcagagatcttgatacttggcatgttggtgttaagatctcatgggatgtaaagacacctggtttggcaacaccccaaggagactgctatttcatgcttggtaatctttggagaaccaaaattatattgctactctagcatctaaatttagattattgggtatatattttgaatatgtcttataaagtaaacttctggagcatttgatattaatagtgaaacttctttacaagaacatgtaactaggtttttcttttttgagatactactaaattttaaaaagttgcttttctttttattctaagtagttgtggagttcctcaaatatgctaaacaattttcagaattattcatgaaagctattaaagcatccaagtcaacttattagtataacttgaaaaaatgtggccgggcgcggtggctcacgcctgtaatcccagcactttgggaggccgaggcgggcggatcacgaggtcaggagatcgagaccaaggtgaaaccccgtctctactaaaaatacaaaaagttagccgggcgtagtggcgggcgcctgtagtcccagctactcgggaggctgaggcaggagaatggcgtgaacccgggaggcggagcttgcagtgagcccgagatcgcgccactgcactccagcctgggcgacagagcgagactccgtctcaaaaaaaaaaaaaaaaaaaaaaaagaaaaaatgcttccctgtctatatgcgtttttagtagtgagagagttttgtctagttttgaatttagttcttctcaggaacagctgacctgacaatggggcctttctctcaacttgtcatttagttctttcggaagaaatatctcagctgtggttaggctaacttaagctgtagagtttgtggggctttttttttttttcttcctgctgtaagtttttattttgtttttggactttctacttgttttccaatacgcaatgtgcaaacagtatccttttttactcaaagcttctcggggcttattctttacttggctctagttcctgattcttgggggtttacctcactcttgtctacctggagaaatctactcatatgttagttttggagcccggaagaaccagggctgacactcagtatttataataagagttaattcccaatttggtatttgtagagagtccactgtgttccaagtactgtgtaaggttccggaggagatatcggaggtggataaatattggtccttgcctttggggaattcagagtaccgaatagctctttaggccattctctcattaagtattttccaaatttcagctctttgcacatcagcttcaaggttttcgtcatatccatgtactacttgtataattatttacatactatttctgcctagataaactaaccttttttatcttagaaaaaactgaatggcttaaagtaacaagtaagacagctgggcaagtctctgcatgtctcccctgggttcactcatgcagctacagtcatctcagatggtcttacacagctggtgcaggctgttggccagcctcaccctccacattgtctctcatcctccaggacactaacccaggcttctacacatggtgggagcagcgttccaggtgatgagatcagcagctgggagacctggtgaggactagactcagatgtcccatagcattagttctgctgccttctgtattcacaagtcacaatgccaaacatgattcaacgaataaggaaatggacttcacctcttattagaacagaggcaaagtcacaaggcatatggattcaggaagggaaggagttattgtgtcatttttttgatcaacttaccatatctggaaaacactagcacaaagtgggtgtaggaatattaatatcaaagttgaagtcaaggtgaaaagaaactaagaggaaatatttcttagagataaaagaaacactacaagaagaagataaaatagtcatgagcatgttttcgtctaatgacatacattcagaatatgtaaagcaaaagctgttaaagaataaggagaggctgggcacactggctcgcagctgtaatcccagcactttgtgattacagcactttgtgagcccaggagttcaagaccagcctggacaacatggggaaaccccatctctacaaaaaaaatacaaaaagccaggcgtggtggtgtgagcctgtagtcccagctacagtgaggacaggcaggaggatcacatgagcccggagagattgaggctaagatcgcaccactgcactccagcctaggcacagagtgagaaccggtctcaaaaaaaaaaaaaaaaaaaaaaaggaaaaattgaccccaaaaatcacagtgttagattttaacatatctctcttggaaaataaaatattaagcactttaaaaaataaagatcaagactatttgactaacacaatagcatgacctaatagaaatattctgaactacgttctaagcagagtatacacattcacaaaaattgaccataagctaaactgcaaaggaaatcttaacacatctccccacccaaaaataatacaacacggaccatcttctctcaccacaatgcaatacaattagaaatgaaaaacaaaacgatagccaaacaaaaaacaaaccagtgtatgtctagaaacttttaaacagacttgtaaataactcaagttaaaggggtagcaggaccagaacctagacttccaaataaccagtgtagttcatgatctagtccttttgttcatataaagctatttgttttaaaatagttgctgaattacatgaaagggtgagaaagtgggagagacagaaaggcagagacaaaacaaggtgggctgggaaagggattcactggagcaacgagttcagtgtatggaagaattgaagggtcagatagttattaccagccaggttcagcaaagcctagaaggatctgctggtctcagtgacctgggcaggcaaacaccacccagcggaggccaggggaagacaccagcaagcaggccagatcctttgagcttggatcgtggggtagattctatttgcttctaatcctttagtgcagatgagctcctgtgtgcagaggagagaggtggctcctagaagcgggtaaattccagaaactacaaggggcccaacagtcagtatccagaaggattccagatggttccaactcaacaatgccagaatactcacaacatagcaactgtccgttttctgaacattggagtccagtggtgcctgagccaggaggcttgccaattcagtagaccagacgtggtatttgctctacacagcacaaatcagagggcatatttgatagtgataacatagcagtcatttagcttgtgtagagggttactcgggatatttcagacccccaaaattctacttgtggccttaattattcacattatttgatcacatcagttaaaatacagagtacctatcattctttcctttgcactatggkaacggaacatctgttgggctgaaatcaattttttctcctttttgtgtgaattcattgatgccttcatccacccactcacccatccctccatttaactaacactcaaagcaaacttaacacatctcagatcctcagtgcttcatgtgtcattgtttacgtctcctctgattacttgtagatgagaaaaataaagaaggtggtgtgagttacttgggtgcaaaacgatattctagttttgcactagaagtgctcagctaaaactgtgctagataaataactaaaaaaaaggagagagaaaaatgaaaaaaaaaaaaagagcgtcagagaggaaacgggagggtctcagtggggaattcggcttcctgtcgtctgggttttgattttgagttgtactagaggagtctttatgtctggaatgctgagaaaaccagcccaggccaggcgggctgtgagggcaggatttggaggcgtttagtttcttaaactctatagtctggattccggtgtcaggggcctgagccattttcctcctcccctacccgtcagctcccactccctccaaacttcctaagaaagttctgagtcctgcagaaagacaggcttctccatcttccacacccgcgcagatttctctttcctcacacatgcacgcccaggcccagcgccccagcccctcacccccaggataactgttagagtctctcacacggggctgtcatcattaacaccccgagattcccgagggctaggacactgaggccggtgtccacatctgccaaattcctcccatagctgcgtgcgaactgagtatgttcctaagacgcctaaggagttcagcacggggctcggggtccactgcgacactgcgcggacagcggccgctcggctgggcctcaggtggggagggctcgcggtcctgccctgagcccgggctccgcagctcggcgcctgcaccgctcccctcgccgagcccgcggcggagtctgccggccgcacgcagcaggtctggggctcaccttgaatcgggacctgcggggaccgccgtgcggcttcccgctgggtgagcgcsgcagccctgagtggcggggcagtcattccccttttccagatgggaaagccaaatcttgagcccagcgccagcaccgtgttctcaggtgctgggacttccaacccgcgatctcctcactgtagtatttctgggaaccttccctgggattcccctcggggcgtagagggaaggaacgtctggggacaagcgtccaggaagggtctggattctttgtcctccgccgggagcaggccccaccgcaggcgccagtgtgtggggcgccccggagacggtggcggggaccgagcccctgccccgcggagaagcagrgggcgcgggacgccgttccccagcgctgccgccgccgcgctcgccagggcctggagtggcgcggagggcggcgggctcagaccaaagtccaccagggggcaaagtccgcgggccccaakcccccaccacggggtcgcgggggtttgctccgcctcgtgagcttgggattctggttaaaaaggcggctgggcggagcygcgggcctccgacggcrggaggacagcgctgcgaggaggcgcccgggacagtcatggagcgccgcctgggagtgagggcctgggtgaaggagaaccggggctccttccagcccccggtctgcaacaagctcatgtgagtccagcacccccatggccgccccctgccctcgcctcctccccctcctccatctgcgccctcaccttccagctccgagttcctggacccagaagcttgcagaaggaccgctttaatctcttggttcttgggggaagatggagacaggctgttccggttccaccacatcggtctgttcctctttcttgtgactgtggccttgacttctgaagaaggctgagctggttctsaggctgtaggagatgasatgacagggtgcacctctccttccagggctgagaaacaattctccaaccccaagtgacactgtgcattttgggaaaactcaaaagtgtggggagggtggttttcaaggcagaaatgcactagaatgtaggcctgggggcagccaaatcatacaccccaaccctgtcccagaagccacaggcaaagggggaggcagagaatccrctcctttgggaagatcttgatgtcttgcttttttcagggcccctctatgcaggtgtgcacgaacacmcacacacacacacacacacacaccagaccctccctaggccacctctgccagtagcctctgcctgcagcacccaacagggttggccatccagctgccatctttctcaggcagacctctcaggccctcccctgtggtatggtcacctccctcatccccccagttccayggcggggccccacatgccagctagatcaaggtttacattccccatttttgctgtgtccacaggacatggtcagtagggtggcacctcaaggcaaacagcaggcccaggactatgccaagtgtttttacatcatctcatctcattctcacagtagcaccgtgaggggggattttcataagtaacttttctagtgtcacggagcgcctgtgcgataggctccagactcaacccacggagcagttcgactccagagtccacgcacactcttggtyaccatgcaataccacatggccaacagtcaatatctccccaaagatctcttctatcactgttgttgcccacccccaattaaagatgtagcatcatctttgcctccttccamcacttcatccccatctgcagtcgctccttctcagtcctcccttcgctccccctgaggtctcgcgtccatctgcccrggcctctccctagcatttggtggtttgctggcatcattggtattcttgcttctgctgtaccacgcccacctccaccttcgtcttcacaaggcagtctccttgtgtgtgtgtctgtgtccaaatttccctcttttaaaagaacaccagacatattggatcaggggctcaccctactccaggatgacctcatcctaacctaactacatctcaaggaccctattccaaataaggtcacattctgcagtactgggcgttaggacttcaacatataaattttacaggaggggttactattcagcaaggtgagaagctgctgaagcaagcaaggtgagaagctgctgaagagttctgggcagaggaggggcaggtcgggtttatgcattctgactgatgggttgaaagagttcttgagtggagttgtttaagaattgtctgtatgtacctaaattacatctcagtgaagttgattttaaaaaacaactttcaagccgggcgcagtggctcatgcctgtaatcccagcactttgggaggctgaggtgggtggatcatttggggtcaggagttcaagaccagactggccaacatggtgaaaccccgtctctgctaaaaatacaaaaattacctgggcgtggtggcacgcgcctgtagtcccagctactcaggaggccgaggcaggagaattgcttgaacccgggaggtggaggctgcactgagccgaagttgtgccactgcattccagcctgggtggcaagcaagactctatctgaraaaaaaaaaawaaaaacaaactttccaggttccccagcaccccttaggccaagaccagactccatggctggtccaccctcctggaccagccttctcaatcgttccccaagctcacccccagtgcttctaatctcagagcctctgcacccagctctcctgtgcacactcytccccagtcaagttcctygcggcttccctcccctccttgaagctctatgcagctttaagttctttaagcatggactgttcatgacagccttctcctgccctgcracctcatccacctttccaaacatcaggtccacacgtgtgtttccggtttattgggcccagcctcccaaaagggaaggaaaaggaaagagactggctcttccgtcttgcctccatgcctcccagctgggctggaaagcagcccacaggacaggacactcagaaaggacctgccagtctagtttgggggctcagacctcccccatagcccctcccctgccatccacaccatcgtcatccatgcaggcagcctctaggctgctgtgccctgtgtgtacaaatggtcccagacccwgcgcctccccttcccagaggaaagccctygcccctgccctctgtggcagggccacctgagaacaccctgaagccctacrcagacacattctgctgcttattcaccccagtgtctgcaccctgaaaggggaccctgctgtggggatggggcaggctgttctcaggaggtgctgaggtatttttygcataaaaaggtaacaccacaccaacagcagaaagactgaggagtttgggaacccttttgttccaaacagctgactagatgccccacagacccaacgccagcrtgggagtcaaggagcctgagacctggctcaggttcagtcattccctggctttgtgaccctctcttggctggctaaatcggctgtaaaatgagagggttgtattgagtttatttatttatttatttaagacasagtctccccctgttacccaggctggagtgcagtagcgcaatctcagctcactgcaacctcacctctcaggttcaagcgattctcgtgcttcagcctcccaggtagckgggattacaggtgcccaccaccaggcctggctaatttttgtatttttagtagagacagggtttcaccatgttggccaggctagtggcctcaagcaatacatccgcctctgcctctcaaagtgctgggattacaggcatgagccaccacgcccggccgggtttatttattttatcaaatacttaaatagtgcttactatatgctaggcaccattctgagagcttccaaatattaattcatgtattctgtttaaactctgtgaggtaagaactgttcctctattttacagataaggttagtaacatgccccagggcctgtgcttataaacacatgccacactgacttgacaccgcctgaggcccctgctagatgtcacggtctcctgcatccactgagccatgcctccagccaggggagagtgcagggtcctatagtcagacagcatgggtgagtggcaggtcaaggtcgttttgcccctacactgccccatcctgggaaggggtcttcaatttgctactctccygtaattygagatcttgatcctgtgatcctggttgatgaagccatagattcaccaccacatcatttcccttgttgggtcagacgatgtggggggacacacaaacaatgacagacagacacacagacacgatcccagacacatagacacttagatgcacgcaggcatgaacyggggatgagagttggggarcagggacagtgaggccaaaacagccctgctcctctcccaggggccctcaggctccctcctggcccccaygggacccgtgctctcttcactcctaggagatggtttagaacgtctcccccactttgygcattgcaggcaccaggagcagctcaaagtcatgttcrtcggaggccccaacwccaggaaggactatcacatcgaagagggtgaagaggtaggtttgactggtctccctggatctaggcctgcgggcaaggagcctggccctagmgggagggggcgcttcccactcgaggcccagagatgatggactggagaggggtggacatgtggctgatgagtggagggggcacagctgaaatcacagggcacgactgctgcctccaagctggtggtcaggcagtgacgcctccacagctagcacctctgctgggggagccccaggaaacancccatgccctgcgggtgagaggttttagccrtggggcatcctccccctggatataggggctggccwtgtgaagggggacgtcctggtcccctccccacaaacttgacagattcaattggtctccaaaatgagatcctcccccgcagacgggggcaaagtgcaaaaacaccgtgggtgagggctgggctgastgggtggcagagggagytcgaggggctgagggaggaggagctagtggctgagggktaggcatggtagggaggtgcctggagctgaaggaggagttggggcagggtggcccttccttaactaraggctgcaaaacccattcgtggcttgtggctggggcaggtgggagggggaatttgccttgaatcaccttttgcaccttgaagtttggactgtgcttctctactacctaccccaaaataaataaacaaaagcaaaatttaaagagaaaggtgtgtccccttaaggagagacacagaatctcctctggtggaaaaggatcagtagaggggctccccatcctctcagggagcctcattctgggggttcaggatccagagtccagcttgatcaacagcctctgtccccactgagggcatccaggccacagccagggactgtggtgagcatgggagaatcacttgttcaataaatatttgctgagcacctcatgtgtgcactgggacacccaaggctgtgtggaggaacgatgggccctgggccagcagaaccagccaactcctcacctctcacgctccaggggccctgcacctcccctggccacccccttctcacaaacacacctcactggagaccgtttccttggtggaaaaagtcaataggaaaatctaaaactatactgaggaggtgggtagacctggcatggctatggcatgggaggcacagctggctgcggagtcttccagaggcttctgccttctctgttggccctggtctcagcacccgcctctcctgtctccctctgtctttgcttcccttctcgccccctgctgcctctgctccatgccccatcccatggtttctccaagctcaggtgcctgagtgtcccctgaggggcctggccagcagctcacgtcctgactcagatggcagctgagkgattgagtgataagragagctggccagcacaggtgtcctcactctggagggacgcccaggtgtctgggaggaatctggctggaggtgggcttgtgacagggcttggtcccaccctgctgaggttttggtggcggggtggtgcagcacttgggcagcctcagggctgagggtcggcctcctctctgtccctgcctatcctcacccagctggagcctggggagactccaggatgcgctgtggaagtggcgtaactcagggtccgggctcctcctgaatagtgagaaaaggggagttgctcagacctgggttcaaatcacacctcttaccaaaccacactttcctcctcactgagctctgcctctgcaatagcggtcagggtacctccagctccctggcccggctccccactccccagcgccacctaccacctatactccacctacctcactcctttcttggagcgtgcaggtgcaggggggccagaggcagatgaacttgcattgggggaattctctgccgcttactaaccccrggatcttggacagggcacatcatgtcacctctccaagcctgtttccataagcacatggggacaacagcccctgtctggtggaagaattcaatgtgcatagagtatgtgcacacagcctggtgcagagttggtgcttgatatgcattgttcctctacacctctcgccctttctgcctggmctgcctgaaaggcctttccaggtcagaaagccagattctattcattatctgcctgagccagtacagttaatcttctagccagccccaggctcccaaacatcatttacttccaaactgagcataattcctttaggattgcccacagctgttcaggattttctgctgttcagtgatctgtacctctgccccaggccaggcctgcccctcatcacagggaagacctctgagcaggggacaagagcgagaaaatagagamaatatcgtatagcctgcccagtaaggcagtaagggtttaaatctggcccagagggtcactccggactcccctctcccaacttttcctttgtccctcctcccttccctcactgtgaaaggtccctagacacacacacacacacacacacacacacacacacacacacacacacacacacacacacacagaggcttcctcccagcttggagagtgggggaggagagcatactgaaatgctccctataagagaacctggtaggtttcttattatttgtattaaataatgcttatggggtttttgtttgttcatgtttgtgtttgtttttgttttttagagatgggggtctcactctgtcacccaggctggagtacagtggtgcaatcatagctcagtgcagcctcaacttctggggctcaagtgatcctcccacctcaggctcccagatagttaggactacaggcacacatcaccatactcagctaatttcttctagtttttgtagagatggggtctcaccatgttgcccagaatggtctccactcctggcctcaagtgatcctcccatctcccaaagtgctaggattacaggcataagcctccacatccggcctatgggtttttttttaataaggaaagtaaacattgttccttgtagaaaatatgagaaatatagaaagaaaaatccttacctcattcataatccyaccacgcagagggccgctgtgaacaggctgcctctgttatatttgtattgctacaaactaaagccctgctgggtatagttttgaatctttaacgtaactttagcattttccattttcccattttattaacagctattcaaaaacgtagtttttaatggctgcataatgttccatattttgaatctaccatcaaatatttacatttctcctataattatattagcattacttttgtcattcttaccatcatcaatactaatagctagaggcttactgagggcttactatgcgctgarcacatatgtgtaaagcatccctggcatcttcacagctacattttgagtagataactgtcattatgtagatgaggaaactgaggtacagaaaggctaactgaattgaccaagggcacacagcaccctggcagagctgagggcttttaactatgcactgcattgaaaacagccttgaatgtacaccactaggcaggtatgtctctgatgaactgaggtctcattcctgaggtagaattactgaggtcaaggttgtgtggtgaccagctatctggattcacctagaactttcccagttttagcactaagggtcctgcatcccaataaaccccacagtccctccaggggtgtgaactgccaaggcacttcacgcccatggccaagttgcccttcagaagggtggtgactatttgtgcctagtggcagactgcagagccacatctctctaggtccctcgaggtcagcttggtttctcttagtagatgctgttgataacattccttcaagtatttggctggggcttttaacacccaggcaatgtgtgactggtggagagaaaaccggtctgcctcctcctcttcctcccagttccatggggtgatctcagtaaattagggacttaggatggaatcggaaaaatgcagtaggaacccccccgcccgccccccccacctccccccacccccaggagagcacaagaggcatatgctcccatcccccacagcccctaacccatcccaggctgccagcaacctccacagccccaccccttgccaaggtgtcactctggccagtggctccagagccacatacggccttggatccaagctgcggctccagctggagactaaccagctatgtgaccttaggccagctgttttaccctctgagccttgtttttctttctttgttttctgctgattggggttaatgatacctttggaggttgctgtgaaggtttctggtggaaaagtgcctggcacagcccctggcacccagtaaatgggtgggttccctacctgactgctgggtcattcagttccccagtgagcatttcatccagttcctgcccgccagccaggcaaccactgttgcatcctgggtactctggtcatcacttgcatgtccaagacatgatcccatgtgtccccggcactccatggcatgcamcggggagacaggcctcaggacagaagtgacggagctgcccatcaactccaaggccttcagaaagtttctcaggtttcccggtcagaattcagggcctgggcagtggccaaggacctggaagagaaagtgcggagggtccaagcctctctcctgtcccacaggtattttaccagctggagggagacatggttctccgagtcctggagcaagggaaacacygggatgtggtcattcggcagggagaggtgaggccggatcccagcagggtggggaagagaaaggcggccacagctggaatccgccctgtccactcatcctggccctggctgaggtcttgtcctccctaccttttcctgctctcccacaccttcccctgccaacctgccccttccccatccttcctcttccaggctgccccatcctcagcacrgtccaacattccctctggttccctggtgtagaggctgggcagagaagagggcccagggtagacaagcagtacccctttgctgcccgggggtcagctggggatgcccaggatgttgggggcgctaaggtctccatgagggattgcagcctcactgtgcaccttatctctaccactgcagatattcctcctgcctgccagggtgccccactcaccacagaggtttgccaacaccgtggggctggtggttgagcgaaggcggctggagaccgagctagatgggctcaggtaaattctgtctggagggctggggcagagaaagggcaaacagcagaggagcacagctccaaactgcagctgaagggatcctagatagactcaagaaagcacgtcctggccactgagtgggcaggagggcctcacagcagaggcagtggagatcctgtctttgttggctgatggtggaggggtagagtggggtggattctgttctctgtgaccccctggaagctcactcagcctgatgaactttggctggaatcagaatctgtgctttctgcgtgaggttgtgaaccttgaaaattcgagacaggtctcagttaatttaaaagtttgttttgccaaggttgaggacgtgtgcccgtgacacagcctcaggaggtcctgatgacatgtgcccaaagtcgtaagagcacagctcggctttatacattttagggagacatgagacaccgatcaatatatgtaagataaacattggttctgtctggaaaggtgagacaactccaagcaaaggtgggaagactcaaagtgggaagggggcttccaggtcacaggtagataagagacaaatggttacattcttttgagtttctgattagcctctccaaaggaggcaatcagatatgcatttatgccagtgagcagaggggtaactttgcatcgaatggggggcaggcttgccctaagcagttcctaccttgatttttccctttagcctagtgattttgggggcccaagatattttcctttcacatttcccccttttcttttttaaaatcttttggagaaagcattttagaagaaattgagtctctggtcccaggttttgtctgatgtctcatggctaggatggtttattcctagacgggtagatcccaagttattagggaagttcagttttagaaagctgtgaagtctcatgtctcacaaagagaaaatagggggaggaagggagaaaaacaacaaccaacagaagagcaatcctggaaaatcgatatagaccacattactctgaagttcacacatcagtaggcaagtatgaaagtggcttaggtacgtaaattggttgctgacattttcttctgaagtttaagttgtcaggcttcagttttcagggctttaagaaagcacagctcagctttcagtgactccaagttaggaaaaacaaacaaaaaaagaagtaaaaaaattgaaaacattattttgaagacttgtagtcaagaaaaattagaattcagtccaaatcacagaaaaataataaaaattgaaaaacattaggcaagactagaatctaacatcaggtatactatagttttcaaaacataatttttctctctccagtttcccctttttactaaagacaaatcatggtaagactgatttgctttattatacttggcctaattatttgtatacagtgcagcaagaataatttttttttttttgagacaaagtttcgctcttgttgcccaggctggagtgcaatggcacgatctcggctcactgcaacctccgccccctgggttcaagtgattctcctgccttaacytcttgagtagttgggattacaggcacccgccaccacaccyggctaattttttgaatttttagtagaaattgggtttcaccatgttggccaggctagtctcgaactcctgacctcaggtgacccatctgcctcggccttccaaagtgctaggattacaggcatgagccaccacacctggccaagaataattattttttacataggcttttaaattggctttgatggaactttgttccatagaaggaatctcagataagacctttttttaaagccaagcctagccatggatatgtgctattgaatacctatgagttgggtgatcttcttgaggttccaaggtaaacttgaggcctttgggcgtgtcagagacagggtctttacttaccaaaggtcagaaaccctatacagggaagatatgaggccagtttccctaaagggtttttattggctccataaaccaataaaggaaagcacaccattccagtcaaatccttgataaaataaccagtttctccaattgtgtcctgttgcaaaatgaaaacagattcttattgcacttatgcayataactgtattgccataagttaagaatactcacaaatagcttccaaattctggagaaatcaggtagagagaaaaaaatatgctccaaattttgttcatgggagtatactaaattgttgtgtttttttttgagacagagtcttgctctgtcgcccaggctggagtgcagtggcatgatctcggctcactgcaagctccgcctcccaggttcacaccattctcctgcctcagcctcctgagtagctgggactacaggcgcctgccaccacgcccagcaaattttttttttttttttgtatttttagtagagacagggtttcaccatgttagccaggatggtctcgctctcctgacctcgtaatccacccgccttggcctcccaaagtgctgggattataggcatgagccaccacgcccggccgggagtattaaattgttaaaagctgtcaatagcacacacaaaaaagtttccttgactctgaaaaaaaacaaaataaaacaaaggatcagcaacatttaaagcaaaagtaaaaaagattactttagtcttctatgagttcagtttacttagtttactcctgttctgcttgatactcatgaacatttcagctctccatgagagtcctgaaagtttttcttctctattctaatgtcacaatctccaaagttatcagaaacctgcacttaagaacacctgtgttcgccgggcgcggtggctcacgcctgtaatcccagcactttgggaagccgaggcgggtggatcacgaggtcaagagatcgagaccattctggccaacatgttgaaaccccatctctactaaaagtacaaaaattagctgggcatggtggcatgtgcctgtactctgagctactcaggaggctgaggcaggagaatcacttgaacctgggaggcggaggttgcagtgagccgagattgcaccgctgcactccagcctggcaacagagcgagactccatcttaaaaaaaaaaaaaaattaaaaaaaaagaacacctgtgttctagagctgattataaagccacctcctaaagagaaccaaaacaggacaattttctgtgaatgacaaaaagttttaaggcagccatagtcaaagacgcagttggcaaggaaatttgttacctctgtggcacacaataatttaatataattatgattattactgatgatgtacactaagttttatcaggattataggagtttcccataattttggaatacataccaataatatatttatacaaatacagcctaaagaaaaccaaacaccatttcatatttggcaatgcttcctgtataatttttataccaagtaagccaaactatgtcattttgggactttagggaacccaatatcttaacagattaattaggtcagaaaaagacataatttatcatttgattttggaaagtttgtcaaatatcaaaggtttaaaactcttgatatcacaatataggatcattcatttaaccaaagtaataactcaaggatttcaaaaaaggtgaaaaccttcattctttgagaagagacttaatgttccaaacaataagctctaataaaaatagcatgaagctgggcgcggtggctcacgcctgaaatcccagcactttggaaggccgaggtggggggatcacgaggtcaagagttcaagaccagcctgaccaacatggtgaaaccccgcctctaccaaaaatacaaaaattagctgggtgtggtggtgtgcacctgtaatcccagctactcaggaggctgaggcaggagaactgcttgaacccgggaggcggaggttgcaatgagccaagatcgcaccactgcactccagactcggcaacagtgagactctgtctcaaaaaaaaaaaatagcatgaacccaattaactatagttttcaaaattatatcttgaccataagatataatttccataaacctttcataacctatatttaggagtcagttaatgcttcaataaaacctttttaatctgacacaggggcccatatgctggtcttgcatcagtgtacctttgacattaatgactaatttatagagaaactgaacttatttatttatttatttgagatggaattttgctcttgttgcscaggctggagtgcaatggygtgatctcagctcactgcaayctccacctcccgggtccaggtgattctcctgcctcagcctcccaagtagctgggattacagacatgtgccaccatgcctggctaattttgtatttctagtagagacaaggtttcaccatgttagtcaagmtggtctcgaactcctgaccttacatgatccacccaccccagcctcccaaagtgctggaattagaggcgtgagccaccaccacacccagcgagaaactgaacttattttatctctcaaaattggtccttacagtctcccatgcccatctcttacatgatagtccctgggcsttgaggagctttaatttctgtccctgtgtttcaggaatgcagtttattttgattggcatcttctactgggcctgaagatggggctttaattgctgtcagtgtttaaagtttagcaggacttggtcaggcacagtgactcacgcctgtaattccagcactttgggaggccgagacaggcaaatcatgaggtcagagtttcagaccagcctggccaacatggtgaaacctcatctctactaaaaatacaaaaaattagctgggcatggtgacaggcacctgtaatcccagctactcaggaggctgaggcagaagaattgtttgaacctgggaggtggagggttgcagtgagccaagatcatgccactgtgctccagcccaggcaacagtgcaagactccatgtcaaaaaaaaaaattagcaggacctrgtgtcctttttagacccaggagtcaaagccctgtaacttaatgtcacaaggacattaaaagcacatacagagagatacacagatgtaataaccttaacttttgaaaaaatttaatctcagtttttttcctaagcaaccgaaaacttaataataatgtgataacttgatcatataaaagtttttgggttttttttttaaataaatcctcttattgtgacttacacagaccattcatgctatgcttagactttctggtttgtcctgaacatccctccttcttcaacaaccagtcattttactctacaactaaatttaccatacaagagtctttctcatatgaaattatgtctctttaagctttcttaccacaaaaaacctctttgtttttatgactttctttacatstcttttatttcctgcttccttttaccttgttttatacatgacctttaaataagccttaaattagataaaatggttcactttttttaaaaggacacacctttttttttagaaagaatgttttcctacaaatatatttttattggaaagtacccaaataatgaaatatctattatttaatttaactttagattctaaattatgacaagtttgtctacaagtatttatcctattgcatttacataattattttaatcatttacttagattatttctaaaaattgtgattgtcattatttaaagttatggaaccaccattgcaaaattataactgagacagtgaaaatgatttgacctaactgattccatcttgcttctaacctccaagctctccttgttcataggctgaactaactttgagaggcacttagtttagttaattagagcccctttttatattttcagcagtgaaacattgtgtacacaacacatagatagacgtcttaggcatgctaatagaagtgcatcttatagattcatagcaacttttttttcctatcttagactttcacattctttttcttcttttctttctttttttttttttttttttttttgcgataagagtcttgctctgtcacctgagctggagtgcagtggcacaatcttggctcactgcgacttctgcctctcaggttcaagcgatcctcctgcctcagcctcccaagtagttgggattgcaggcgcccacaaccacacccagctaattttttgtatttttattagagacaggatttcaccatgttggccaggccgatgttcaggcccttgctgtcaggagatcaagtcacgtcgccctcccaaagtgctgggattacaggtgtgagccaccatgcccggtcagactttcagattcttgataacctgttttacaaccacaggcagttgtcagctaaatagccttaaagttgcatattaaaggaaacaactcgccggacacggtggctcaggcctgtaatcccagcactttgggaggctgaggtaggcggatcatgaggtcaggagttcaatagccacctggccaagatagtgaaaccccgtctctactaaaaatacaaaaaaattagctgggcgtggtggcaggcgcctgcaatcccagctattcaggaggctgaggcagagaattgcttgaacccaagaggcggaagttgcagtgagccaagatcacgccactgcactccagcctgagtgacagagtgagactccatctcaaaaaaaaaaaaaaaaaggaaacaactcaggtgaaaaatcaaataacaaaatttccatcataaggtacagagagaagtcggatggtgctagagggagattaaagatggatgctggctgggcatggtggctcatgcctataatcccagcactttgggaggcagaggcaggcggatcatctgaggtcaggagtttgagaccagcgtgaccaacgtggagaaaccccatctctactaaaaatgcaaaattagccaggtgtggtggcacatacctgtaatctcagctactagggaagctgagcaggagaatctcttgaacccaggaggcagaggttgcagtgagtcgagatcataccattgcattccagcctgggcaacaagagtgaaactctgtctcaaaaaaaaaaaaaaaaaaaaaaaaagatggatgccaagtcaaacataaaattacagaaatctatcacaggattgtataaggataccaattttatttagatagggaccacctatcttttaactagatctctgagctctgggcaaagtccacaccgaatcctgggtctccaaaaagggagaattattatgagcttagaccacgtgatgcttttacagtgcactttaaaaaaagttttttttaaacaaagacatttctaagtatctaaaccacactcttccacatttgatcttagccaaaggcccagaagcgataaaaccacactcttccttaaaaactcaagagtaagagtaacctcagttacaataactattttagtaaaaaaaaaaaaaaaaaaggataacacaatataaaagtaagcagtttaacagctgagaccatttatctttttacattcttggggttccayaaggaaaaacagatttctcccccaaaaggagtctagtgccttcttcattttctttaagaaaccccaggctactataaactattttaggtccctcatgcagcagagggtgcaggagaaaggagagacagcagaagtaaatgaagaaaacagaattcagtcaactgagaagaaaaaaacttttgctcaaaaaaaaaagacaaggtcctaggagaaaaacaaaaacaaaaacatgaaagttaaatacacacacacacacacaccccttggatgttagcttttaattaagctgacttttaaccaytgagctcctttaaaaaaatctttttaaatctcattaccgtatttcagctggaaaaaaatgctgctgtttcagaagtacagccattgctctttcagttttgcctggctagcaaaagtggccttgtttatgtaaatcaagccccttagcagtcaaaatacaaaatctttcatctttcttttctccttttactggccttttttctccccccaccagacaacctttttttttttttttttttttttccatgacagtcttactctgtcacccaggctgaagtgtagtggtgcaatctcggctcactgcaacctctgcctcctgggttcaagcaattctcctgcctcagcctcctgaatagctggaattacaggtgcgcgccactgcgcccagctaatttttgtatttttagtagagacggggtttcaccacgttggtcaggctagtctggaactcctgacttcatgatctgcccacctcggcctcccaaagtgctgggattacaggtgtgagccactgtgcccggcccttttcgtgtgtgtgtgtgttggtggggagggacgggaaatttagccactcyagaggccttgtttcccataatttggaacttctttaggattttatcaagtcaggtagagctgatcaaacccaatgggaaaaagaatgaaacaacaacaaaacagaaacaaacagcaacaacaacaacaaacagtgaagcaaaacaaacaatcgcgcagcttctatgatcactgagcgctctaatgggaaggagaaattaagagcacctgattgttaactttagccaaaacaaacccccagttcagctacttacctagggatgggtctcaggctcaagacaactctctaccatcctagaagcaggaaaaaaacctccttttccctattggatgcaagctcaaattccataaaggagttacctgccttccattgtcatggaagcaggaaaacttgccttccttgttggaaacaagtaaaactccaaaaaaaagggagttgtacagcaaaataaactttagatctcaaccaaatttggggagatcagggattctctagagggggtgctcccacacctcagcaaattgtcctattggtttgagccataaagttagctcacgcgggtaccaagcacccttaggagatttgtctaaggtcaggggcacctccactcagaatgcctctgtggttatcaaaatgtcaactccaaaaatttgagacaggtctcagttaatttagcaagtttattttgccaaggttgaggatgcacgctcgtgacacagcctcaggaggtcctgttgacgtgtgcccaagagagtcagagcacagcttggttttatacattttagggggacaagagacatcaattaacatatgtaagatgaacattggttcagtctggaaaggcaggacaactcaaagcaaaagcaggatgactcaaagcagggagggggcttctaggtcataggtagaaaagagacaaatggttgcattcttttgagtttccgattagtctctccagaggaggcaatcagatatgcatttatctcagtgagcagaggggcactttgaatacaatggggggcaggtagccgggcgcagtggcacacgcttgtaatcccagcacttcgggaggccgaggcgggtggatcacgaggtcaggagatcgagagagaccatcctggctaacatggtgaaaccccatttctactaaaaatacaaaaaattagtcgggcgtggtggcgggcgcctgtattcccagctacttgggaggctggggcaggagaatggcatgaacccaggagacagagcttgcagtgagccaagatcgcgccagtgcgctccagcctgggtgacagagtgagactccgtctcaaaaaaaaaaaaaaaaaaaaatagggggtaggtttgccctaagcagttctcagcttgacatttcccttaatttagtgatttcggggcccaagatattttcctttcacaaggtcttctgggaggggtgagatgtggaaagcgggccagaggggttccaaagtcacacccacctcccccagtgcagccagaactgctgcttccccccagaatttagaatcacggccagtgcctccctcggcttgtttctctaccccagctcattccacaacacacactgacatctggatggcacttgctatgtgccagatgcctggctaaggtctttgcatgtatttattcattgaatcttcccagcgatcctatgggggaggtgctgttatcattacaaagaagttaaagttgctaaagtgttacttgctagatctggcattatagagaaatatggagttagggccaggacagtatagagaggagtgggagtcaacaccaaagaggggaagaaaataggccccgctgtcagcattctgattccatggccggggttctcatttggttctgatcagtcacccaattcttttcctctgaaaggaggaagcaacctattgctcagggaaatagattttccaaaagctcaacagtgtttggttgggtttttttttttttttttttttgatatgggggctcactctatctatcacccacgctggaatgcagtggcgtgatcattatttgttgtattttttaactaaaaaaaattcaagtttcccatcaggtcaccaggaacaggatactttggcctacatcttttgttataataggcatttttaaaatacgtgttgtttttctgattatcaaagtcatacacattcattctcaaaatctggaaaagtacaggaatgcaaagtgaacaaaattaaaattacttgttactaaaaggataaatttgatggtatgtgaattatatctcaagaaaacaaaataataaaaaagggaaaacaaaaaaaattgtcctgtcaccaatgaaacctaatgaaacctaaacttccatcttgtcttatttctatgcttacctatatctttttttacttaaaagaaactcatgagtattctttttttttttttttgagatggagtcttgctctgtcacccaggctggagtgcagtggtacaatctcggctcactgcaacctctgcctcccgggttcaagcaatcctcctgcctcagcctcctgagtagctgggattacagacatgcaccaccatgtctggctaatttttgtatttttagtagagacgargtttcaccatgttggccaggctggtctcgaactgccaacctcaggtgatccacccacctcggcctcccaaagtgctgggattacagttgtgagccaccacattcggccgagtatttcttacactattaaatcttttcaaaaaacacaatggctgcataatcatttactgtgtaacagtctgttgtagagacagacacgtggtcttatcttctagaaaaaatttgtcacaagggactttaatatagtgagtctgatggagaggatggtgtcctcaatatcattttacagcaaattcaataacacatttcatctggctgcttttgacctttaataaaagccagggactcaacattaaaatgccactccaaaggcagttcccggagggcactgccatccagttatgaagctttctggtggccagctccatcccaggataggatttaggctgccaagtgggtggatgcactgtgtgtctgtaaagcatctcccaccagcgggaccacatctcttttaagagcagacagagctggcctgggcccaggagctgggcttgggcattaggcattcagttaacaggcgttcctggcacccaccatgtgcagcacccacaggggcctggggcccatcccagcctgccaggtgctcctcaggccgggggaggagctcactgagccaggctgggggctggggtgggctttaggggtctactgaaggctatatgtacatgtacatgggccttaccccagaaaagaggtccaaaactttgctccaactctcaaaggcaatcatgaccctgaaagaagaagaacccctaaactgggggacatcttctgcgtgttggcttctttttttttttttttttacttatttatttacttttgagacagagtcttgttctgtcacccaggctggaatgcggcggtgcaatctyggctcactgcaacctccgcttcccggttcaagcaattctcctgcctcggcctcccaagtagctgggattacagtcccctgccagcatgcctggctattttttttctatcttttgttatgcctggctattttttgtatttatttwttattattattatttttagtagagacagggtttcaccatgttggccaggctggtcttgaactcctgacctcaagtaatctacccgtctcagcctcccaaagtgctgggattacaggcgtgagccactgcgcccggccatgttggtttcttaagtgtccgtgcactcaggcctagagcactgcaggccagcagagcgtccagccactggccctggtttcaggctcagcctcagcttcctctttgcgaaaaacaaaagaactgcgattagatgctctctaagtttttaagattgtcttgagactggcctgcttccgccacttacaggctgtgtaatccttggcaaattgctcagcttctgtgagtctcagagttctatctgctttgtctagttttgggaaccagtttgggtctagttttgggaaccggagagagccgtgtgaattctcgggatagtagccctctcagggggcgcacgtgtgcttctgaagagcaaggtgttaagtgaccagtgaccactagggtgtgtaacaggggtgagcagacagcagggctctgcagggacttctacaagcagagccaggcctgagtggggctgccctgaagccacccagatggggacagcagggttgcctgtcytctgctctggcaggtactatgtgggcgacaccatggacgttctgtttgagaagtggttctactgcaaggacctcggcacgcagttggcccccatcatccaggagtgagcccccagcccagcycctgcctcttgctttcctggggctctgcatcagcacctgatgccctgggagaaagtctcccctcccagggtggagatcctggcccagagagcccactgccaggccggggggaggggggagcagcagccccgctgggagggaaaggatggcagacacacagctgtgtgagagccccatgagtgtgtgtgggcacctgcacctgaccgtgagtgtggtgtatgtgtgtgtcgctggccactccgatgggagtgctcgccactcctgctcctccctgttcgtccttgcaggttcttcagctctgagcagtacagaacaggaaagcccatccctggtgaggccgctgggaactgcccttctccttccctccctccccttccaaaataggatgggttttggtccaggggaccggggagtctctttttgaatactctgcccagtcctcaaggtactaagaagatggcagccaatggtacctcccacatggctgcttgatcaytgagctggatacagagcctgttctggcaattgagacctggggcccctgggaactgggcccactggggctgggtgggctgggtcctgaggacaccgactatagtcatgctgtgggtgcagaccagctgctcaaggagccaccattccctctgagcacacgatccatcatggagcccatgtccctggatgcctggctggacagccaccayagggagctgcaggcaggcacaccactcagcctgtttggggacacctatgagacccaggtaatgtagtcctggggcatccggggcatcctcycacagcagcyctggaaaatgggaaccagtctctctctcactgcctctctctctctytcwcacacacacwmacwcacacacacacacacacacacatttcagaggttgtagacatgagcataggcctttgtgctccctccctgacgcagaaggcgatggctctgctccgagtgaagtctgtggaggctacatggtcccaagcaattttatgatctgaattcactttcagagttggaggttcccccactcactggcagcttcctgagggtctgcagttttcccctcrctaggaattcctgaaccttcagccagtcacasccttggaagccaaaagggagagagttgtttgggagtgagggttgggtggagagagggattcaaacaaggctgactttctttcattccacatttattaaatgcctgttatgtttcaggctttagtgggagagtaggatagagttgctaccttaaagaatgtatagtttgttaaagagatggacaagttaatcaacaattgccacaatcatgtgataaagtatcagatagaaaagctataggaagctatagaaggataaaggaggaacccactctgaaagggaagtcaaggaaggcttcctggaggaggtgacatgcacattgcattttaaagctagtgtaggagtttgtaaaagaaagaaagggaggtggagagagcattctaggtgagggagaagcatgagcatgagctgtttcaggcttgaaacagcctggcactgggagcagccgaagttggccagaggcggggcttgggggtgggggtacaagtgtgactggtggactgtggagcagcaggcagggcccaggtcctggtaggtctgctgggctaggcaaggtgggaggacttgtcctaaagacaacagccctccaccaaagtattgaagcaggggagtgacaggccagagtggtgtttctgtaccaygtgtgggracaaggctgggagggcaagagtggtgcagggagacctgtgttcacttgtgctttacggcttgccactggcacatcccatgggctttgaatgagtcaatctgtgcagggatgctcatggccacaggcttcccgtagaggcctggcctgctgctcttgggtaccagggacgtcctgagcttacacagggctgcgagaacatgcgcacatgtcacagcagtaccactcagccctgcaccccacctctgcaataccctgctcttacctgcttcagtttacattaatgaatatgcaccctctccagggcatcagcagcacggccctgcacagtagctgtgtgcttccaggctggtgcatgtcagagagccctcagcctcaccttccttgtcccctcctcctcctgaggccagactcataacctctctcagagaaagggaggtggcaccctctgggaagctgatggaaatgcgtccctcatgtgccctggtgagcatgccttcgcatgagcacacatcagagggaccacgggtgcactgcacgtgaaaggcaggcatgtgtgatcccaaatacctgttgcagcggcgggcacagggaggcctgcagcccaggcagccctcctctccaagtcctggtctctgctcagcacatggtgatggggctgtttcatgggccccaaccctgctccaagcaggcctggtgtctgggggccaggttcaagaccatctcccatgtggggcaagaagcaccagaagtttctgtttcacctcccaccaggtgatcgcctatgggcaaggcagcagcgaaggcctgagacagaatgtggacgtgtggctgtggcagctggcaagtggggcccagggacagggttgcagaaccccctgccagagggcatcagcccgctcctcggccctgggctcccacayggggcccactcttggggccttggggcccaggcagactcagacattcacccaggtgatgaggcccaasagtctccatttgattctcctgctcctcttctccaggagsgctcctcggtggtgacaatggggggacggcgcctgagcctggcccctgatgacagcctcctggtgctagctgggacctcgtgagtacgcagggagggctttccctgggatcctcagggtccaactctgtgtgatccctgctcatctgtgtgtccacaggtatgcctgggagcgaacacaaggctctgtggccctgtctgtgacccaggaccctgcctgcaagaagcccctggggtgaccctcttgccatggcctgaagcagccacaggtgtgccaagcaccctcgagtgccatccctgccaaacaactstcccagcccccactacctctmtgtgtactgccgctgtgtcccccacakacctgcacattgttgtcacccaccctcytgcccttctcagcccagatgccatgcccctgggygggcagcagctccccatcttctctgrcagactcagcccactgccttgccagtcttgccaggtggtctacccccggccccgctcctgcccattcctctgtccctgcagactcagtgcagcacttccacaccaagaaggccctcaataaaggcttcctgaggaacgcacacctgggggtctgccgcaggcagtcatcactggccttcccatgtgccccccaggaccatgtggtgtgtctggggcatcagggcaccaggtgaccatggacgtgttggagggtctgttattgggcatccctgtttgtggatgggcattcttcactgtgtgtgtgacttgatccacgcatgctccatgcctggtcctgggagcacggctaatgtcatctctccacttccttctctgttctcatttattctttttactttttttttttttttgaaacaggatctcactgtcaccaaggctggagtgcagtggtgtgatcagagctcactgcagccttgaccctcctggctcaagtgattctcccacctcagccttctgagtagctgggactacaggcatgcaccaccacaccctgttaattttttttttcttttttgtagagatggggatttcaccatgttgcccagtctgtctttttacataactttaaaacactagcatctgttgagtttttttccaataacagaagtcatctgtgctaactatagaaaacccagaaatacacaaaatcccccacccagagctaaccactgttaatacctaaagactatgatcagcctggagaggggcatgaagttgtaccaggagctcagcagtgttggtgggggtgtctggccttgtgtccccttccctcccctgtcatgcacaggtgccctgttcaaagactccagagggacccctgagcctgctatgggtgtctagggatgctggaggcctcagaggcaccagtgggaagagacaagaatgtggaacctgcagcgggcgcagctcagtttcctgggacttccgtgagaagtcaatgagggcatgcacatgagagtgacagatctggacagaacaggtccctgcgtggactcaaagcttcctctagaaaagaacacttgacccctgtctccctcatccccagcccagtggctcactgccttcctacactccactgggagcagagaaagacctgcctttgctgaaaaggctactggccctaagagacatcgggaccttcaacctcctcgtcacccctaagggctttcctctcctgcaagcaaagaaaaaacaccatcaggctccttcaaacacaaatggtccaggataggcacaggcagaggctccacgcggctcgttcctggcctgtagcaatgcactgctccgtgcaggacctgagaagaagacatagaatgttccagggaggacccaggtcagaataccgatggccgtgaagagaagagtttactctcatatgcagggcaagcttaatccagagagaaagtcatgaaaattagatctgtttttgtgaacactcgctctgtcccaaggaatcccctagaagttttttttttttttttttttttttttttttttgagacggagtctcactctgttgcccaggctggagtgcagtggcgcgatctcagctcactgcaagctccgcctcccaggttcacgccattctcctgcctcagcctcccgagtagctgggactacaggcacctgccaccacgcccggctactttttttgtatttttagtagagacggggtttcaccgtgttagccaggatggtctcgatctcctgacctcgtgatctgcccgcctcggcctcccaaagtgctgggattacaggcttaagccactgtgcctggcctataagtttttacataaattatctcattttatcctcacaactctccaagaaggtggtagtgcctgattttacagatcaggctcagagaggtttggaaatagggcagctctgtttccaacccaggcctgtctgcatatggagcttaggctgggcctcaccaccctgcttctcccagggatgtttgccctcagccttgaccaaatgggagcccagggcagccaagagaggccaggggccactgtgcctgggacacagaggccaggccacacatggcagactgctgaccccagccagttggcagtgatggggtcaggccctggagcctggaaccagcacctcccttggccctgctgtcccgggttatcaggagcctgaagccctcatctccacccacaggaccagcccatgggctcatgagaatacctcaccatgggacagctggacttgtaccttgtctggagctagccccagcctcccactccctattccgcagtgaatgctaatgggggcagggagtggagtggacaaggagccatggggagacacagacagggaaaaatcaggattgttctatttgcgggagaagcccccagctccccgtgccatggcagtagaaatttggcaggggcgtccccgtccatggggcctacttcaccgtgtacccggacttgggaccatcacagacttcggaaccatcaggaacctgggagcaactgaaagctgaactacagtgggctttcagacacacagcaggctggcggagcacaaataggactggttccctccaggccaccagcagggcggtggaggtcttcactgactccctgcctacctctcaggacaatgtccttttggctccacagtccctgaagccagagctggtgggggcagggaggcagccaccagcctctatatgtagtggaggagggggtgtccagggagggctgcatgatcctgagagcccccacctcacccggctggactatcctcccacttcagggtttctctgggcttccatcttgcccctgctgagccctgcttcctcctctaccagcagcacaacccccaggctgggctcagagacctcatgtggtgggatcactcagtaccccgaggcggagggaaggagggagggctgcagggttccccttggcctgcaaacaggaacacagggtgtttctcagtggctgcgagaatgctgatgaaaaccccaggatgttgtgtcaccgtggtggccagctgatagtgccaatcatcccactttgccctgagcactcctgcaggggtagaagactccagaaccttctctcaggcccatggcccaagcagcccatggaacttcataacctgagctctccatctccctctctctcctcctctgttctccctccctccttctctccctcaccctcctctgctccctctgcctttaccactgtgggggggtcctctggagggccctgccaccccacctcttcctcgctggtgtctgccttcctggcaccaatcctggccctggagtttgtcctgggcctggtggggaacagtttggccctcttcatcttctgcatccacacgcggccctggacctccaacacggtgttcctggtcagcctggtggccgctgacttcctcctgatcagcaacctgcccctccgcgtggactactacctcctccatgagacctggcgctttggggctgctgcctgcaaagtcaacctcttcatgctgtccaccaaccgcacggccagcgttgtcttcctcacagccatcgcactcaaccgctacctgaaggtggtgcagccccaccacgtgctgagccgtgcttccgtgggggcagctgcccgggtggccgggggactctgggtgggcatcctgctcctcaacgggcacctgctcctgagcaccttctccggcccctcctgcctcagctacagggtgggcacgaagccctcggcctcgctccgctggcaccaggcactgtacctgctggagttcttcctgccactggcgctcatcctctttgctattgtgagcattgggctcaccatccggaaccgtggtctgggcgggcaggcaggcccgcagagggccatgcgtgtgctggccatggtggtggccgtctacaccatctgcttcttgcccagcatcatctttggcatggcttccatggtggctttctggctgtccgcctgccgctccctggacctctgcacacagctcttccatggctccctggccttcacctacctcaacagtgtcctggaccccgtgctctactgcttctctagccccaacttcctccaccagagccgggccttgctgggcctcacgcggggccggcagggcccagtgagcgacgagagctcctaccaaccctccaggcagtggcgctaccgggaggcctctaggaaggcggaggccatagggaaggtgaaagtgcagggcgaggtctctctggaaaaggaaggctcctcccagggctgagggccagctgcagggctgcagcgctgtgggggtaaggtctgccgcgctctggcatggagggacaaggccagcacacggtgcctcaaccaactggacaagggatggcggcagaccaggggccaggccaaagcactggcaggactcaggtgggtggcagggagagaaacccacctaggcctctcagtgtgtccaggatggcattcccagaatgcaggggagagcaggatgccgggtggaggagacaggcaaggtgccgttggcacaccagctcagacaggggcctgcgcagctgcaggggacagasgccaatcactgtcacagcagagtcaccttagaaattggacagctgcatgttctgtgctctccagtttgtcccttccaatattaataaacttcccttttaaatatatttatttgcaagaccaaatatctgtctttaattctaacctgggactatcagtaggcgtcaaagtgagcgccccaaggtgaagggaaacttgggagagagtggggaagccatcccacagccccatcccagggggcactgtccttcccagaacttctgggaagccccggcatgtcctgaaaggcagaactgctttcctgggtgaggcctcaggcaggccaccagggctccaggccctcgggtacagagtttgatgctggggacctaacatccctccccagttccctcaatccacttagcccagccctctcatatcatggacaggacgcaccccagctactaaagtcgtcaggaatagaagtgaaagcccagaagtgtcacacacagaccaggagggtggcatcaagggtccatgtggatgctggggagggagcgagagaaaaagtatcaggcagagggaggtgggcccgggaaggatgagcgggtgagtaccagaccccgcctccaccgtgtatctccagcccacttccctgttctgaaaatctacctgctgcactcagaaacctaccaaggtactggggtgccacctgggccccccccagggttgctcttctgtctctcggctccccatgggcccctcttgccccctcaactcctactgctcccttttactccctggagccacgcctagggggtccctgcttctccacgccctctgtcaccacagggaagggagtccaaccctgggcggggccacctcagcctgagtcaggtcttttaggaaaggcctgcacactcctggaggatggggactgagcagctccttcgggtggatccccacctggggcgccaacacttaccgccagctcaacaccaggcacctttcctctggtaccatctctgcccctgaatgcgcccacctgggctcagggcagctccacgggccatttcctcaatctcctcttccctggacccttctcctaccaactcctccctcaagtcctcgcacctctcccagcacctgccctcactccttcatgacctgatggaagggaaatggacagatactcccatggtttgcaggcatgtctgcagtcctgtcttttcccatcaagggagagagcagaggctgcccttgaggagttcctgggtagatgctggtcacagggttcaggcccgcactcctaacctgccctggattctccttgctccccatcttgaccctgaggactgcttcctcactgacagtctgggtcacaccacccttccccgcctttccatcatttgcaaggccttctctaaacggggttgggtgctccctcgcgaagcaggcttcaggctgccgccacatggaggtaggactgactccctggtccgaactatggccccagcccactgtacccttctctggacttagttctccatctgtgaataggaatagtaatcctggcccttgcccagctccaggggctggggatgggagtaactatatgcccagagcacttggtg

SEQ ID NO: 93311 - DNA, 98295 bp, Homo sapiens
ccgaagttacagttaatctctttgtcatcaaggagcacccgatgtaaaaatgggagtcagagaaaaagtaaagctaaattttctagaagtttgtaaagaatgcaggggatggcagggtcagttctacctgtagatgcagaaaaggcttcataaaagaggagatgtttaaaaagatgagtgggtagatatttaccaaaaggacaaggatgagaaaatcattccaactgagagtagcacggcagcagtgagtaagaaagaaaacactgaagaggacgggcaggctgtttttagaagtaggggagagagagagaggaagagagatagagggaaaacactaactttctgacactcacacaaccactacaattcagcttaccactattgaccctctattgatatgtttatatcttgctgcaaacatttattatatgttgtctttctttatatcttctcaaaaatctgggagtatacttttgtctttttttctttttttttatactttaagttttggggtacatgtgcagaatgtgcagatttgttacctaggtatacacgtgccatggtggtttgctgcacccatcaacccatcatctacattaggtatttctcctaatgctatccctcccctatctccccacctcttgacaggccctggtgtgtgatgttcccctccctgtgtccatgtgttgtaattgttcaattcccacttatgagtgagaacgtgtggtgtttggtttcctgttcttgtgttaattttctgagaatgatggtttccagcttcatccatgcccctgcaaaggacatgaactcatccttttttattgcatagtattccatggtgtatatgtgccatgttttctttatccagtctgtcattgatgggcatttgggttggttccaatacttttttttaatacgtctttaggaaagggaaaataactggctacagtcacaatgtgtcaccatctctgtctccaattggagaagcaatcccttatatgaataaccagtttcggttctgtgaagtccaatgcagtttttatgcctggggcctattcagaatgggaggcacaaaaaaacctaagatatttctaagctttagcaacagatattcctaacctagggtacagtgatttttaaagaccctgaagttgttcaaacctataaactaaaaatttttacctctagaaatatattctaaagaaataataagatatatgtgcaaatatttagctaaaataacttttattatataatttgttctagtataacagagctgaaaactaaatgaatgttaaataactaaagagtatttgaagaaattatggtactaaaaatggaataccagtaagtcattataatgatatcaaagaattccatttctaataatgtatagttgattgcagcagccctgcggaaaaaaaaccccagaaatttaggtaaagaaacccttttatggcaacaaaggctaccaatatagcatcagaaacctataaaggcaatgaggacttcaagagtaatgatctcagaaaaaagggaagtgcaaagaggtgagtcttacattgtatacaagtttgtcacttaaggaatttaatgatttgtaagctgataatttggaattctgaacttactgaaatagtacatcaaaaatgaaggcaaaataaatacatgttcagaaatcagtgctgagtaaattgatcaccagtacacccacactgaggaaatactgaaaggttctcctctgaaactgaagagatgcaagaagcgaacagtaatagaaaggataaatatgtgggtaaacagacatattgacaatgtaaaacaataataataatatgttttgtgtaatttatatgtagaattaaaatataggaaacaagtgagtgcaagagatttggggactgatcaagaaaaatatatactaccacacgttttcagtaacacacaatgagtttttgttgtttgtctgttttagaatttcaacttttattttagattctggggatacatacacaggtttgttatatgggtatattgcatgatgctgaggtttggaaaacagatgatctcatcacccaggtagtgagcataatactcaacagtttttcaacccatgaccccctttcttcttcccccttctaatagtcctccagtgtctgtttttgccacctttatgttgatgagtacccaatctttagctccaacttataaatgagaacatatggtatttggttttctgtttctgtgtaaattcgcttaggataatggccttcagctgcatccatgttgctgcaaaggacattatttcattagtttttatggctgtgttgtattccatggtatatatgtaccacattttctttagcaaatatcagtgatagacacctaagttgactccatgtcattgctcttgttaataaggctgcaaacaactatgagtgtatgtgtctttttggttgaatgatttcttttcttctggatatatgcccgataatgtgattactgaattgaatggtagttgtgttttatgttctttgagaaatctccaaactgctttctatagtggttgaactatatatagtgtttattattactaatttacattcccaccaacagtgtataagcatacgaatttcatttggtcaaccctttgacaggtttgcaagggcatggggttaatcaaagtctgagatcttccagaggctggtgggaggtcacaacctagaaaatgagaggacaagctaactggagagagggaggggaatcaaagagatggcttatacatgtagcgatgtctctcagcagcaagacagggagttgctgggtcagagatctctgaagggcagcagtaggttagggtttttatctcctggagtttatcctatctatagctaacagatgattgtagtttcacagggacatgcaaagaaggcagcctctaaatggctaacaatctacttattggtctatatttaaaacaattgatgtgtaaaaaattgagtttggtactggcagaatcaatatatagagactatctttggctcatgcatataacagtccatcccctggcccaatgttgtcttataattaaaattgtatgttattttgcagtgcctaagtttcttgccagaaataaaggagacagaatcctataagggtacaaacaaggatttcaaaaccctttcatagccaatctgcccacgtaatggaggaaagccaggggaatcgattagaaaaaggagcagattttaatttgttcaattgttcagtcagtagagtgacattataacccctttgctacatgttcctgtctatccataatgctagaatcagattggcagaagcaagtccaacatgcagttaaatttgtcattatatgtgtttctgtgacttaagatatctgcaggtttaggcaaatgaatgttcctccttatttggattggtgtgccttgcttgagtttccgggtgattgccagtagtaaatagcatcagaatgtttgcatgggtctagagtaagcttcacagtatctcttggcagtttttaaaaagttattaatttatacatgcaccaaatttgattctgaactgtggagtactcacatatgtgatcctcaaaggtagggcaaattatttcaaaaataaccatcaatcatattataaatttggcctatttatttccctgtttatgatgatgttgttctaattttagtgggaggccacctgttccatcatttttattccagggaaacttttctagggagtccatttgtatagctcgaataagttcaagggtgacctctttagaggtggcaatgtgatgtcaccaataagtttcttcccaggttagctttgatatcaggcttctcattattgtttctatctcctgtatggtgggatgtatactgaaagattgaatgtacaaatggacaatggttggaccatatataaaaagtagaacagtgacccgcaaccttcaacaacttgcctaggaaaccaacccacttaactacagtaagcagcccagagcattagcctgctataagtcagacttgtaggatgtcaaatttttatctttagtaacaattcaaggaaataaacaataatttctataacaatcagcccaaaatggccaggacttgattaataactgactaccttcttaattcttgtctctgcatccaacttagatccaaccagagaaagccaagtatgcacctctaactaatcgcataggatgatccacttctagttagcctgcctacatcttccccatgccaataatctctattcagtgtgtagctgtagccttattttttcgcgctacaaactttctcactgttttgctcaccattgagtctctgccaaaacacagatgacaatagttgactcccttactatagcaagctctgaatagcctttgcttttcacatttgggtggtctttgttgttcccacagtatactatttgggatactccagaaaagtaacattggtcataaatcttcctcaaatatttcccaagactttattaatggcagttttggcagaccctgcaaaatttctaataaatacaagcaagtagttatcaatttgtgtagagaaactaccatgcagagagcagttggagttctccatgggatcaaacatgtttttagtaggaattgtctttgctgtaaccctcaagagctacgattatttaccatggacagccagtcttgcaattgttgtagagccagcttccattgagtgttatgtaaaacttgcagttggtattgtaagaaggttactatagaagaattcttaagctgattatagtccctgatttatcagatgtgccttggcccaggtaatattacatagtaaatattgctttacttgtttaaattaatcggccaccagagaggaaatccatagtaagatgcccctggccacttagtacaatattttcatagctcttgagggtaacagcaaagacaattcctactaaaaacatatttgatcccatgaagaactctaactgctctctaaataggagtttctctacccaaattgacaactacttgcttatatttattagaaattttgcaaatatttaaaaaataccaaaattgccatgaataaacgcttgagaaatatttgggaaaaatttctgcccaatgttatttttctggggtatcccaaataatatactgttggaataacaaaaaccacccaaatgtggaaagcaaaggctatttattaataagttgtacacagagtctcaataaatggggtttgtactagaggggagcaagaacatcataattaataagaaaagacaccaatagttgtaaggacttatattgtttacatttatcatcatcccagggattattacaaagtataattttgttttggcaatcctttagtgtttgttgttattgtcttgaaatacagcatttctaatttgattacataaatcacaagtatcttggttataataatgggtacatactgtctctgggcattccttaaatggaactcaaaaggtcatggcccattgatctatttactcaatggcagtagttaataatagtgagttttgtctaatttgaagaaaatgatggtacatagggcttagaaagcatttgtacgggtcacaagtggtatcttagagtctggcttagccatactgagtgctgctaagagtagcagagaaaagatggggagtgctaacttcagaggtgatgtctgtggttatgttagtaggattggacaacctaaatagttaattgtgtggttcccattgttcccaaactgacccatgttgtgtgtctccctgtgatgaacctgtggcatgttgtttccaaacataccttgtcagcagtagggtatagattatcagagatagggtgatccagcaattgatgtgtagccaacactggtgagcatagtaacttcttaagcaaggacagcaccgcaaaaatggagtaaaattagaggttatctccaaccagaagtatgagatctggttgttccctgggtatcaccaatgatgttacccagtccatggagattagttccaccttctgggtgttgggagtagttccaggtttgtttcacagtgcctttagtggggcaaagtacatggatgacagataagggcacctctaactccagatagttgtggatggtttgctcaacttatttgaagagatgagtgaatgcagactgaggatgattccagagtaagtggtccacagtgaggggaaagtggctagggtctggttttctatgaggaagaagtgcaaggtaaaagtaccatatgggtgtttctttgttgtaggtggcaatttatgggctctcatgtttatgaaaactggtaataggttgtgtttggtgtgagtatgtacaccaacagaggtcacaacatctctgttggcggtctcctcatttgttgtaaatttcagtgtagtgtagttaagccatataatcagggctacaggtactatttttgaccactggggggaccattgttctccasgttgtttcattttttttctttttattatactttaagttctaggtacatgtgcacaatgtgcaggttagttacatatgtatacatgtgccatgttggggtgctgcacccattaactcatcatttaacattaggtgtacctccaaatgctatccctccaccctccccccaccccacaacaggccccggtgtgtcatgttccccttcctgtgtccatgtcttctcattgtggttttgatttgcatttctctgatggccagtgatgatgaacattttttcatgtcttttgactgcataaatgtcttcttttgagaagtgtctgttcatatccttcacccactttttgatggggttgtttgtttttttcttgtaaatgtgtttgagttcattgcagattctggatgttagccctttgtcagatgagtagattgcaaaaattttctcccattttgtaggttgcctgttcactctgatggtaatttcttttgcagtgcagaagctctttagtttatttagatcccatttgtaaattttggcttttgttgctactgcttttggtgttttagacatgaagttcttacccatgcctatgtcctgaatggtattgcctaggttttcttctaaggtttttatggttgtaggtctaatatttaagtctttaatccatctagaattaatttttgtgtaaggtgtaaggaagggatccagtttcagctttctccatatggctagccagttttcccagcaccatttattaaatagggaatcctttccacatttcttgtttttgtcaggtttgtcaaagatcagatagttgtagatatgcagcattatttctgagggctctgttctgttccattggtctgtacctctgttttggtaccagtaccatgctgttttggttactgtagtcttgtagtatagcttgaagtcaggtagcgtgatgcctccagctttgttcttttggcttaggattgacttggcaatgtgagctcttttttggttccatatgagctttaaagtagttttttccaattctgtgaagaaagtaatttgtagcttgatggtgatggcattgaatctataaattaccttgggcagtatggccattttcacgatattgactctttctacacatgagcatggaatattcttccatttgtttgtatcttcttttatttcattgagcagtggtttgtagttctccttgaagagttccttcacatcccttgtaagttggattcctaggtattttattcttttgaagcaattgtgaatgggagttcactcatgatttggctctctgtttgtctgttattggtgtataagaatgcttgtgatttttacacattgattttgtgtcctgagactttgctgaagttgcctatcagcttaaggagattttgggctcaaatgatgggggtttctagatatacaatcatgtcatctgcaaacagggacaatttgacttcctcttttcctaattgaatacattttatttccttctcctgcctgactgccctggccagaacatccaacactatgttgaataggagtggtgagagagggcatccctgtcttgtgccagttttcaaagggaatgcttccagtttttgtccattcagtacgatattggctgtgggtttgtcatagatagctcttattattttgagatatgtcccatcaataccttatttattgagagtttttagcatgaaggggtgttgaattttgtcaaaggccttttctgcatctattgagataattatgtggtttttgtcattggttctatttatatgctggattatgtttattgatttgcatatgttgaaccagccttgcatcccagggatgaagcccacttgatcatggtggataagctttttgatgtgctgctggattcggtttgccagtattttattgaggatttttgcatcaatgttcatcagggatattggtctaaaattctctttttttgttgtgtctcttccaggctttgatatcaggatgatgctggcctcataaagtgagttagggaggattccctctttttctattgattgaaatagtttcagaaggaatggtgccagctcctccttgtacctctggtagaattcggctgtgaatccatctggtcctggactttttttggttggtaagctattaattattgcctcaatttcagagcctgttattggtctattcagagatccaacttcttcctagtttagtcttaggagggtgtatgtgtcgaggaatttatccatttcttctagattttctagtttatttgcatagaggtgtttgtagtattctctgatggtagtttttatttctgtgggatcggtggtgatatccccttgtcattttttattgcgtctctttgattcttctctcttttcttctttattagtcttgctagcggtctatcaatgttgttgatcttttcaaaaaactagctcctggattcattaattttttgaagggttttttacatctctatttccttcggttctgctctgatcttagttatttcttgccttctgctagcttttgaatgtgtttgctcttgcttctctggttcatttaattgtgatgttagggtgtcaactttagatctttcctgctttctcttgtgggcatttactgctacaaatttccctctacacactgctttgaatgtgtcccagagattctgttatgttgtgtcttttttctcgttggtttcaaaggacatctttatttctgccttcatttcgttatgtacccagtagtcaatcaggagcaggttgttcagtttccatgtaattgagcagttttgagtgagtttcttaatcctgagttctagtttgatttcagtgtggtctgaaatacagtttgttataatttctgttcttttacatttgctgaggagtgctttacttccaactatgtggtcaattttggaataggtgtggtgtggtgctgtaaagaatgtatattctgttgatttggggtggcgagctctgtaggtgtctattaggtctgcttggtgcagagctgagttcagtttctggatatccttgttaactttctgtctcgttgatctgtctaatattgacagtggggtgttaaagtctcccattattattgtgtgggagtctaagtctcttttgtaggtctccaaggacttgctttatgaatctgggtgctcctgtattgggtgcatatagatttaggatagttagctcttcttgttgaattgatccctttaccattatgtaatggccttctttgtctcttttgatctttgttggtttaaagtctgttttatcagagactaggattgcaacccctgcctttttttgttttccatttgcttggtagatcttcctccatcactttattttcagcctatgtgtgtctccgcacgtgagatgggtttcctgaatacagcacactgatgagtcttgactctttatccaatttgccagtctgtgtcttttaaatggagcatttaccccatttacctttaaggttaatattgttatgtgtgaatttgatcctgtcattatgatattagctggttattttgctcgttagttgatgcggtttcttcctagcctcaatggtctttacaatttgtcatgtttttgcagtggctggtaccggttgttcctttccatgtttagtgcttccttcaagagctcttttagggcaggcctggtggtgacaaaatctctcagcatttgcttgtctgtaaagtatttgatttctccttcacttatgaagcttagtttggctggatatgaaattctgggttgaaaattcttttctttaagaatgttgaatattggcccccactctcttctggcttgtagagtttctgccgagagatccactgttagtctcatgggcttccctttgtgggtaacccgacctttctctttggctgcccttaacatttttttccttcgtttcaactttggtgaaactgacaattatgtgtctcggagttgctcttcttgaggagagtctttgtggccctctgcgtatttcctgaatctgaatgttggtctgccttgctagattgaggaagttctcctgggtaatatcctgtagagtgctttccaacttggttccattctccccgtcactttcaggtacaccaatcagatgtagatttggtcttttcacatagtcctatatttcttggaggttttgttcatttctttttattcttttttctctaaagttctcttctcacttcatttcactcatttgatcttccatcactgataccctttcttccagttgatcaaatcgtctactgaggcttgtgcattcatcatgtagttctcgtgccgtggttttcagctccatcaggtcctttaaggacttctctgcattggttattctagtgagccttttgtctaaactttttcaaggtttttaacttctttgccatgggtttgaacttcctcctttagcttggagtagtttgatcatcggaagccttcttttctcaactcgtcaaagtcattctccatccagctttgttccattgctggtgaagagctgcattcttttggaggaggagaggtgctctgatttttggagtttccaatttttctgctctgttttttccccatctttgtggttttatctacctttgttctttgatgatggtgatgtacagatggggtatggttgtggatgtcctttctgtttgttagttttccttctaacagtcagaaccctcagctgcagacgtgttggagtttgccggaggtccactccagaccctgtttgcctgggtatcagcagcagaggctgcagaacagctgatattggtgaacagcaaatgttgctgcctgatcgttcctctggaattggggtcagggacccatttgaggaggcagtctgtccgttctcagatctccagctgcgtcctgggagaacaactattctcttcaccgctgtcagacagggacatttaagtctgcagaggtttctgctgccttttgtttggctatgccctgcccccagaggtggagtctacagaggcaggcaggcctccttgagctgcagtggggtccaccaagttcgagcttcctggccaatttgtttacctactgaagcctcggcaatggcgggcacccctcccccagcctcgctgccgccttgcagtttgatctcagactgctttgctaacaatgagtgagtctctgtgggcgtaggaccctccaagccaagcgtgggatataatctcctggtgtgccatttgctaagaccattggaaaagcacagtattagtgtgggagtgacccgattttccaggtgccctctgtcacccctttctttgactaggaaagggaattccctgattccttgcacttcctggttaaggtgatgccttgccctacttcggctcatgctcagtgcactgcacccactgttctgcacccactgtctgacactcaccagtgagatgaccccggtacctcagttggaaatgcagaaatcacccatcttctctgttgttcatgctgggagctgtagactggagctgtttctatttggccatcttggctccaccctcccgttgtatcattcttatgcttttgcatcatcatagctttgctcccacttatgagagagaacatttaatgtttggtttttcattcctgagttacttcacttagaataatagtctccaattccatccaggttgctgcaaatgccattaattcattcttttttatggctgtgtagtattcaattgwatatatatatatatatatatatatatatatatatatgacagtttctttatccactcattgattggtgggcatttgggctggttccatgttttttcaattgcaaattgtactgctataaacatgcatgtggaagtatctttcttgtataatggctgattttcctgtgggtagatacctagtagggggattgctgtatcaaatggtacttctacttttagttctttaaggaatcttcacactgtatcccatagtgtttgtactagtttacattcccagcagcaatgtagaagtgttccctttccactgcatctatgccaatatctattatttttttattttttcattatggccattcttgttggagtaaggtggtatcacattatggttttaatttgcatttccctsatcattagtgatgtttttaagccaatgtctagaagggtccttctgatgttgtcttctagaatttttatattttcaagtcatagatttaagtccttgatccgtcttcagatgatttttgtatagcatttgcttttgggtccctggtcatgaaatctttttctaagccaatgtctacaagggtctttctgatgttatcttccataatttttatattttcaagtcatagatttaagttcttgattcatcttgagttgatttttgtataaggtgagagatgaggatccagttttattcttctatatgtggcttgctaattatcttggaataattttttaaatagggtgtcttttttccacttagcttttttttttcttttttttttggtttcctgaagatcagtttggctgtaagtatttaggtttatttctgggttctctattctgtttcagtgatctatgtgcttatttttataccagtcccattttgtttcattggtctatgtgcttatttttatrccagtcccatgctgtttgggtgactatggactaatagtgtagtttgaagtcaggtagtgtgatgcctgcagatttgttctttttgcttagtcttccctttgctatgcaggctctttttctggttccatgtgatttttaggattgttttttctagttctgtgaagaatgatggtggtattttgatgggaattacattgaattcatagactgcttttggcagtatggtcattttcacaatattgattctacctatccatgggcataggatgtgtttccatttatttgtgtcatctattatttctttcagcagtgttttgtagtttttcttgtagaggtctttcacctccttcgttaggtgaattcttaagtattttattctttggcagctactgtaaaaggggttgagttcttgatttgattctcagcttcatcgctgttgtatatagcagagctactgatttttatacattaattttctgtcctgaaactttgatgaattcatttatcagttctaggagctttttgatgagtctttagagttttctaggtatacaattatgtcatcagtaaacagcaacagtttgactttctctttacctatttggatgtcctttatttctttttcttgtttgattgttctggctaggacttccagtactatgttgaatagaagtggtgagagtgggcatccttgtcttgttccgtttctgaaagggaatgctttctacttttccccattcaatattatgttggctgtgggtttgtcatagatgacttttattacactgaagtatgtcctttgtatgccgacttttttgaggattttaaccgcaaatgtatgctaagatttgtcaaatgctttttctccatctatggagatgattatgtaattttttaaattctgtttatgtggtgtatcacatttattgacttgcatatgttaaaccatccctgcatccctggtgtgaaactctcttgatcatggtggattatatttttgatatgctgttagattcrtttagctagtgttttgttaagsatttttgcatctgtgtttatcaggggtactggtttgtcatttttttttgttatgtccttcactgcttttggtattagggtgatgctggcttcatagaatgatttagggaggatttcctctttctctatcatgtggaatagtgtcaataggattggtaccactccttctttgagtctctggaagaattcagctgtgaattcatctggttctggacctttttttgttggtaatttttaaaaaaatgttcttgagacagagtttcactcttttattttttattttattattgttatcattattttgagatggagcctcaatctgtcacccaggctggagtgcagtggtgtgatcttggctcactgcaacctctgcctcctgggttcaaatgattatcctgcctcagcctcccaagtggctgggatgacaggtgcacaccaccatgcccagctaatttttgtatttttagtagagacggggtttctccatgttgctcaggctgattttgaactcccgacatcaggtgatctgcccacctcggcctcccaaagtgctgggattacaggtgtgagccactgcacctggcccagagtttcactcttgttgtccaggctggagtgcagtggtgtgatctgggttcactgcaacctccaactcccgaattcaagcaattcttctgcctcagtcttccaagtagctgggattacaggcatgcaccaccacacctggctaattttgtattatccttgagatggggtttcaacatgttggccaggctggtctcgaactcctgacctcaggttatccactcaactatgcctcccaaagtgctgaggttacagatgtgagccaccatacccagcctgttggtaatttcttaattaccagttcaatctggctgcttgttattggtctgttcaggatttctaattcttyctgatttaagctagaaggattgtattttttcaggaatttattcatctcctctaggtattctagtttatgcacataaaggtgttcatagtagcctttagtgatcttttgtatttctgtggtgttggttgtaatatctcccattttgtttctaattgagcttattttaatcctctctcttcttttctcggttaatttttctaatggtctatcaattttatgtattatttcaaaaaacagctttttgttttatttattttttctattttttttgtttcaatttcatttagttctgctctaatcttggttcttttctttcttctgctggattcaggttttggtttgttcttgtttctctagttccttaaggtgtgaccttagattctgtatttgttctttttcagactttttgagataggcatttaggactatgaactttccccttaggaccgcctttgctgtatcccagcaattttgataggttttgtcactattcttgttaagctcgaagaattttttaatttccatcttgatttcattgtggacccaatgatcattcagaaacaggtcatttaatttccatgtatttgcatgggtttgaaggttccttttggagtttatttccagttttattccacttcggtctgagagagcactggatataatttcaattttaaaaaatttattgagatttgttttgtgggctatcatatggtctatttcagagaaagctccatgcgctgatcaatagaatgtatattctgtggttgttgggtagaatgttctgtaaatatctgttaagtccatttgttccagggtatagtttaaatccattgtttctttgtttacttcctgctttcatgacctgtctagcactgtcagtggagtattgaagtcccccactattattgtgttgctatctcatttcttagattaagtagtaattgttttataaatttgggatctctagtattaggtgaatatatatttaggattgtgatattttcctgttggacaaggcctcttattattatataatgtccttctttgtcttttttttaaactgcttttgctttaaagtttgtttcatctaatatatgaatagctactcctgactgtctttggtgtttatttgcatggaattttttttctacctttttaccttaagtttatgtgagtccttatgtgttaggtgagtctgttgaaagcagcagatacttggttgataaattcttatccattctgccattctgtatcttttaaatgggacatttaggccatttacattcaatgttagtattgagatgtgaagtactaatacattcatcgtgctgttggttgctgtataccttggggatttttaaattgtatttttataggtcctgtgagatttatgtgttaaagaggttctgttttaatttgtttccaggatttgtttcaagagttagagctccttttagcactacaagaactgcttattgactaatttcaattggtactttcaccatgtcctagatattgcaaggatcttagaacatttaaactacattttttccacatcttaatgctattgtatcttttatataaataagccaaagatgtcctctgtgttttgctcctgttgtgtacctcttcagagcaggtcaggttccattagctcaaaaccccattggtgaaaaaaatcaaagttttatatatccagttatttcaaatataactcaaataagcatatcttaaccatttagaggctagatgctttacaggccctatgaaactacaccaaacatctgctagtcataagtaagaaaaaccctagtgcaagaagactccaagccactgctgcccttcagagctctgtaacccagagatttcccatcacgtttctgagtaacatcacctagggacataagcrgccttttaaattcccatcttccccaggacttcccttgccctttccccttctagttggttcccttcctcttccttcactgacagcctctagaacaggcttgtctaacctgtggcccatgggctgcctgcagcccaagatggctttgaatgaagcccaatacaaattcataaactttcttaaaacattatgagtttttttttagatcatcagctatcattaatgttagtgtattttatgtgtggcccaagacaattcttctgtttccaatgttgcccaaggaagtgaaaagattggacacccctgcttagaagatctcatggtataacaaacatttccttttacccctctaatctttgcacttcctgcataaaaacttggcaaagtttgcccaaataaagcttattatgtgctactaccatctcatgttcatttttttcttgatatctctaatattccctgaatctcactataagtgatggagagaaaaggggaggatttggtgatgaggttcagtcagtagaacaattatttggcaaaatgatcttggaaagacttaagtagttgggactgaaatttgagaattagttggatgtggtggctcatgcctgtagtcctcactacttgggaggctgaagcagaaggatcgcttgagcccaggagttggaagctgcaatgatccatgatcatgccactacataattcagcctgagcagcaaagtgacaccctgtttcaaaagaaaactcagaatgcctcaatattaatttgacatagcatcctcagtgctgtactgctttctatatttttatggtctttccattagcctagccaagttgtagcaccagaatatgtattaacccacactgttggaactgattttgggggatcagagacacgtagattcctgggaaggtcagcctgcctgtctgaatctcccactaggcaggcactggacattataaaacctgtaggcctaaataaaaaagggatggagtacacacctctgaataatgggctatgggtgaagaaactctctgcattagggatggtcatttgaggtactacaaggtgagaggagatccttattcctgtggacttctgtggtaggtaaacaagacaataagtctgagatgtaaggctgaggctagcctcctaagtgcaattgggaaaaaaaattttgtaaatagttagcttgcctctgctactgttgtacttggaccttctgtcccagatagcatcattctagtcctatatccccaagggatattgagcccccagtgctagggctcggccagctaaaatgttacttataataacaaaagaaatggaagtttttattgcagtccctcccaggtctccaaagaggtagatatctaactgaacagatgatccaaaggaccagatatatagtgaaatctgctagaggctccttcttaccaggacactccctggagatgaggtagaatcttgaattcctatgagagaccagatgaagaacaggactccagagaaaaagaattttattctctagagcaaaatgcagcacgttatcaccatgatagtgatgagaataatttactttctgttctgttgtaatcaacagcagagtaagaaagatagaaaaggcaaaaaaggcacaagaagagattggttctcagttggagaaataggacattatctctctcactgtgaggcccaatctttccttaataactttggagtcaagttaaaaagtggctgcctggttatagggaatgtatccggtgaggagcaagcttcaccaatgggagcttaaatttaatgattcattgccatagtaaagaatggaaaagtggtttccttactaataaatcctgcacagttattgtgagaagtggaaatgactcacagagatttttaaccccaatctgcatacaacttgttgatgtggatttttttcttttttcgtgtgtgtgtgtgtgtgtgtgtgtgtgtgtgtgtgtttgtgtgtgtgtgtggtaagaacacaatctattttctcagcaatttttaagaatacaatacattgttattaactatagtcaccacattgtacagtagatttcacaaacttattcctcctgactgaattttatatccatagagcaacgtctccccaatctccctccccgcttcagcccctggcaatcaccattctactttctacttctatgcattcaactgatgaaaaatttaaggcttatagggctgttcatcttgccttagtcctcataccattaggctggtcaaactgtcaatataaatcattagctaaggcaaaagatttcctccaccagctgggtttaaatgggcttatcagataacagatggcatgaagcatgaggtcatggcaaatctggaggaggctgaattgagtcctgagtccattcagttgtttttttgtttgtttgttttttggtgagggtgcttctgacaagtataagctctctttactggcaatcatggctaatactgaaacaattcaacaggcaatggatgccctgaatttgatagaaactcatgaaaggcaaactcagagtcaactgttgcctgttaattctccaaacagtaccccaattggcctaaatcaaaatttctgtaaacagtgtggttatctcactcttaggtcaaacaaaacaactgtagtcaggcctccacttaagcatgaacctcgagatgaataaaagaggttatagagatccttaaggaacaaagggggacccaaattggaagaactctgataaatgaacaattacagtacctgttagggttagtggacaatcttcagcaggcttctccttcagatgcagtcttaactttcaggcctgcctctaatttccacctgtggcagggttctgcccacatgaaaattcagtggtagatgaagtaggacttttccaacacaaagtagtttgagtgccagaaaatataaaatatcagaggtgcttcctggagccttggacccaatggactggtaaatatacacccataggtttttggtataagtggctagatctgttggacaggggtacgcaaatctccctaatcccagaaagtatccatgctttaaaggaacgccctcacgggatgactggctttggaggaggataataaattgggtaattacctgcttaactattaaaattggaatggacatcctcaggaagcaggtaacctcatggaaaaatgatttttgctattgatggacactgactgatagaattcagctaaccttgccctattggtattggtggtaaacatgccacagtactggataaggcaagacactgaagcatagaatccctcatagacaacttaactaaaaaaaggagtattaattcctactacctcacttgtcaagttttcatgatggcctgtgcttaaagtcactacatggtggtgggtaactgtagactatagagatttaacaaggctgtttcctttattagagtacttctaccagatattgtcaccttaatgaatgccattcaaaagaacacgtgtaaatagtttggagttatagacttgacttacatgttctatttagtaaaaatttcaaagagtcaaccacagcttctcttcaaatttgaaggtcaacagtacacattttcctaatttcttatggaaaactcaagtaacctaggaattgcgtgtaagctttgccaacagggcctaaatgcctgccccacacccctatcagaagcttagttttgccattatattaatggcaacttagtcgctgaacctggccaaaaatctgtctcacaggacatcacaaccctgaagaaatactgagaagacatgggcaattgttctgcaggatgtagaagactcttcccttgggtatccctgtccaacagatctagccacttataccaaaaacccatgggtgtacatttaccagtccattgggtccaaggctccagaaagcacctctgatattttatattttctggcactcaaactactttgtgttggaaaagtcctacttcatctaccactgaattttcatgtgggcagaaccctgccacaggtggaaattagaggcaggcctgaaagttaaggctgtgcagtagataaattatggggctactcttaaaactcggaaatgtgaatttttctcaatctggcaaaacacaagctcccagcatttctacctcccacattgataaaatagcgccaatatttggtagaaatgtttggattcaagcaccaagctgttcctcacctctgatgtttgttggttccattctattgagtcatctgtaagtcttctactatttagtggtttcttgaacaaaaacaggcattagataaactaaaagaagccatagcttttgttttcacactagttccctgagggcaagacttacaattagaagtttcaaccacccaaacatttgctctctggagcctttggactgaatggactggtaaatgtacaccaatggatttttggtataagtggctaccagactcagcccaaaagtattcaccactgaagaagtgactcttggtgtcacactgagcacttatcaaaattaaagacagagccaattatcctagtaattgagatttttattataccctgggtaatggaaaatgtctcttataataaataaaagcatcattttggggggtgtggggtgggacttcaaagtttttaaaaaattaatatagatggtccccaacttatgatggtttgacttatgatttttcaactttatgatggtgcaaaattgatatgcattcagcagaaagcatacaaaatttttaagtttgacattttcctgggttagtgatatgcagtacaatactcttttatgatgcttggcagcagcagtgagccacacctcccagtcagccatgtaatcatgaggctaaacaaccaatactatacagagtactgtactcaataaattacaggagataatcaacactttatgacaaaacaggctttggagtagatgcttttgctcaatagtaggctactgtaagtgttctgagagtgtttaaattacactagacaagctatgatgttcagtacactagctgaaatgcatttttgacttggatgttttcagcttatgatgggtttatcaggacataaccccatgataagtcaagaagcatctgtattattttaattgacaaataataattgtatacatttttggggtacaaagtgatgttttgatacttgcatacattgtggaataattaaatcaaagtaattaacacacccattacatcacttattttttgtgatgagccatttaaaatttactcttttagttattttgaaatatatggtacattattgttgactataatcattcggctgtgcaacagatatcagaacttattctttctatctgaaacttcgtatcctatgaccaacaacttccttattcattcccccatcctcagcctctaataaccaccattctgctttctacttttttagattttttagatttttcatataagtaaaataatgaagtctttctatgtctggcttatttcccttagcataatgttctccaggttcatcaatattgtcacaaatgattaggatttcattattttttatggatgaatagtatttcattttgtatgtgtaccatattttctttatcaatttatctgctaatagacacagattgattccttgtcttgactatagtaaataatgctgcaattaacataggagtgcagatatctgacacactgatttcaattcctttgtatatatacacagaagtggatcagctggaatatatggtaattttatttttagttttttttttgaagaaactccataccatttttgacaatggctgtattaatttccattcccaccaaaaatgaacaagaattaccctygctttgaacccttgccaacacttattttctttcatgttttttataaaagacattctaacaggtgtgaaggtgatgcctcactgtggttttacttcttatttttctaatatttaattatgttgagcttttttcatgtacctgttggtaatttgtatgtcttcttttgagaaatgtctattctgtttctttacccacattttaattggtttatttattttttttcactattgagttgtttgaatttcttaaatgttttggattttaaccccttattggatgtatggtttgcaaatattttttgtctcattctgttggttgtctattcactcagttttttcctttgctatgcagaagacttagtttgacgcaatcctatttgtttatttttgcttttgttgcttgtgcctttgcaattatatccaagaatttactgcacagaccaatgtcatgtagcttttcacctatgctttcttctttcttctggtacttttattgttttaagtcttatatttaagtctttaatcaatcttgatttgacatttttatattgtgggagataatgatccaatttcattcttctgcatttggataaccagatttgctagcatcatttattgaagagacagtccttttcccatattgtgttctttggactgttgtcaaacattaattaagcataaatgcatgggttattttctgggatttatatctttgtatctttttgcattgtatggtgtgtctgtttttgtgctagcaccatgctatttttcttacaatctctgtctagtatatttggtcttgggcttttcattgttgggagaatttttattgctgattcaatcttctttttcattattgctctgttcaagttttctatttcttcaagattcagtcttggtaggttgtatgtgtctagaaatgcatccatttattctatattattcaatttattgacatgatttttcatagtagattcttaggatcttttgtatttctttggttggttgtaatatctactttcttatttctgattttatttatttcaatctttcccatttttaaatttagactagcttaggctttgttgatttcgtttgtcttttcaaaaaagaaaacccaactcttacattcacttttttcacatatatttttctgtatctattctacttatttcttctctgatagttattttattccatctgctaaatttgggcttagcttgctcttctattctctagttccttgaggtataatgtgttgttcatttgaggtctttctcctttttgatataggcaattatttctataaatttatctctattttggtttgtcttgaagtattttttatttccttttttatttcttctgtgacccattagctgtttaggagcatgttgtttaatttccacatattttagtattttccagttattgattgctagtttcatgctattgtaatccaagaagatactttatatgatttcaatcgttttttccctgaagaatgttccatgtaaacttgagaagaatgtgtattctgctgcggttggatggaatgttttgcatatgtctgttaggttcacttggtctaatgtgtaattcatatctaatgattccttattggttttatgtctagatcatctgttcactttcaaaagtgtattgaggtttcccactattattgtattgtattgcagtctctcacttcagatctattttttttttttttttttgagaaggagtcttgcactgtcgcccaggctggagtgcagtgacacgatctccgctcactgcaagctctgcctcctgggttcacgccattctcctgcctcagcctcccgggtagctgggactacaggcacccaccaccacgcccggctaattttttgtatttttagtagagacggtgtttcaccgtgttagccaggatggtctcgatctcctgaacccgtgatcttgtgatctacccccctcggcctcccaaattgctgggattacaggcgtgagccactgctcccggcctcacttcagatcttttgatacttactctttgtacttagttgctccaatgttaagtgcgtgtacatttacaattattatgccctcttggtaaattgatcatttatcaaaatataattactttctgtttcttttcatagtttatgacttaaagtctatcttgtctaatataagtacctctgctctcttttgtttttcatttgtgtgaaataacgtttcatctcttcaattttagtctatgtgtatacttacttgtaaagtgagtttcttgtagacagcacatagttagatttttaaaaaaacaaatccattgagacacactgtgtcttttaattagagaatttaatttatttatattcaaggtaatcaataataggtaagaatttactacttccattttgtaatttttttctggttgttttctggttctcccttccttctttccagccttctattgtgaaaaaggaattttctctggtaatacatttcaaattactcttgttgcccaggctggagtgcaatggcacagtctcagctcaccacaacctctgcctcctgggttcaagcaattctcctgcctaagcctcccaagtagctggggttacagtcatgtgccaccacgcctggctaattttgtatttttagtagagatggggtttctccatgttgggcaggctggtctcaaactccagacctcaggtgatctgtccgcctcagcctcccaaagtgctgggattacaggcatgatacaccgtgcccagccacaagcaaaatcttatggccaattatttcaaactgatgacaattgaactctttcttcctctcttcccatctttttgtgatttgatggttttctgtggtggtatgcttttaatcctttatttttatattttgtgtagattctataggttttgattttgtggttaccaggagagcttacacaaaatatcttctattcataacaggctattttaaattgataataactgagatttaaccacataagaaactttatacttttacttcctcctccccactttttatgattttgatttcaaaatgtatttatttatagtaatttgtattcttatctatttattatagttatatttttaatagattttttaaattctcatagtgggaataaaattgctttacctaccatccttacggtattagagaattctgaatataagtatgtattacttatacaattgagtttttaacttttatttattttttgtatttaattaacagtttttcattttgctttaaaaactcccttagcaatttctgtaaagcaggcctagtggtaataaactcccttagcttttgtttgtcatgacaaatttttatttctctttcatttttgaatgacagctttgctggttaaagcattattatttcacaaaattttgttccttcagcacattgaatatattatccgaatctctcctgacctgcaggttttctgctgaaaaccttgctgatagttgtattggaattcctttgaatgtaacatatttcttatctcttatgactttcagcatcctttatttgtctttgatttttgataatttgattatgatgtgtcttagtgaacttttctttggcatgagtttgattggaaaactctgagtttcctgaacctgggtgtttttgtatttctccagatttagggaaatttcagccatttattccttaaacagccttcctttcactttctcttctctttcggaaacttgtattatatgaaagttagttctcttgatggtgttccataattctcatggacctcatttcttttttattctttttcctttttgcttttctgagtggataatttcagacgtcctatcttcaagctcgctgagtcttcatttaatcaagtctgctgttgaagctttctattaaatttagtttgatttttatattatctctaggacctctttttatattttctatctacttgtcaaaattctcattttgttcatatattgttttccaaatttatttaatgtttkaatctgtattttcttgaagttctctgaacttctttaagggattatcttgaactctttgtcagtcattcatagatcttcatttcttcaggattcactattgtagctgtattaatttcttttggtggtgtcatattttttctgatttttaagtagtctttatgtctctgcattgatgcctgcacttttgagaaaatggccatctcttctgacttttgcaggtgttctttggtggtgataaaccttcactatttagcctagcttaggactctggatgagccagctggtagcaactctggacaggcagagtttagtgtttcgttccctacctgggctgggacagtaattgcactctgaggtaaaatggaactgctggctgtcctctacaatctggtgagaccactagctaaacaatgtagtcaagtgggcctgatgactaggctctgttattgcctctgatcaggcaggtttgcaggctgtcttccatggctgggaaggcactgtgtttggaatcagtagttgagcagtgctgtgtgttgggctccaaggttgggtaatggctctggggtcaccactgggcaacttgggttggacagggtcagagtctatgcttcacagatatgtatagacttcaacttgcctcttggtctaggatagccccaagcagagcactgaggcttagtaaggtcaccactcatttgctgagttttagtgctttctccacagataattgatgacttgcacttttctcctatcttaggaaaggcttgaggagagcactggggcttggttgggccagcactcaacttctgggtttgactggggccagatgctccctctgtggatagctgctgactttcccttgcttcccagactgatgcaagctaaaggagaggaccaatactatgtggagaagctggctagggacttgtgcctggcaaacatgcagatcatgcttccagcagagtaatgctattggctaatctctctggtgtggtacccctcttggctggaaggcagcatcaccaccaagaactgtgtgctgattgctgcaagccccacccccattctttctttctaaccgacccaagacggcctagttctgctgatacctgcaatgttttctgtcatgtgagataggagtgggcctcctgaaaagagtcccagaatggtggggtagctgaatgtctgcctccaactttcttttcccactgtagaaaccatgggcaaggggaattttctgtgtgtggcaccgtgccaacttggaggagagccaatgcagtaagagaaactgtttctcttacacataaaatgtggagttctgcggtccaagggggtgtttcagtctcattcccaagttctgagatactgacaaaggtattcttgtttgcagatagttgctacttggatttccatgaggggtaatagagctagagaacgcctattccaccttcttgttgacatcaccctccttattaagatggatatgacatctatgtgatcaagttaaacttggccttgctggaatgtcacaatttcataaggaaatagccacgtgcattgtcattgatgttatgttgtcaaaaatcccagaaatgggatttttaaaatattgttcaatggatactggagataggatggtcagcactgtcaaaaaagaaaagcaatggaggaagcacaggatataagggagccagaaaatgaacagatgcaacctgtgacccttattaaaacattccaaattcaatgcaggggatagaacaaagtgcttaataggctaagctgttcacgatactactagacacagagtatgcccttgagaaacattctcctaaggtttatgttttgatcaactcccgctttgcagctaatgggctaattatttggtcaggactttggcaaaatcagggctttaaaaacagggccaagacattgggggtagagagatgggaataaatttcaccattggctcccactcttcccatatttgtgtaccataccttgactcacaacagacaagacacagaggaggtggtataaagtgcaaaaagccaataaactaacaaaaccaccaaagcaggtaaatatcttgaaggatagggggttcctagaactttgatatgaacccttcaatgcttctaccagtgggcacaagagacatcagggcatttggatatgatggggtttaaaaatggattaagaggagtggctacagcaaagagacattcacataaagctaccaagaactgtactacactcgaataatctggacactaggcctaccttatggaaagataaatttaaatagaagggtcaatcaaaacttggaaaacaatttcattggttctctctctgcaagtggcaggaaccattgaatatgccttagcaattatgtatacttctacaggctttttattggattaccaatacaaaacaccaacctctgctgatgttattgggtggttaacaaaacagcttttatattctttgggaataacacaagttacacagtaaaaacaaagcttccacttcactgtaaagcaagtgcaaatgtaggcattacaaaataacattgctggccaggcatggtggctcatgcctgtaatcctagcactttgggaggctgagaacagaggatatcttgaactaaggggttcaagaccatcctgggcagcagggcaaaaccttgcctctacaaaaataaaccagccaggcatggtggtgtgtacctgtagtgcaagctattccagtggttgaggttggaggattgcttgagtatgggaggcagagattgcagtgggccatgatggtgctactgtactctagtctaggtgacagagtaagacagtatctcaaagaaaacaatgcttaactttttggcctaccctatcttcctggaaaaagttcacacagaaagacatgagcttttatttatttaaatgggttacacagaaagacaatgggttttttttttttaaagagacacagtttctctctgttgcccaggctggagtgcagttacattaccacagatcagagtaaccttgaactccagggctcaggcaatcctcccacttcagcctcctgagtagctgaaattacaggtgcatgttatgtcaccatgcccagctaatttttaatacttttatagagattaggtatcactatgttgctccggcttgtctcaaactcctgacattccagcaatcctcccaccttggtctcccaaagcagtgggattacaggtatgagttaccgtgctcagcctgacatgggttttaaaacaatggcaattgaaacaacctggagtgtggagccaaggtggccaaataggaacagctccagtctacagctcccagcatgagcgatgcagaagacaggtgatttctgcatttccaactgaggtaccgggttcatctcactggggagtgtcggaaagtgggtacaggacagtgggtgcagtgcactgagcatgagccgaagcagggcgagttatcaccttacccgggaagcacaaggggtcaggaaattccctttcctagtcaaagaaaggggtgagagatggcacctggaaaatcgggtcactcccaccctaatactgtgcttttccaatggtcttagcaaatggcacaccaggagattatatcccgtgcatggctgggagggtcctacacccacagaacctcaatcattgctagcacagcagtctgagatcaaactggaaggcggcagcaaggctgggggaggggcacctgccattgcaaggcttcaataggtaaacaaagtagctgagaagctcgaactgggtggagcacactgcagctcaaggaggcttgcctgcctctgtagactccacctctgggggtagggcatagccaaataaaaggcagcagaaacctctgcagacttaaatgtccctgtctgacagcagtgaagagagtagtggttctcccaggacacagctggagatctgagaacggacagactgcctcttcaagtgggtccctgacccctgaatagcctaactgggaggcatcccccagtaggggcagactgacacctcacacggctaggtactcctctgagacaaaacttccagaggaatgatcaggcagcaacatttgctgttcaccaatatcagctgttctgcagcctccgctgctgatacccaggcaaacagggtctagagtggacctctggcaaactccaacacacctgcagctgagggttctgactgttagaagaaaaactaacaaacagaaaggacatccacaccaaaaccccatctgtacgtcaccatcatcaaagaccaaaggtagataaaaccacaaagatggggaaaaaacagagcacaaaaactggaaactctaaaaatcggaacacctctcctcctccaaaggaatgcagctcctcaccagcaatggaacaaagctggatggagaatgactgtgacgagttgagagaagaaagcttcagatgatcagactactccaagctaaaggaggaagtacaaatccatggcaaagaagttaaaaaccttgaaaaaaaattagacgaatggctaactagaataaccaatgcagagacgtccttaagggacctgatggagctgaaaaccatggcatgagaactacataatgcatgcacaagcctcagtagatgatttgatcaactggaagaaagggtatcagtgatggaagatgaaatgaatgaaataaagtgagaagagtactttagagaaaaaagaataaaaagaaatgaacaaagcctccaagaaatatgggactacgtgaaaagaccaaatctacatctgactggtgtacctgaaagtgacggggagaaaggaaccaacttggaaaacactctgcaggatattacccaggagaacttcctcaatctaacaaggcaggccaacattcagattcaggaaatacagagaatgccacaaagatattcctcgacaggagcaactctgagacacataattgtcagattcaccaaagttgaaatgaaggaaaaaatgttaagggcagccagagagaaaagtcgggttacccacaaagggaagtccatgagactaacagtggatctctcggcagaaactctacaagccagaagagagtgggggccaatattcaacattcttaaagaaaagaattttcaacccagaatttcatatccagccaaactaagcttcataagtgaaggagaaatcaaatactttacagacaagcaaatgctgagagattttgtcaccaccaggcctgccctaaaagagctcttgaaggaagcactaaacatggaaaggaacaaccgataccagagcagaagtgaaggaaatagagacacaaaaacccttcaaaaaatcaatgaatccaggagatggttttttgaaaagatcaacaacattgatagatcactagcaagactaataaagaagaaaagagagaagaatcaaatagacacaataaaaaatgataagggggatatcaccaacaatcccacagaaatacaaactaccatcagagaatactataaacacctctatgcaaataaactagaaaatccacaagaaatggataaattcctcgacacatacactctcccaagactaaaccaggaagaagttgaatctctgaatacaccaataacaggctctgaaattgagggaatagttaatagcttaccacccaaaaacagtccaggaccagatggattcacagccgaattctaccagaggtacaaggaggagctggtaccattccttctgaaattattaccatcaatagaaaaagagggaatcctccctaactcattttatgaggccagcatcatcctgataccaaagcctggaagagacacaacaaaaaaagagaattttagaccaatatccctgatgaacattgatgcaaaaatcctcaataaaatactggcaaaccgaatccagcagcacatcaaaaagcttatccaccatgatcaagtgggtttcatccctgggatgcaaggctggttcaacatacgcaaatcaataaatgtaatccagcatataaacagaaccaatgacaaaaccacataattatttcaatagatgcagaaaatgcctttgagaaaattcaacaacccttcgtgctaaaaactctcaataaataaggtattgatgggatgtatctcaaaataataagagctatctatgacaaacccacagccaatatcgtactgaatggacaaaaactggaagcattccctttgaaaactggcacaagacagggatgccctctctcaccactcctattcaacatagtgttggatgttctggccagggcagtcaggcaggagaaggaaataaaatgtattcaattaggaaaagaggaagtcaaattgtccctgtttgcagatgacatgattgtatatctagcaaactccatcgtctcaacccaaagtctccttaagctgataggcaacttcagcaaagtctcaggatacaaaatcaatgtgcaaaaatcacaagcattcttatacaccaataacagacagagagccaaatcatgagtgaactcccattcacaattgcttcaaagagaataaaatacctaagaatccaactwacaagggctgtgaaggacctcttcaaggagaactacgaaccactgctcaatgaaatcaaagaggatacaaacaaatggaagaccattccatgctcttgggtaagaagaaatcaatatcatgaaaatggccatactgatcaaggtaatttgtagattcagtgccatccccatcaagctaccaattactttcttcacagaattggaaaaaactaaagttcatatggaaccataaaagagcccgcattgccaagtcaatcctaagccaaaagaacaaagctggaggcatcacgctacctgacttcaagctatactacagggctgcagtaaccaaaacaacatggtactggaaccaaaacagagatatagaccaatggaacaggaaagagccctcagaaataatgctgcatatctacaaccatctgactttgacaaacctgacaaaaacaagcaatggggaaaggattccctatttaataaatggtgctgggaaaactggctagccatatgtagaaagctgaaactggatcccttccttacaccttataaaaaatgaattcaagacggattaaagacttaaatgtcagacctaaaaccataaaaaccctagaagaaaacctaagcaataccattcaggacataggcatgggaaaggacttcatgtctaaaacaccaaaarcaatggcaacaaaagccaaaattgataagtgggatctaatcaaactaaagagcttctgcacagcaaaagcaactaccatcagagtgaacaggcaacctacagaatgggagaaaatttttgcaatctcctcatctgagaaagggctaatatccagaatctacaatgaactgaaacaaatttacaagaaagaaacaaccctatcaaaaagtgggcaaaggatatgaacagacacttctcaaaagaagacatttatgcagccaaaggacacatgaaaaactgctcatcatcactggccgtcagacaaatgcaaatcaaaaccacagtgagataccatctcacaccagttagaaaggtggtcattaaaaagtcaggaaacaacaggtgctggagaggatgtggagaaataggaacacttttacactgctggtgagactgtaaactagttcaaccattgttgaagtcagtgtggcgattcctcagggatctagaacttgaaataccatttgacccagccatcccattactgggtatatacccaaagattataaaacatgctgctataaagacacatgcacacctatgtttattgcagcaccattcacaatagcaaagacttggaatgaatccaaatatccaacaatggcagactggattaagaaaatgtggcacatatacaccatggaatactatgcagccataaaaaatgatgagttcatgtcctttgtagtgacatggatgaaactggaaaccatcattttcagcaaactatcgtaaggacagaaaaccaaacaccgcatgttctcactcatatgtgggaactgaacaatgaggacgcatggacacaggaaggggaatatcacacaccggggcctgttgtgaggtaggaggagagggagggatagcattaggagacatacctaatgttaaatgacgagttaatgggtgcagcacaccaacatggcacaagtatacatatgtaacttacctgcatattgtgcacctgtaccctagaacctaaagcataataaaaaaaaggaaaaaagaaaatcagaattatatcaagtatcctcagaccacagtagaatgaaactggaaattaacttcaaaaggaaccctcaaagctatacaaatatacagaaatcaaacaatctgccttttaatgatattttgatcaacaataaaatcaaaatggaaatttaagaattctctgaaatgcacaagaacagttacacaacttatcaaaatctccagaatacagcaaaagcaatgttaagagaaaagttcattggattaaatgcctatatcaaatagtctcaaagagtacaaatagacaatctaagctcacacctcaaggaactagagaaacaagaaaaaccaaactgaaacccagcagaagaaaataaataacaaagatcaggactacatgaaattgaaacaaaaaagatattaccatagataaacgaaagaaagagggggttccttcaaaagataaacaaaattgatacgccattagtgagattaaccaagaaaagaagagaggagatccaaataagctccattagaaataaaatggaagatattacaaatgataccacagaaatagaaaaaatcacccaaagctactaggaacacatttatgcacacaaactagaaaacctaaaaaagatgaataaattcctggaaatatgcaaccctmcttgattaagtcaggcagaaataaaatctctgaacagaccaataacaagtagcaggactgaaacagtaataaaaaaaattgtaaacaacaaaatccaagaccagatggatttacagctgagttctatcagacattcaaagaagaattggtaccagtcttatagaaactattccaaaagatagagaaagaaggaatcctatctatattattctacgaagtcagtgtcaccctaatatcaaaaccaggaaaggccataaaaaataaaatgacagaccactatccatgagaaacatcaatgcagaagtcctcaacaaaataccagctcaccaaatccaacagcatatcaaaaagataatacatcatgatcaagtgggtctaataccagggatgcagggatggtttagcatactcatgtcaataaatgtgatacaccacataaacaaaattaaaaacaaaaataacattattatgtctatagatactgaaaaagcatttgacaaaatccagcatccatttatgattaaaactctcagaaaaatcggcataaaagggacatatctcaatgtaataaaagccatctatgacaaacccatagccaatattatatcgaacagagaaatgttggaagcattccccctgagaactggaacaatgcaagtatgcccactctcaccacttctattcaacgtagtactggaagtcctagccagaataatcaaacaagagaaagaaatgaaggacatccaaataaatacagaagtcaaaatatcgctgctcactgatgatatgatcatataactagaaaaccctaaagagacatttaaaaagctcctagaactgataaataaaaatttcaggataaaaaatcaatgtacacaagtctgctatacgccaccaacgaccaagctgtgaatcaaaacaagaactcaaccgctttacaacagttgcaaaaaaaaaaaaaaaaagtacttagaaatatacctaatcaaggaggtgaaagacctctacaaagaaaactacaaaacatggttgaaagaaattataaatgacacacactaatgaaaacacattccatgctcatggatgagtagagtcaatattgtgaaaatgaccatactgtcaaaaacaatctacaaattcaatacaactctcacctaattaccaacatcgttcttcacggaagtagaagaaacaatcctaaaattcatatggaaccataaagagcctgaaaagccaaagtaagacgaagccaaagaaacaaatttggaggcatcacattacctgacttcaaacaatactataaggctatagtcaccaaaacagcacagtactggtataaaaataggcatgtagaccaatggaactaaatagagaactcaaaaatgaaggcaaatacagccaactgatctctgacaaagcaagcaaaaatcataaagtgggaaaaggacaccctttcaacaaatgatgctaggataataggcaagccatatgtacaagaatgaaactggatcctcatctatcaccttatacaacagtcaatgcaagatggatcaaatacttaaatctaacacctgaaaccataagaattctagaagataagataggaaatatccttctagacattgacttaggcaaaaactttatgaccaagaatccaaaagtaaatgcaacaaaaacaaaattaaatagatgaggcataattaaactaaaattttctgcacagaaaataatcagtaaacagacaatccacagagtgggaggaaatctttgcaaactcagtatccaacaaaaaaactaatatccaaaatctacaaggaactcaaacaaatcagcaagaaaaaaaatttcatcaaaaagtgagcaaaggacatgaatagacaattctcaataaaagatatagaaatggtcagcaaacatatgaaaaaatgctctacaccaccaatgatcagggaactgcaaattaaaaccacaatgtgataccacctcactcctgcaagaatggccattaaaaaaaaaatagatgttgatatggatgtggttaaaaaggaacacttttacactgctggtgggagtgtaaactagtacaacaactataaaaagcagtaagaagatttcttaaagaactaaaagtagaactattatttgatccagcaattctactactgggtatctacctaaaggaaaatgtcattatataaaaaagacacttacacatacatgtttatagcagtacaatttgcaacttcaaaaatatgaaaccagcctaactgcccaccaactaatgagtgaataaagaaaatgtgatatatataggcattcacagcaacctggatggaactggagacccttattctaactgaagtaactcaggaatggaaaaccaaatattgtatgttctcacttatgagtaggagctaagctatgaggatgcaaatgcataagactgatataatgtggacttcggggactcggggtaagaatgggatggaggtaagaaataaaagactacacattgggtacagtgtacacagctcaggtgactggtgcaccaaaatctcagaaatcaacacaaagaacttatccatggagccaaaaaacacatgttccccagaacttttaaaataaaactttgatttatcaactgtacacaagtgtaccatactaatatataaggggaagctgaatgtagcatatgtaggtactctgtaccatcttgacaacatctctgaaaatctaaaattattaaaaaataaagttcatttattaattaactaaaaattggtatatgtaaatagtaccttctcagtaatcatgttagatgtgagtgaaataaaggcttcaatcaaaaggtaaatttcagtagaatgaactttaaaaatgtgattcaattgtatgctgtcaaaaagagacagatttagccaaaaaaaaagaaaaaaaagtaaaaataggttgcaagtaaaaggagggggaaacttaccaagcaaacataaactaaaaaacagctgaagtgactatactattacagacaaaatacacattagtaaacaaaaatcacatagagccaaaggaaggcattttataatgacaaaagttaattactgaagaagacataaaaacttacctggacctagcaacggagttcaaaaaatatataaagtaaattatggtaaattgaaagaaataatagacaatttaacaataattgaagacttcagtataccactttcccacaaggacaagaacagcagacagatcaacaaagaaatagaataattaaataacactatgattaaactacacatatgtaaaacactcattaaaaaacaaacattcttctcaggtgcacacagagcattctttggaatagaaatgaggcaagaaaatagggtgtggaggcagggaacataaagctgattcacacttcagctatacagtatatatcctttccataggccgtatgcagtaaatgactttgtaactttacttcatcctctccatttacataggacatacgcaaagtaaccaatgcaatcatctaggtggtatttaaactcccaaaaattctgtaatgttgcccttgagtccttatgcttgggcttgctcccacattgtggagtgtacttcaatttttcaataaatccctacgttccttccttgctttgtgtgttttgtccarttctttgttcgagatgccaagaacctggacaccctccaccataacatattttggcgagccagccaggaggaagaggaaatcccaaagttagggtttcactaaagttttagagtactaaggataaaattctagttaacaagtaattctgtatttaataatgtgtcagaaagaattactttattagtggaaaaagggataattttgtctaaatcagaagttatctaaaggttagttcaaattacagattttaaaaggttatttatgatacaatgtggtaagaaaccgttaagtaggggagaaagatgtgtaaaagtttaaaaatataatattatttaaaacctaataaagaattggagacatttggctaattaacattttcatagttaaagctcttagtcttgattaaagtaaaataaaaagtattgtacagatgcatcagcagcttggcaattttttaaatatagttaagcatgaagctggatttagagtaaagccaaatttcacatacatacttgcgttacttcacactgtgtttactgttttgcatggatagtgtagagtacttgttggttatgtgcctaaagtgaatttgttaattccacaggatgtataataatattggtaaacttaaggtatgaaattgtgtaacagaaatagaatatacattgtgtgtgttttgggggggccctgtgtaactctgtagcctccagggtaaattgagtatgaaaatttagggttggtttctctttgtttttgcttctagttttcacttgtttgctgtttattctcttctggctttgcttgggtatccatatatataaaaccatgatgctttttactctctagtgaaaggcttttatttggttctttgaataattattttgtttcctttgcatttctaccaagtcatcattcattccatttatctggaattcttaagttacctttgttaggcccacaggaaatagtggagcatacaggctttctattcttaaactaacttcttgaattttaggcttcctgatactttaagtgtactgagcatacttaaaatttgaatcatatttctctctctgcaaaattactccaaaatgtttaaactatttgtaaaaattttgaattcattaacaatttaattcattctaattaaattcttaatttatgcaatgtgtttgcttccatacagtcatgaaggattgcttgggctactcagaaagaaagaaacctgaaactcagcacacaaggaaaagaataaaaatttcttaccattctgtctcttacctatttcttgcatgcaagctggttaaatataaagtagaaatcactgtttatccctgctatatagttttaaattaattggtttaataaataataagagattaaataaaatattttgtcaaaaagttagaaaatctaatgcttttttttatacttaagttctgggatgcatgtgcagaatgtgcaggtttgttacataggtatatgcgtgatatggtggtttgttgcacccatcaacctgtcgtctacattaggtatttctcctaatgctatccttcccctagcccccaaccccctgacaggccccactgtgtgatgttcccctccctgtatccatgcgttctcattgttcaactcccacttatgagtgagaacatgtggtgcttagttttctgattctgtgttagtttgctgagaatgatggtttccaggttcatccatgttcctgcaaaggacatgaactcatacattttatggctgcatagtattctatggtgtatatgtgccacatttttcttatcctgtctatcacagatgggcatttgggttggttasaagtctttcctattgtgaacagtgcagccataaacatacgcatgcatatgtctttatagtagaattatttataattccctgggtatatactcagtggtggaattgctgggtcaaatggtatttctagttgcagttccttgaggaatcaccacactgtcttccacaatggttgaactaacttacactcccaccaacagtgtaaaagtgttcctatttctccacatcctctccagcatctgttgtttcctgactttttaataatcgccattctaactggcatgagatggtatctcattgtgattttgatttacatttctctaatgaccagtgatgatgagctttttttcatatgtttgttggcagcataaatgtcttcttttgagatatgtctggtcatatccttctctcactttttgatggggttgtttttttcttgtaaatttgtttaattttgtcttagattctggatcttagccctttgtcaggtggataaattgcaaaaattttctcccattctgtaggttgcctgttcattctgatgatagtttctcttgctgtgcagaagctctttagtttaaatcgatcccatttgtcaattttggcttttgttgccattacttttgatgttttagtcatgaagtctttgcccattcctatgtcctgaatggtattgcctaagatttcttctagagcttttatggttttaggccttacatttaagtctttaattcgtcttgagttacttttttataaattgtaaagaataggcccagtttcattttttcacataaggctagccagttttccctacaccgtttattaaataaggaatctttccccattgcttgtttttgtcaggtttgtcaaagatcagatggttgtacatgtgtggcactatttctgaggcctctgttctgttctattagtctatatatcacttttggtactagtactatactgttttggttactgtagccttgcagtatactttgaagtcaggtagcatgatgcctccagctttgtttttttgcttaggattttcttggctctacgggctcttttttggttccatatgaaatttaaagtagttttatctaattcttttaagaaagtcagtggtagattgatgggaatagcagtgaatctataaattactttgggcaggaaggccattttcatgatattaatttttactatccatgagcatggaatatttttctatttgtttctgtcctctcttaattccttgagcagtggtttgtagttctccttgaagaggtcactcacatccgctgtaagttgtattcctaggtattttattctctttgtagcaattatgaatgggagttcactcatgacttggctctctgtttacctattattggtgtataagaatgcttgtgattttttcacattgattttgtatcctgatactttgctgaagttgcttatcagcttaaggagattttgggctgagacgatggggttttctaaatgtacaatcatgtcatctgcagacagagaaaatttgacttcctctgttcctatttgaataccctttctttccttctcttggctgattgccctggccagaacttccaagactatgttgaataagagtggtgagagagggcatccttgtcttgggccgattttcaaagagaatgcttccaggttttgcccattcagtrtaatattggccgtgggtttgtcataaacagctcttattattttgagatatgttccatcaatacctagtttattgagggtatttagcatgaaggggtgttgaattttatggaaggccttttctgcatctattgagattatcatgtggtttttgtcattggttctgtgttatggattacatttattgatttgtgtaggttgaaccaggctagcatccaagggttgaagccgacttgatcatggtggttaagattttcatgtgctgctggattcgatttaccagtattttatacaggatttgtacattgatgtttcttagggatattcccctgaaatttctttttttttttttattgtgtctctggcaggttttggtatcaggatgatgctggtcttataaaatgagttagggaggagcccctcattttctattgtttggagtagttttagaagtaatggttccagctcctctttgtacctctggtagaagttggctgtgaatccatctggtcctgggtttttttttttttttttttttttttagttggtaagctattaattactgcctcaatttcagaacttgttattggtctattcagattcgacttcttcctgattcagtcttggggggtgggtgtatgtgttcagcaatttatccatttcttctatatttcctagtttatttgggtagaggtgtttatagtattatttggtggtagtttatatttatctgggatctgtggtaatatccactttattatttttattgtgtctatttcattcttctctcttttcatcttcattagcctagctagcagtctcttttgttaatcttttcaaaaaagcagctcttgggttcattgattttttgaagggattttatgtctatctttttcagttctgctctgatcttagttatttcttgtcttctgctagcttttgaatttgtttgcttttgcttctctagttcttttaattgtgatgttagagtgtcacttttagatctttcccactttctcctgtgggcatttactgctataaattttcctctaaacactgctgtagctgtgtctcagggattctgttacattgtgtctttgttctcatttgtttcaaagaacttatttatttcttccttaatttcgttatttacccagtagtcattcaggaacaggttgttcagtttccatgtaactgtgcggttttgggtgagtttattaatgctgggctctaatttgcactgtggtctgagagactgttataatttcccttcttttgcatttgctgagcagtgttttacttccaattatggggtcaattttagaataaatgcaatgtagtttggaggagaatgtatattctgttgatttgtggtggagagtcctgtaggtgtttattaaatcccttttgtccagagttgagttaaagtcttgaatattcttgttaattttctgtctcattgatcagtctaatattgacagtggggtgttaaagtctcccactgttattgtatgggagtataaatctcttcatagatctctaagaatttgctctatgaatctggatgctcctctattaagtgcatatatttttaagatagctcttcttgttgcattgatccctttataattatgtgatgctttgtcttttttgatctttgttggtttaaagtctgttttatcagagactagaattgcaacccccgcttttttttttttttgtttccatttgcttggtaaatattccttcatccctttattttgagcccatgtgtgtctttgcacgtgagatgggtctcctgattacagcacattgatgggtcttgactatccaatttgccagtctgtgtcttttaatttgggcatttagcctgcttacatttaaggttaatattttgatcccgtcattgtgatgctagctggttattttgcccattagttgatgcagttttttcatagtgttgatggtctttaaaatttggtatgtttttgcagtggctgctaccggttgttctttccatgtttaattcttccttctggagctgttctaaggcaggcatggtggtgacaaatttttctgcatttgyttgtctgtaaaggatttttttttcttctttgcttatgaagcttatttggctggatttgaaattctgggttgcaaattcttttctttaagaatgttgaatattggccccatgctcttctgcagagaaattcactattagtctgatgggcttccctttgcgggtgactcaacgtttctctctggctgcccttaacattttttccttcatttcaaccttggtgaatctgacaagtgtcttggggtcgctcttctcaaggagtatctttgtggtgttctcagtatttttcaaatttgaatgttgtcccgtcttgctaggttgggtgatttctcctggataatatcctgaagggtgttttccaacttggttccattcttcccatcactttcaggcacaccagtcaaatgtattttttgttttgttttgttttgtttcttttttttttcacatagtcccatatttcttggaggctttgttcattccttttcattcttttttcttcagtcttgtcttcccgctttatttcattaagttgatcttcaatctttaatatcctttcttctgcttgatcaatttggctcttgatattgtctatgcttcacgaagttctcatgctgtgtttttcaggttatttatgtttttctctaaactggttattctagttagtaattcttttaacattttttcaagtttcttagcgtccttgcattgggttagtacatgctgtttaatcttggaggagtttgctattatctaccttctgaactacttctgtcaatttgtcaaactcattctctgtccagttttgttcccttgttgccaaggagttatgatcctttggagaaaaggaggcattctggtttttggaaatttcagtttttttgcactgtttttttttctcatcttcatggatttatgtagctttggtctttgatgatggtgacctttggatggggtttctgtgtaaacttttttttgttgatgttgatgctattcctttcagtttgttagttttccttctaacggtcaggcccctctgctgcaggtctgctggagtttgctgggagtccagtccagaacctgtttgcttgggtatcaccagcggaggctgcaaaacagcaaagttttctgcctgttccttcctctggaagctttatcgcagagaggcacctaccagatgccaactagagctctcctgtatgaggtgtctgtcgacccctactgggaggtgtctttcagtcaggatgcacgggtttcagggtcgcacttgaggaggcagtctgtaccttagcagagcttcagcactgtcctgggagatttactgctctcttcagagctggcaagaggaaagtttaagtctgctgaagcygcacctacatccagcccttgccccaggtgctctatactagggagatgacagttttatttataagcccctgactggggctgctgcctttcttccagagatgtcctgcccagagagaaagaatctagagaggcagtctggctacagtggctttgcagrgctgaggtgggctctgcccagttcaatcttattagagggtttgtttacaccgtgaggggaaaactgcctactgaagcctcagttatggcagacatccctcctcccaccaacttgtagcatcccaggttgacttcaggctgctgtgctggcagtgaaaatttcaagccagtggatcttagcttgcagggctccatgggggtgggaattgctgagctagaccacttggctccctggcttcagtgtcctttccaagggagtaggcagttctgtctcactggcattctgggagccactggggtatgaaaaaaaactcctgcagctagcttgttgtctggccaaacggctgaacagttttgtgcttgaaacccagggccctggtggcatagacacctgagggaatctcctgttctgcgggttgcaaagactgtgggaaatgtgtagtttctggactggaatgctctgttcctcacagcacattccctcaaggcttcccttggttaggggagggagttcctcgatccctttcacttcccaggtgaggtggcacaccaccctgtttcaactcaccctctatgggcttcacccactgtctaaccagtcccaatgagatgagctgtgtacctcagttggaaatgcagaaatgactcaccttctgcgttgatctcactgggagctgttgctattcatccatcttgcaagccaccccatttacccacattttagaaaatgtaatgccttttagttcacgtgactatagtaatctttgggtaataacgatggttataaatattgttggtaaaacacaattttcttcaaaatgtaaacatgtggtctaaattatgttcaaataataggtatgataaatgctttagggtcataaactgcttctttggcttttgaaaattgtttagattgcctgcttttcagctaagtaaagcctgtggatgtgcagagttggccatacccctagctatgctggaaattgtcaaatattatcagaacataacttaccagaatttacattaaagttcaccattttaacatataatcaagacaactagaaacagttttacatgcaaggtgtgtaagagcaatagaatatgtttcttattttgtaaacggttataaatgctttttacttctttaaaattttttagtcatcattttggcaaaataaataatttacggtaattgggaattccaaaatcaaatgtcagtttcaaaattctcttttttaatgcctgactttttaggatgaatcagagggcctgtgaaaacatccagaaaagaggtaaacggattatttaaagtgcttaggtacataggattgccaaaatgatgttcaatcttctttagtttgtatttttgtgaataatactaaaatatgttccaaaactgtatagaatgtctaaaattctaatactttagtatagttattatgttaagttattctaaaccacagaaataaccaaatttccttgtataaggctactaactgaagtaaaacaaaaattaattaagtaccaagaaaatgctttgtcaaagctggatggagaatgactttgacragctgagagaagaaggcttcagacgatcaaattactctgagctacgggaggacattcaaaccaaaggcaaagaagttgaaaacattgaaaaaaatttagaagaatgtataactagaataatcaatacagagaagtgcttaaaggagctgatggagctgaaaaccaaggctcgagaactacgtgaagaatgcagaagcctcaagagccgatgcgatcaactggaagaaagggtaccagcgatggaagatgaaatgaatgaaatgaagtgagaagggaagtctagagaaaaaagaataaaaagaaatgagcaaagcctccaagaaatatgggactatgtgaaaagaccaaatctatgtctgattggtgtacctgaaagtgatggggagaatggaaccaagttggaaaacactctgcaggatattatccaggagaacttccacaatctagcaaggcaggccaacgttcagattcagaaaatacagagaacaccacaaagatactccccgagaagagcaactccaagacacataattgtcagattcaccaaagttgaaatgaaggaaaaaatgttaagggcagccagagagaaaggtcaggttaccctcaaagggaagcccatcagactaacaacggatctctcggcagaaaccctacaagccagaagagagtgggggcctatattcaacactcttaaagaaaagaattttcaacccagaatttcatatccagccaaactaagcttcataagtgaaggagaaatcaaatactttacagacaagcaaatgctgagagattttgtcaccaccaggcctgccttacaagagctcctgaaggaagtgctaaacatggaaaggaacaaacagtaccagctgctgcaaaatcatgccaaaatgtaaagacaatcgagactaggaagaaactgcatcaactaacgagcaaaataaccagctaacatcttaatgacaggatcaaattcacacataacaatattaactttaaatgtaactggactaaatgctccaattaaaagacatagactggcaaattggataaagagccaagacccatcagtgtgctgtattcaggaaacccatctcaactgcaaaggcacacataggctgaaaataaaaggatggaggaagatctaccaagcaaatggaaaacaaaaaaaggcaggggttgcaatcctagtctcggataaaacagactttaaaccaccaaagatcaaaagagacaaagaaggccattacataatggtaaagggatcaattcaacaagaagagctaactatcctaaatatatatgcacccaatacaggagcacccagattcataaagcaagtcctgagtgacctacaaagagacttagactcccacacattaataatgggagactttaacaccccactctcaacattagacagatcaacgagacagaaagttaacaaggatacccaggaattgaactcagctctgcaccaagcggacctaatagacatctacagaattctctaccccaaatcaacagaatatacatttttttttcagcaccacaccacacctattcgaaaattgaccacatactgggaagtaaagctctcctcagcaaatgtaaaagaacagaaattataacaaactatctctcagaccacagtgcaatcaaactagaattcaggattaagaatctcactcaaaaccgctcaactacatggaaactgaacaacctgctcctgaatgactactggatacataacgaaatgaaggcagaaataacgatgttccttgaaaccaacgcaaacaaagacacaacataccagaatctctgggacacattcaaagcagtgtgtagagggaaatttatagcactaaatgcccacaagagaaagcaggaaagatccaaaattgacaccctaacatcacaattgaaagaactagaaaagcaagagcaaacacattcaaaagctagcagaaggcaagaaataactaaaatcagagcagaactgaaggaaatagagacacaaaaaacccttcaaaaaattaatgaatccaggagctggttctttgaaaggatcaacaaaattgatagaccgctagcaagactaataaagaaaaaaagagggaagaatcaaatagacacaacaaaaaatgataaaggggatatcaccaccgatcccacagaaatacaaactaccatcagggaatactacaaacacctctacgcaaataaactagaaaatctagaagaaatggataaattcctggacacatacaccctcccaagactaaaccaggaagaagttgaatctctgaatagaccaataacaggagctgaaatagtggcaataatcaatagcttaccaatcaaaaagagtccaggaccagatggattcacggccgaattctaccaaaggtacaaggaggaactggtaccattccttctgaaactattccaatcaatagaaaaagagggaatcctccctaactcattttatgaggccagcatcattctgataccaaagccaggcagagacacaacaaaaaaagagaattttagaccaatatccttgatgaacattgatgcaaaaatcctcaataaaatactggcaaactgaatccagcagcacatcaaaaagcttatccaccatgatcaagtgggcttcatccctgggatgcaaggctggttcaatatacgcaaatcaataaatgtaatccagcatataaacagagccaaagacaaaaaccacatgattatctcaatagatgcagaaaaagcctttgacgaaattcaacaacccttcatgctaaaaattctcaataaattaggtattgatgggacgtatttcaaaataataagagctatctatgacaaacccacagccaatatcatgctgaatgggcaaaaactggaagcattccctttgaaaactggcacaagacagggatgccctctctcaccactcctattcaacatactgttggaagttctggccagggcaattaggcaggagaaggaaataaagggttttcaattaggaaaagaagaagtcaaattgtccctgtttgcagacgacatgattgtatatctagaaaaccccattgtctcagcccaaaatctccttaagctgataagcaacttcagcaaagtctcaggatacaaaatcaatgtacaaaaatcacaagcattcttatacaccaacaacagacaaacagagagccaaatcatgagtgaactcccattcacaattgcttcaaagagaattaaatacctaggaatccaacttacaagggacgtgaaggacctcttcaaggagaactacaaaccactgctcaaggaaataaaagaggatacaaacaaatggaagaacattccatgctcatgggtaggaagaatcaatcttgtgaaaatggccatactgcccaaggtaatttacagattcaatgccatccccatcaagctaccaatgactttcttcacagaattggaaaaaactactttaaagttcatatggaaccaaaaaagagcccgcattgccaagtcaatcctaagccaaaagaacaaagctggaggcatcacactacctgacttcaaactatactacaaggctacagtaaccaaaacagcatggtactggtaccagaacagagatatagatcaatggaacagaacagagccctcagaaataacgccacatatctacaactatctgatctttgacaaacctgacaaaaacaagcaatggggaaagcattccctatttaataaatggtgctgggaaaactggctagccatatgtagaaagctgaaactggatcccttccttacaccttatacaaaaatcaattcaagatggattaaagacttaaatgttagacctaaaaccataaaaaccctagaagaaaacctaggcattaccattcaggacataggcatgggcaaggacttcatgtctaaaacaccaaaagcaatggcaacaaaagccaaaattgacaaatgggatctaattcaactaaagagcttctgcacagcaaaagaaactaccatcagagtgaacaggcaacctacaaaatgggagaatattttcacagcctactcatctgacaaagggctaatatccagaatctacaatgaactcaaacaaatttacaagaaaaaaacaaacaaccccatcaaaaagtgggcgaaggacatgaacagacacttctcaaaagaagacatttatgcagccaaaaaacacatgaaaaagtgctcatcatcactggccatcagagaaatgcaaatcaaaaccacaatgagataccatctcacaccagttagaatggcaatcattaaaaagtcaggaaacaacaggtactggagaggatgtggagaaataggaacacttttacactgttggtgggactgtaaactagttcaaccattgtggaagtcagtgtggcgactcctcagggatctagaactggaaataccatttgacccagccatcccattactgggtaaatacccaaaggactataaatcatgctgctataaagacacatgcacacgtatgtttattgcggcattattcacaatagcaaagacttggaaccaacccaaatgtccaacaatgatagactggaataagaaaatgtggcacatatacaccatggaatactatgcagacataaaaaatgacgagttcatgtcctttgtagggacatggatgaaattggaaatcatcattctcagtaaagtatcgcaagaacaaaaaaccaaacaccaaatattctcactcataggtgggaactgaacaatgagatcacatggacacaggaaggggaatatcacactctgaggactgttgtggggtggtgggaggggggagggatagcatcgggagatatacctaatgcttgatgacgagttagtgggtgcagcgcaccagcatggcacatgtatacatatgtaactaacctgcacaatgtgcacatgtaccctaaaacttaaaagtataattaaaaaaaaaaaaagaaaatgctttgtcagattttcatgttaatccagctgatactgaaattgtttaaaataggttataaccatgcttgctcccatattcctgggaagacaattaaatcttcaggtacattttgtcacctggtgggccatttaaacattttataaaggaatttcattcaattgttattttcactgcaggttttctggttgtataaaagctttcccattcaagagggctgatgttataacagtaaattattatgctacagtatattttcaccaggtaattaaagctttttatggtttgaattttttggaaacatcagagaaagaattgtccttgccatccacactacaacaaatcttcaggaccttgggctttgggttcatggtctaacaactgagaagggccccaccacagttttggaactgtgcaccactggaacctttgatgtaaagctaacaagggaaatttctcccaggaaaaagatggcatccttcatgtgaacagcttttcccaagttcacagattaagacttctactattatgaaactcttatctttgaatattttttttgtgattattcttctatgaacaatagaagtggacaaggggtttgttatatgcactaatggggtgtacctttatttgtgaatgaattttcagtcagctttatacaaggattcccttatactttgacagataaaagatgacagcccaatctaggcaagaaactttaatggtacatacgttgcatcataatcagtcaaaaacaaaacattggtttacttctcttaaccctcataatgggttaaagagaacattgtcaggagaccttcactattctagaagggcatcatttggtaagtcctttttccttggtttagaataaaagaaacagtgaatagaaatgtatctcccatgataggctctataggaaattctactgtaaaggctacagctacacaatagccttaaaatctcttgtgaaagttatgataaaattcactgaacagagaagtatctgtgcagccactggcacttgtggcctataaggaaatacatcaaataaagattacaaaaattcagtgataggggattaacaaagagactacttaagtaagtaaactttcattatttaactctttttttaatctatttgattttaggaggtttggtttattgggaccttggataaggagcatattctgaactcttggtattatcctcccaatagtcataataatagtctccctggtgcactgtattctctcaaaggttttaaatgattgcatgcagccatctctagaatgtcatatggcctctcttcaactggaatgacaggagcttaaagaaatgtgtaaccatgaggacaccataacctataaatgacttgctgagaccagaaacccaaaatgatggcaactgagattggcgctagggcyctaacttagcgctagggcactaagtgagagtgtgaccaaaaaagggggaatttttcaaacaaaattctaggaggccattgctttgaactaaactcaagcgctaagcccctgcagatcaaatcaaaccaaaacggagtcatttatgctaagactttaaggaaacacatagattctagaacagaccacgttttgtttttttctcctgcaaattactatgacaaacatttctgagarcattggtatccaccctctgaagttcccattaaatcttttaaccaaatttatttcctctcactagatactgtcaagtttcagatgatcattcaacaaaggttccagccaggtacaggcgaagacatcatccctggccatcaagaagctaccctgcctccactrgatagagcagttcggtgatccccggtaggtagggactatgtcccgagccagcatgaagaagctacagaaaaaggacaataggtccatctgcctcccataaagattcattgtaaataacatctctcaggggggagatgaggcaggaaatagggtctggaggcataaaacataaggccrattcacacttcagctataacaggaaatatcctcttcataggatgtaaacygtaaatgagtttgtcactttacttcatcctctccatttacatagggcatacccaaagtaaccaattgaatcctctggggggctatttaaactcccccaaattttgtaatgcagyctttgagcccttatgctcgggcccactcccacactgtggagtgtacttccattttgcaataaatctcttcattccttccttactttgtttgtgtgttttgtccaatacttcgttcaagatgccaagaacctggacaccctccaccattaacagacaggctataaaacaagtctcaatacatttaaataaattaaaatcatcccagctggtatctgaacacattgtaataaaactagaactcaacttaaaaaatgtatggaatttaagcaacacctgtctaaataaccaaggagaaaagaagaaatcacaagaaaaattagaaattacttccagataagtaaagagggaaagaaaacataacacaatgtaggaaatgaagcgaaagcagtgcttagggggtaaatttatacctcaaaatasccataatgaaggagaagaaaaatattgtatcaatattttaaactttcaccttaataaattactaaaaaaacaggacactaaacctaaaacatgcagaaagaagaaaatcagaaacgctatggaagaaataaataaactagataatagagaaaaattaacaaaattaaaagttgattgtttaaaattatcaacaaaattcacaaaaatttagcctagtcaaaaaaataaatgaaagaaagaaacaraggaaagattcaatatcaacttgacaaaaataaaaaggaagaccttcagagggaaggcgttgagagtagacggaaggaagactcagatgctgggctgaagtgggaggaagctaggaaccctgmatggggctaccacacaccaggactcattcttagcacccagtgacttctggggaaggggtgagttgagcaagcaaggagcaacctgttctcaccatgggcctctggaaacctgccagcagaagactccacaacaccaacagacacttgagctgtcagggatttctgcttagaaaagtggttgggacataactccatctaatgcagagcccagaagatttggtgtttgagtgtctgtcggggggcatgataggaaacactcatcccccaaggcttgccttgcttttttaggagactttaacccaagggaaactgttgggcctgaacagtgaagagcagtcttgcccacaagataaagctggcctaggttgcaaaaattttctcccattttgtaggttgcctgttcactctgacggtagtttcttttgctgtgcagaagttctttagtttaattagatcccatttgtcaattttagcttttgttgccattgcttttggtgttttagacatgaagtccttgcccatgcctatgtcctaaatggtattgcctaggttttcttctagggtttttatggttttaggtctaacatgtaagtctttaatccgtctttttttaattttcttattatgctgaaatttattaaagactattgctttgactgcagaatatgtttaaatattttrtggaaggcaaagttttcattcaggaatgacaagtgcaaggaatgtcattcttttttcgtattttttattttattattattatactttaagttttagggtacatgcacacaatgtgcaggttagttacatatgcatatatgtgccatgctggtgtgctgcacccattaactcgtcatttagcattaggtatacctcctaaagctatccctcccccctcccgccaccacacaactgtccccagggtgtgatgttccccttcctatgtccatgtgttctcattgttcaattcccacttatgagtgagaagatgcggtgtttggttttctgttcttgcaatagtttactgagaatgttgttttccatcttgaattaatttttgtataatgtgtaaggaagggatccagtttcagctttctacatatggctaggaggttttcccagcaccgtttattaaatacggaatccttttcccattgcttgtttttgtcaggtttgtcaaagatcagatggttgtagatatgcggcattatttctgagggctctgttctgttccattgatctatatctctgttttgataccaggaccatgctgttttggttactggagccttgtagtataktttgaagtcaggtagtgtgatgcttccagctttgttcttttgacttaggattgacttggcaatgtgggctcttttttggttccatatgaactttaaagtagttttttccaattctgtgaagaaagtcattggtagcttgatggggatggcattgaatctgtaaattaccttgggcagtatggccattttcacgatattgattcttcctacccatgagcacggaatgttcttccatttgtttgtatcctcttttatttcattgagcagtggtttgtagttttccttaaagaggtccttcacatcccttgtaagttggatttttaggtattttattctatttgaagcaattgtgaatgggagttccctcatgatttggctctctgtttgtctgttattggtgtataagaatgcttgtgattttttcacattgattttgtatcctgagactttgctgaagtgtcttatctgcttaaggagattttgggctgaggcaatggggttttctagatttacaatcatgtcatctgcaaacagggacaatttgacttcctcttttcctaattggataccctttatttccttctcctgcctaattgccctggccagcacttccaccactatgttgaataggagtggtgagaaaggtcatccttgtcttgtgccagttttcaaaggaaatgcttccagttttttcccattcagtatgatattggctgtgagtttgtcataggtagctcttattattttgagatacatcccatcaatacctaatttattgagagtttttagcatgaagggttgctgaattttgcagaatctacaatgaactcaaacaaatttacaagaaaaaaacaaaaaaccccatcgaaaagtgggcaaaggatacaaagagacacttcttaaaagaagacatttatgcagccaaaaaacacatgaaaaaatattcatcatcactggccatcagacaaatgcaaatcaaaaccacaatgagataccatctcataccagttagaatggcgatcattaaaaagtcaggaaacaacaggtgctggagaggatgtggagaaataggaatgcttttacacggttggtggcactgtaaactagttcaaccactgtggaagtcagtgtggcgattcctcagggatctagaactagaaataccatttgacccagccatcccattactgggtatatacccaaaggattataaatcatgctgccataaagacatatgcacacgtatgtttattgtggcactattcacaatagcaacgacctggaaccaacccaaatgtccaacaatgatagactggattaagaaaatgtggcacatatacaccatggaatactatgcagccataaaaaatgatgagttcatgtcctttgtagggacatggatgaaactggaaaccatcattctcagcaaactctctcaaggacaaaaaaccaaacacctcatgttctcactcataggtgggaattgaacaatgagaacacatggacacaggaaggggaacatcacactctggggactgttgtggggtgggggcaggggggagggatagcattaggagacatacctaatattaaatgacgagttaatgggtgcagcacaccaacatggcacatatatacgtatgtaacaaacctgcacattgtgcacatgtaccctaaaacttaaagtataataataaaataaaaataaaaaaataaaaaaaagaactgacatcttcaaaaaaaaaaaagctgatctaagctgagcaccccttgtttagctggcttcttccagtgcctcagcctgcccatgtctgtttgcactgcagcctcaggtgcccaagtggggtaactccttggggcccatattgtagctcctgagctggcagaccatacttgaatacttgatcagccgagagcttcagtagtgcactctcacagaagtgcataagcctgatcatgccctttccacattgctgccttccccaagccactttgcctgcatccactcacccaaggccacacttcacatcactttgctggtgtgtgggcatgcgggcaaaccttgctyccacttctccaccagcacacatgtgcttgatcaccccagtgtgccaccgctaccggcatagtgcaccccgacccccaaaactcctgccatgccaccattgctgtcagagcatttgtgagcatggagaccatcagccttgtgctgaccagtgccctgcccatctgtgatactgctgctcatgcaaaactatgcaggaaccagcaggacctccctcattcctagtgacaggtgccacccatataaatgcatgcatagagggaacagtcccacacctgtcattatctagcccccgtactaacaccaccactattgcaaacaaaaacagacactggcagggcccccccatgccatgctgccactgctgccactgtgaatgcccacacagaggccaggaaaccttcacccatcagcactttgctaatcccaaggagtgtgcacccagcctcactgttgctgctgctggcatgtgcaaatacagacggatcctgctaccaccattctatgaagcactgtggctggcaccatcttttggattattgtgaccagcagtccagaaacaactcagcccagccagcatgagagtttgctaacctccaggggcaacagaacaaagctagaggtctaatacaagtccccagagtgacaacacacagtctgggagtcctcagctgagcgttggcccgctaaaattctccagaaacaaattaagttgactaaacccaccttacaccacaatcaaacacccaaggacattgaatactataaaagaaaaaaattccaaagattaacaacttcaaagattgctggaataaaaaccccccaaaatgagaaagaaccagcacaaaaactctgccaactcaaaaagccagaatgtctttttccctccaaacacctgcactattttgcagcaagggtttctaaccacactgagatggctgaaatgataaaaatagaattcagaatatagatagaaatgaaggtcacaggcataaaggataaaatgaaaaaaaatccaaggaatctaaagattacaataaaataatayaggatcttataggtgaaatggctcgttataagaaagaaccaaacaaatctgatagagmtgaaaaacattctaaaaaaatttcataatgcaatggcaagtattaacagcataatttaccaakctgaggaaagaatctaagagcttggaaactggttctatgaaataactcactcagagaaaaataaagaaaaaacaataaagaagaataaacaaaaccttcaagaaatatagaattatgtagagaccaaatctacaattcatgggcatgtctgagagacagagagagaaatcaagcaagttggaaaacatataggatattgtccatggaaaaattttccaacctcattagaatggccaacagttaaattcaggagatgcagagaatcccaaggtcaaaatgaaatatatacatatgaactagagacaaaaggcaggtcacctacaaagggaatctcattaggctaataacaaacctgtcagcagaaattctataagccagaatatagccagaaaagattacaggcctatagtcagcatttgtggaaaaaaaaaaaaaaaaagattccctatttactaaatggtgttgggaaaactggctagccatatgcagaaaactgaaactgggccccatccttacaccttatacaaaaattaccttaagatggattaaagacttaaacataagacctaaaaccataaaacttctagaagaaagcctaggcaatatcattcaggacataggcatgggcaaagactttatgtctaaaacaccaaaagcaatggcaacaaaagccaaaattgacaaatggggtctaattaaactaaagagcttctgcacagcaaaagraactgtcatcagagtgaacagccaacctacagaatgggagaaaatttttgcaatctattcacctgacaaagggctaatatccagaatctacaaagaacttaaacaaatttataagaaaaacactaccccataaaaaagggggcaaaggatatgaaaagacacttctcaaaagaagacatttatgcagctgtcgaacacatgaaaaaatactcatcatccctggtcattagagaaatgcaaaccaaaaccacaatgagataccatctcatgccagttagaatggcaatcatttaaaagtcaggaaacaacagatgctggagacgatgtggagaaataggaacacttttacactgttggtgggagagtaaattagttcaaccattgtggaagacagtgtggtgtttcctcaaggatctagaactagaaataccatttgacccagcaatctcattactgggtatatacccaaaggattataaatcattctactataaagacacatgcacacgtatgattattgtggcactattcacaatagcaaagacttggaaccaacccaaatgctcatcaatgatagactggactaagaaaatatggcacatatacaccatggaatattatgcagctataaaaaagaataagtgtgtgtcctttgcagagacatagatgaagctggaaaccgtcattctcagcaaactatcacaagaacagaaaagcaaacaccgcatgttctcactcataagtgggagttgaacaatgagaacacatggacacaggaaggggaacatcacacaccagggcttgtcggggggtgggggctaggggagagatagcattataagaaataattaatgtcggtgacggattgatgggtgcagcaaaccgccatggcmtgtgtatacctatgtaacaaaactgcaagttctgcacatgtaactcagaacttaaagtataacaataataaaaatttaaaaaaatacaaaataaattgttcaaccaataattttatgtccagcccaactgggatttataagtgaaggataaataagatgcttttaagaaaagcaaattataagacaattagttaccatcagacctgccttacaagtggtcttgaatgaagtgctaaatatgaaaaggagataccattatcagccactacaaaaacacactgaagtacataaaccattaccattataaagcaaccacacaaacaagtctgcctaatcaccagctaacaattggtttaaatccgcatatatcaatactaaccttgaatgtaaacagactaaatgtctcaattgaaaagcacagagtggcaagtttgaaggaaacaatacccagtggtatgatttcttcaagagatccatctcacatgcaatgacacccacaggctgaaagtaaaggaatagagaataatctaccaagcaaacagaaaacagaaaataacaggggttgctattctaatttcagaaaaaaaaacaactttaaactaacaaacatattaaaaagacaaggaagagcattacataattctaagaaaatcactcaaaaccacacaattaaaaaaattaaacaacttgctcctgatttacttctgggtaaataataaaaattaaagccgaaatcaagacagtttttgaaactaatgagaatcaagatacaacacaccagattctcagaaacagccaaaacgatgttaagaggaaaggttatggtactaaacactcacatcaaaaagttaaaaagatttcaaattaacaacataacattgcatctagaggaactagggaaacaagagaaaagtaactccaaatctaacagaatacaagaaataacaaaaattagagctgacctgaaggaaattgagacatgaaaaaacatacaagaggtcgatgaattcagaagcttgtttttttttgaaaatctaagaaacttagaccactagctagattaactattcaaaaaagagtgaagatccaaataaacacaattacaagtgacaaagggaatattaccactgaccttaccgaaataaaaaacccttggagaccattatgaacttctctatacacacaaaccataagacatggaagaaattgatatattctttgaaatacacaaccttctaagattaaaccaagaagagattaaatccctgaacagaccaataatgagttctgcctaccaaccagaaaaatcccaagaccagatggattcagagataaattccaccagatgtacaaaaaagagctggtactattcctacggaaactaagtcaaaaaatcgaggaagggagactcctttccaactcattctatgargccagcatcatcctgatatcaaaacctggcagacacaccacamacacacacacacacacacacacacacacacacaacacacaaattagaggccaatacccttgataaacatggatgctaaaatactcaacaaaatactagcaaaccgaatccagcagcacattaaaaagctaatgtaccactatcaagtaggcttcatccccaggatgcaagtttggatgaacatacacaaatcgataaatgttatccactgcataaacagaactgaaaacaaaaaccacatcattatctcgatagatgcagaagaggctttcaataaaattcagcatcccttgattttaaaaaccctaaacaaactaggcattgaagaaacatactttaataaaagccatctatgacaaacccacagccaacatatactgaatggacaaaagttagtagcattccccttgcaaactgaaacaaggacaggayatcttctctcaccacatctattcaacatagtacaaaaaggcctagccagaacaggacatctaaataggaagagagaaagtcaaactctccttgtttgcagacaatatcattctgtacctagaaaaccctatagtctctgttccaaagcttcttgatacagtgcataacttcaacaaaatttcagaatgcaaaatcaacgtacaaaaatcagtagcatttccatacaccaacaacatccaagctgagagccaaaccaagaatgcaatcccattcacaataaccacaaaaagaataaaatacttagaaatataccgaactaagaaagtaaaagatctttacaacaatgcccataagagaaagcaggagagatctaaaatcaacaccctaacatcagaattaaaataactagaaaagcaagagcaaacaaattcaaaagctagcagaaggcaagaaataactaagatcagagcataactgaagaagatagagacatgyaaaaaaaaaaaaagtcaaaaaaatcaataaatccaagagcaggttttttggaaaaatcaactaaatagatagaccattagccagaataataacgaagaaaagagaagactcaaatagaagcaataaaaaatgatatagggaatatcaccattgatcccaaagaaatgcaaactaccttcagagaatactatagacatctctatgcaaataaactggaaaatctagaagaaatggataaattcctggacacatacaccatcccaaggctaaacaaggaagaagttgaatctctgaatagaccaataacagattcagaaattgaggcaataattaataagtgaccaacagaaaaagtccaggatcaggtagattcacagctaaattgtaccagaggtatgaagagaagctagtaccattccttctgaagctattccgatcaatagaaagagagggaatccaccctaactcattttatgaggccagcatcatcctgataacacagccggtcagagacacaacaaaaaaagagaattttagaccaatatccctgatgaacatcagtgcaaaaatcctcaatacaatactggcaaaccgaaaccagcagcacatccaaaagcttatccaacacgatcaagtcagcttcatccctggcctgcaaggctggttcaacttatgcaagtcaataaatgtaatctatcacataaacagaaccaacaataaaaaccacatgattatctaaatagatgcagaaaagggcttcgacaaaattcaacagcctttcatggtaaaaactctgaataagctaggtatcgatggaacatatctcaacataataaragctatttatgacaaacctacagccaatatcatactcaatgggcaaaaactggaagcattccatttgaaaactggcacaagacaagaatgccctctcttaccactcttattcaacatagtcttggaaattctgrccagggtaatcaggcaagagaaataaataaagcgtattcaaataggaagagaggaagtcaaattgtccctgtttgcagatgacatgattgtatatttagaaaaccccatcttctcagccccaaatctccttaagctgataagcaacttcagcaaaatctcaggatacaaaatcaatgtgcaaaaatcacaagcattcctacacaccaataacagacagacaaacagagagccaaatcatgagtgaactcccattctcaattgctactaagaggataaaatacctaggaaaccaacttacaagggatgtgagggacctcttcaaggagaactacaaatcactgctcaaggaaataagagaggacacaaacaaatggaaaaatattccatgttcattgatagtaaaaattaatatcatgaaaatggcattcctgcccatagtaatttacagattcaatgctatcctcatcaagctaccactgactttcttcacagaattggaaaaaaactactttaaagttcatatggaaccaaaaaagggcccacatagccaagacaatcctaagtcaaaagaacaaagctggaggcatcatgctacctgacttcaaagtatactacaaggctacagtaaccaaaacagcatggtactggtaccaaaagagatatatagaccaatggaacagaacaaaggcctcagaaatagcaccacacatctacaaccatctgatttttttacaaacctgacaaaaacaagcaatggggaaaagattccctatataataagtggtgctgggaaaactggctagccatatgtagaaagctgaaactggattcgttccttacaccaaatacaaaaattaactcaagatggagtaaaggcttaaatataagacctaacaccataaaaattctacaagaaaacctaggcagcaccgttcaagacataggcaagggcaaagactttatgtccaaaataccaaaagcaatggcaaaaaagccaaaattgacaaatgagatctaattaaactaaagagcttctgcacagcaaaagaaaccatcatcagactgaacagccaacctacagaatgggagaaaaattttgcaatctatccacctgacaaagggctaatatccagaatctacaaagaacttaaacaaatttacaggaaaaaaacaaccccatcaaaaagggggcaaatgatatggaaagacacttctcaaaagaagacatttatgcagccatcgaacacttgaaaaaatactcatcatcactggtcattagagaaatgcaaaccaaaaccacaatgagataccatctcatgctagttagaatggcgatcattaaaaagtcaggaaacaacagatgctggagaggatgtggataaataggaatgcttttacactgtttgtgggagtgtaaattagttcaaccattgtggaagacagtgtagtgattcctcaaggatctagaactagaaataccatttgacccagtgatcccattactacgtatatacccaaaggattataaatcatcctataaagacacatgcacacgcatgtttattgtggcattattcacaatagcaaagacttggaaccaacccaaatgcccatcaatgatagactggattaagaaaatgtggcatatatgcagcatggaataatatgcagccataaaaaaggatgagttcatgtttttttgcaaggacatggatgaagctggaaaccatcattctaagcaaactatcacaagaacagagttcttgtgatatattctcattcatgttctcacccatgttctcactcataggtgggagttcaacaatgagaacacatggacacagggcagggaacatcacacacaggggcctgtcggtgggtggggtgctgggggagcgatagcattacgagaaatacctaaagcaaatgacaagttgatgggtgcagcaaaccaacatggcacgtgtatacctatgtaacaaacctgcacgttgtgcacatgtaccctagaagttaaagtacaataaaacaaaaacagacacactgtctaatagaacagaatatagaattccaaataaaatcgatacatctacagtgaactcatttttgacaaacatgccaaaaacatacatagaagaaaggacagtttctttggttaatagtgctgggaaaactggatatccataatcagagggaagaaagtagactcttatctctcactatatataaaagcaaaataaaaatggattaaactcttacattaaagacctcaaactatgaaactattgaaagaagacgttggagaaactctccaggaaattagactgggctaaaattttctgagtaataccccacaaacacagccaaccaaagcaaaaatggacaaatgggataccatcaagttaaaaatcttctgcacagcaaaagaaataatcaaaaaagtgaagaacaaacccacagaataggagaaaacgttggcaaattatccatctgaaaaggcattaataaccagaatatataaggaactcaaacactcaatatgaaagaatttatttctctaattaaaaatgggcaaaaaatctgaatagacatttctcaaagaaaacatacaaatggcaaacaggtataccaaaaggtgctcaacatcactaatcatcagagaattgtaaatcaaaactacaatgaggttttctcacccctctcaaaatgatttttattcaaaaaacaggcagtaacaactgctggcaaagatgtggagaaaagggaacatttgtacactgtgggcatgtaaattagtacagctactatagagaacagtttggactttcctcagaaaactaaaaatagaactaccatatgatccaacaatctgactgcaaaatctgtatcccaaatttaaaaaaaaatagtatattaaatagatatcggaactcccatatttattgcagcataatggacaacagtcaagtgtggaagcaacttaagtgttcataaacagacagatggataaggaaattgtgttacatatacacaatggaatactatccagccataaaaaatgagattctgtcatttgcaactacgtggataaaattgaaggacattatgttatgtaaaataagccatgcactgaaagacaaatttgcatatttccactcatttgtaggagctaaaaattaaaacaattgaactcacgaagatatagagcagaatgatggttactggaaactgggaagcaaagtgggtgggagaaaaagaggatggttaataagtatcaaaatagaatgaataagatctagtatgtaacagcacaacaaggtaattacagtcaataaaaagttattacacatttctttttctgtatcttttggaatagtttcagtagaattagtatcagttcttctttggatatctagtagaattcagctttgaattcatttggccctggcctttatttgttggcaatattttatttagtgattaaatctcagtgcttgttattgatccgttcagggcttctattttttcctgttttaattcgggargattatatgtttctaagaatttatccattttgtctagattttctagtttatgcatgtatagatattaataacattcttgaaagatcttttgcattttttgatatccattgtaatatctccagtttcatttctaattgagcttatttggatcgtttctcttctgttggttattttgctaatggtctaccaattttgtttatgctttcaaagaacaagtattttaattatcttttgtcttccttttttgtttcaattttatttagctctgctctgatctttgttacttctttcctttgctcgctttgggttaattttctcttgtttctgtttttttgaggcatgacattgagttgtcaatctgtcctttttcagacattttgatgtcagaatttaacacagtgagttttccactttgcactgcttatgttgtatcccagaggtataaataatttgtgtcacaattattaatttcaaaaaatttttaaatttttatcctgattttttttgttaacccaaaactcatttaagaacagattatttaatttctatgtagttgtacagttttatgtattgctgttaaagttgatttccagttctatttcactgtagtctgagaagatactttgatataattttgatttttctaaatttattgagacttgttttgtggcctgctctatggtctaccttggagaatgttccatgttctaatgaaaagaatgtgtattctgcagttttttggggaaaatgttctgtaaatatataagtccatttgttctaggacatgtttaagtctattgtttcttagttgactttctttcttgaagatctgtctagtgctgtcagtggagtattgaagtaactcactattattgtgttgctgtctctttcatttcttaggtctagtagttattgttttataaatctggtagctccaatatgaggttcatttaaatttatgattgtaatatattctctttgaactgatccttttataattgtataatgcccttttttttaactgtcattgatttaacgtctgtttagtctcagaatagttacttctctttgctttctgtttccatttgaattgaatattttttccccaatccttttccttgagtttataygaatccttatgtcaggtgagtctcttgaagacagaagatatttggtaggtggatttttatccattctcccattctgtatttttttaaatgtagcatttaggtcatttacattcaatgtcaatattgaggtgcgaggtactattctattcatcatattagttgttacctaattaatttttttcattgtgttattgttgtatagtccttgtgagttttagacttttagtaggttctactttgctgcatattgggctgttgcttcaggatttaaaacttcttttagcatttctcttttttaattttttatttcaatatttttttggaaaactggtgttgtttggttacaagaataaattatttagtcgtgacttctgagattttggtgcacccatcacctgagcagtgtacactgtatccaaggtgcagtcttttatccctcattgccccccactctttctcctgagtccccacagtctaatgtatcattcttatgcctttgcattctcataacttagcttgtgtatatgagtgagaacatacaatgtttggttttctattcctgaattacttcacttagaataatggtctccaattccatccaggttgctgggaatgccattatttcactacattttgagcagtatttgatgggatatatataccatattttctttatccactcattcattgatgggcatctgggatggtttcgtatttttgcaattgcaaattgtgctgctataaacatgcatgtgcaagtatctttttcataaaataattccttttcctttggatacatgactggtagtgggattgctgggtcaaattgtagatctacttttagttcttaaaggaactgctacactattttcgatagtggttgtattagtttacatttccacaaacagcgtaaaagtgttctctccaccatatccacgccaacacctatttttttcttaatttttgattatggccattcctacaggagtgagatggtatcgcattatgttttgaattgcatttcctgataattagtgatgttgagcattttttaatatgcttcttggccatttgtatatcttcttttaagagttgtctattcatgtcctttgcccacattttgaatgggattgtttgcttattccttgctgatttgtttgagttctttgtagattttgaatattagtcctacgttgaatgtatagattgtgaaaatttctcccactctgtgggttgtatattaactctgctgattatttcttttgctgtgcagaaactttttagtttaaatccaatctatttatctttgtttttgttgcatttgcttttaaattcttggtcatgaagactttgcctaagccaatgtctagaagaatttttctgatgctattttctaaaatctttatggtttcaggtcttagatttaagtatttgattcactttgagtttatttttgtataagatgagaaatgaggatttagtttcattcttctacatgtagcttgccaattatctcagcaccattcactgaataaagtatcctttccccactttgtctttttgtttgctttgtcaaagatctgttggytgtaagcatttggctttatttctgggttctctattccattccattggtctatgtgcctattttaataccagtactactttgttttggtgactgtagacttgtagttattttaaagttgaggaatgtgatgcctccagctttgttctttttgcttagtcttgctttggctatgtggcatcttttttggttccacatgaattttaggattgttctttctagttctgtgaacaattatcgtggtattttgatgggaattgcattgaatttttagattgcttttggcagtattgtcattttcacaatattgattctacccatccatgagcatgagctgtgtttccattagtttgtgtcatttataatttcattcagcagtgttttgtagtttgttatttagaaatcttttacctccttggttaggtatattcctaagtattctatttccagttctcagagggaatgttttcaatttttctccattcagtataatattggctgtggctttgtcatagatgcctttgaactaaatgctccacataaaagatatagaatggcaaaatagataagaattcaccaaccaagtatctgctgtcttcaggagactcatctaacacaaggaatcacaggaagcagactatctttgggtccttggttgtgtttctgtttagtatgctggctttatgttggttggcctccagtcagaatgtggcactttcaagagtgcatcagctgcagtcctatagagatgatgaaaacttgccctacagatgcctggttaagtatttaggtttctcatgcagtggacagggccacagagcttccaagagattatgacctttgtctttcactgccagagcaggtagagaaagaccatcagataagggcagggataggcatgtctgagctcagtctctccttgagtggggcttgccccatccgctgtgggggatgggagtgtggttcccagtccaatggagttatattcccaggatcttatggctgcctttgctgagtcatacaggtcatcaggaaattaggggaaagctggcagtcacaggcctcaccttgctcccgtgcagcccacagtcctaaagaccagtctcattcccatcatgcccccgcaaaagcatggagtctatttcgaggcagctggtaatcacagctgagaacctgcaacagaccatgagcctccctgttgagaaagctaccagactcacagtttttcagcatctcaggacacctgcagcagtgatccagtttcttcaaagggtctgtggattctcttggctttcctggtatgttcctgcagtagttcttggagcaaaagtttatgatgtaagtctccacatgctgttctgtccatctcagagggagatgcaagctagtcctgcctcctatccaccaccttaatccttcttttataatttcttatagtactggtttggtagtgacaaatttcctccacattttttgtctgtaaaagactatctctccttcatttatgaagctcagttttaccagatataaaattaytggctgataattattctgtttaagkaggctcaagatagaaccccactctcttctagcttgtaaagctactgctggaaagtccactgttagttagttttatatatatattcaagttgcctgatgcttttgtctcacagcttctagaatgctttcttttatgttgactttagatagattgatgactatgtgctttggtaatctttttgcaataaatttctcagggattcttagagcttcttatatttggatatctaaatctctatcgaagccaaggaaattttcctgaattattccctcaaacatgttttccaaacttttagctttttcttcctcaggaacaccaataattcttagggttggccattttacataaccccatatttcttagagactctgttcatttcttttgattatttcttttttatctttgtgtgattgggttaatttgaaagcctggtcatcaagctctgaaattctttcttctacttgttctagtctatttttgaagatttccaccatactttgtgtttttataagtgtgtctttcrtttccaaatgttctgaatggtttttgtttatgatatctatctctctggaaattttaaaatatttatactgatttttttttaattctatatgttgattttcaccttgctctggtatctctttgactagcttactaattaaatttctgaattttttatctggtacttcaaaggtttcttcttgttttggatccattgctgggcattagtacaatctcttgggggtgctataacatcctgttttgtcatattaacagaattacttttctgctttcttctcatttgagtacactacttctttaattttttttaattttattgttggtttgacttttaaaawagttgtttttcttcttaaggatatgactttaatgtttgtagtttattacagcttaatttggttcttgatgcttttaggggtaaatactctgtatgagtttcttggttatagagagtctttgtgtgctggctttctcagattctggttgtattaatagtagttatgaacttgttgtatgagcaagtttactatctcccatggggttggaatggcaaggatctcttgaagcttatctcattccttcgtggtgcacacctttttaatttaattttccccaccagtatcttatttactgagttgatggttcaggcttcaggccagtaggggaggtatccctggctaggaacttgttgtagctaaagcatttgggcagatgcaataaccaatggtggacaaagatcccagcattgatgaatgtgcctggggagctctcaattaaatgcacttaagtttcattggggtgaagggtcggagctgcctcaactcacttgccgggtcagcagaaaagctatctacctcgcagcctcattcctgacccaatgtcctggctattcaggtcastcaggcatctctttttatctgtagaaatgttgatgttcccagtaaaaatgaatagtaactctgcctttgtgcaagcctgaacctggggagtgctccaccagtggggatgcaatttttttttgagactgagttttgctcttgtcccccaggaaggtgtgcagtggtacgatctcagctcactgcaaccttcacctcccaggttcaagtgattctcctgcatcagcctcccaagtagctgagattacaggcatccaccaccatgcctggctaakttttgtrtttttaacagaaacggggtttcaccatgttggccaggttggtctcgaactcctgacctgaagtgatctgcccactcggcctcccaaagtgttaacattacaggtatgagccactgcgcccagcctgcaatcattcttaatcatttcagaaaggctgtctataggtgcattcatgctgaagtctcatgggagaagcctcagttgtgtctgcggtggtagacaagggggatgtggaacaagaatcttgtctccaagatcctttattggcatgaagtcttcctgactggagtagtggtgcagacattccctgctgcactcagcactgcaattgtgtctctgctgtatgaaacttcccaccagcagaaaaatctgagactcaaggcttgctgtccagattcttttgttttatgggtgttcccttgatgtggcaccttttcttttcccctaggagtaagagttcctaagaaccagactgcagtaattgttactgctcttcaagtgttagccacccagtgggactgccacactctgggcttgtgcttgggaatgtctgcagggatccgttgatgaaacctgtcatcaactctctcagcagtgggtaccagaaccagctctaatggaggtggcaggggagtgacatagactgtgaaattccttggttgtagataggcttagcgtgctggctttcacaaatgttggtcataattgtagtgaacatatcacataaacagattcaggacttctggttagccagtgtgttgcaggctgtggtgatagctgaggccatgcagctgttttctccttcctggtcacagtgttattctacctagaaatgctgtaatggactgtgttggttgtcctccagcctggaggtggcacttgcaaaagaacaccagctccagtagtagtggtgagatttgagcttttcctaagttgcccagggagtgtattctggtttctcaggtgatgagcagggctaaagctcccaaaaatttgtcattcatggtaagctaccagggcagatggaggcacaaccaggttagggataccattaggcaggtctggactcaaactctccttgggagtggcaagccatggcccctaagaagtcagggggtggtactcaggctgctggggtaatgttccagaagggattataaatgtcccttctacacagaagagttcacaaagggagtggggagtagcaggtggcagtaagattcatgcagctccaatgcagttgacaaagtaaatctcacttctgcagtgctccactaacagcaccaggataagatcctggcagtctgtgcacagaactcagtcctgcccaaagcaatgagcttttcccacagagatagcaacagcaggtttcaggccacttgcctccttgtctggccacaagatcagtcacccaagtcccgtgtttgtgtctgcagcacatttctcactcaccccctgagttctggtcaagggagttttgccccactcaagattatattaagaaattcatttgggagcttctttcaccctgtgaccattccttgagctagttggctgactttcctagcatcttgtgtgagatataattaggaataacttccctctgtccatgatggagactggaaatgcctgcaaggcacttcccactgctccttatacttttatattccttgccactccctaaatcagttccagctctgggtagggttaagaccttttcctgtggcctcagttttcagttccccagtggagatgtgtattctggargcagtctctgtccctatcacactctggggacttacagtttttcacctgtctcacagagtaggctgcatcctgtcacttttttcaaagggcctgtggatttttttcttttaatgttaaattcctgcattgcttattggataaaagttcacagtgtgaatctctacatactattctgttcttccaagtgggagaggcaggctaacactgcctacaatctgccatctaggaaaataatccccatcacttttattaaacattatattgaaggttccagccaatgtaataaggaaaaatgatatcagaatagagagttaaagtgcttttattattattactgaaaaataaataattagagtaagctttgaattcaaggaagcccaaataaataggatttgtaggacaaagtattgaaaactagaaagctgcggagtgagaactgcaaatgagaaattactgaaagctggagaaaggactacatagcagaattagatacaaaaatccacagctaatacagggccaggaatactgtctgtgcgcaccacccaaagtgaaaacttcattggaagttgtgttgaaaaataagaactttttttttctcaatggtgggggaaaaaatccctatactaattgtattttctcaccctcataaagctaaaaagcaggaaaatccctacactaattgttgctattttctcacccttataaagctaaaaagcaagacctgaggggatcgaactgtttgaagcatggtaacttaatacaagaactaatctcaagagtacttatgggaataaaayatttccaacaccaggtgaatctctagatggaaatgagtcatttggtgggccctaagttatgctgattcagagatggctccaagggaaaaaaaaaaaactaaatacttaaaagcaacaataaggataataacaaaaacagtaacaaaagtataaaaaactgaacagagacaaaagtgactatacgttgcagggggaaaaacactacaaaatgagtactgtcaaatcactaaataagtaaaacaaaatgaagagcaaacaaaatgattcctgggtgggaaaataataatgtatacttgccatcatatattttatagtataatgtttgaataagaaattatgttacacaaaaatagaaaagtgtgatccatagatgaggcattgtcccagcaaaaagtgaaaattcagccagaattgtaaacatcctgaatattaaatgcacttttacacacaaataccttaagcaaagagtaaaatatatacagacaaaaagtgtttaagcacatgtaattatttggtgaccactgaattatgttgatattctatgtttgattcctgatttaataatgtatgtttttaatttattttttgttgttgttagggagtacagaaaaagttttgtcaaatttgttgatcattcacagatcaaattctttttgtttttgtattgttttctgctatttattgaactttgattctcatatttattattttcaccctttatgtttaggtatctcttcattttcttattttttaaaagtggaaaaataggttattgatatgagattattatattcaaatatatgtgtacagagcaatagctctttccctaagctctactgtagctgcattccttaaattttgatatattgtatattcattttgatttaccacaaagaattttctaagtttatgattacttatttgacccatatgttctctagaagtgcattgtttaatttttacaatgtttaaattttttaattgtttttacaattgtttaatttttacaatttttggatttcttaacattccttcatttgatgacttcctgtttaattccattatgatacaattacatactttggataattcctattcttttaactccattgagattttcgctaaggcctatcatatgtctgttatatagaatgtcccatgtttacttgagaattaaaaataactaataggtactaagcttaacacctgggtgatgcaataatctgtacaacaaaccctcatgatacagctttacctatacagcaaatctgcacatgtgcccatgaacttaaaataaaaattaaatataattaaaataaaataaaattttaaaaagagaaatgtctatcgggacaaatttatcagtttttgttctatgtattttggtgcatcttctaagtaccaacacttttataatttgtatatcttcctggtgattttatatttctatcactataaatgtatgttcttgtctctggtgaattttatactttaaattttctttatgtaatactagtatagccacttaagtttttcggttattgttttcatggtatatatttttctgtcatttacattcaatctctttatgtttttaaaacttaagtgtgtctctggtagacagcaactagtagatatattaattcagcctatttatgttttcgatggagtgtttaatccatctatagctaattttattattaatatggttggaattatgtcttctatgtgttccatacatgtgtgtgcttgttttgttcctctgttcctactttactagcttattttgtaccaaagagatattatttaatcatcatgtatttgttgactttttaatttaaattcttacttttattttttaattgtggcaaaatatacacagcataaaatttaccattttaactttttgccagtatacagttcagaagcatttgcacatccaccttgttgtgtaactatcatcacgatctatctccaaaacattttttattttccaaaactgaaactcggtgctcagacaaagatttcatgatgaagatgccaaaagcaattgcaacaaaagcataacttggcaagtgggatctaattaaactaaataatgtctgcacagcaaaataaataatcaacagaataaacagcctacagaatgaaagaaaatttttgcaaatgattcatctgacaaaggtctaatatccagcatctataagaaactaaaacaaatttatagtataaaacaaataaccccattaaaaagggagcaaaggacataaacaaacacttttgaaaataagacatacatttggccaatgatcatatttttaaaaactcaacatcactgatcattagagaaatgcaaatcaaaactacaatgagatatcatctcacccagtcagaatggctattattagaaagtcaaaaaataacagatgctggcaagattgtggagaaaaaggaatgcttacaaactattggtggaactgtaaattagttctaccattggggaagacggtatggtgattcctcaaaacctaaagacagaaatagcatttcacccggcaatctcattactgggtatgtacccaacagaacataagttattctattataaagacacatgcacaaatgtgtttactacagcactattcacaatagaaaagatatggaaacaatctaaatgtccatcttattcacaatagcagagacatggaatcaatctaaatgtccatctataatagactacataaagaaaatatggtacatatacaccatggaatagtatgcagccataaaaaagaatgagatcatgtcttatgcaataacatggatggagctggaggccactatccttagcaaacaaaggcatgaactgaaaaccaaataccacattttctcacttaaagtgggagctaaatgatgagaacacattgacacatggtggggaaacaacacacactggtgccttttggtgggtagacagttgggggagagagaggaacaggaaaaacaactaatgggtaccaggcttaatacctgggtgatgaaatgatctgtccaacagatctccatgatagtttacctatgtaacaaacctgcacatgtacccctgaatttaaaataaaagttaaaaaataaaacaaaataaaacaataaactctgtgctcattaaacactaaataaccacttttccttacacccagtccccatccatcacaattctgctttctgtctctataaatttgcccctgcaggtacatcatgcaagtagaattatgcaaattgtctttctctgactggcttattttacttagcatcatatcttcaaattttatccatgctgtaacaggtgtcacaatttctaaggttaaataatgtcacattttatataccacattttgtttatccattcctccaatggtggacacaggctgttttcaccttttggctaatgtgaatatgcagctatgaacaaggtatagaaatatctgagttcctacttttaattcttttgagtatacactcagaaaatcttactcagctagatcatatggtaaggttttttttcaaaaatgtcacactgcttccatagtggctacatcattgtacaatgtcatcaacaatgaacaaaagttaaaatctgtccacattctcaccaacactagttccttcttattttataatagccatcctactggatgtgaagtagtatctccttgtagttttgatttgtattttcctaatgattagtcatgttgggcatgttttcatgtgcttattggccattggtataattttttttgtagagaaatgtctattcacgttttttacccatattttaaaattaaactgttttatatatatatataaatacatgtgtgcacacacatacatattttgtagtatgcaattcgaaaaaaaagaaaaagttagggtaggcagaaagacaggagaaaaagaagttatctattaaatacagcagcataactgagtcacagtttacttaactaacctgatctaaaacaagcagtttctttgctacatcattaactagctaagtcatggttactttcaacatgatagtcaagaaatccatttctgtttttttttttttgtttactctaaagtcttgttgtaacatccaataaaccattacaacaattaagataacaaacatgtttatcaacaccagaagttttctcatgctcctctgtaatccatccccactttctgtcccagacaatcactgaccttttcctgtcataatttttttaaattctaaataactagacttatatarcatgtaaccatttcacacctgaatttttaacttagtgtaactattttgagagtcatctgtgttgttgtgtgtatcaatacttggctcctttttattgctgagtagcattccattatatgaatatatgataattcatttatcaattcaccttttgataaaaattcgtgttgttccagctttttatttttatacataaggttacaatgaataatcatgtacaagcctttattttattttattttaktttagtttagtttaagatggagtttcactttttctcaccaaggctgtagtgcaatggcacaatcttggctcacttccacttccgcmtcccaggtttaagcaattctcctgcctctgcttcccgagtagttgggattacaggcacccgccacaatgcccagctaaattttgtatttttagtagagrcagtgtttcaccgtgttggccaggctggtctagaactcgtgaactcaggtgatccgcccacctcggcctcccaaagtgctgggattacaggcatgagccaccacgccggtcttacaagtctatttattgacatttcatttctctcagtaaatactcaaaaataaagtgtctgrgttgtgtggtagttgtatattatttgttaataaataattttcaatttttatttttaattttaaattgacaaattatagttgtatatgtttatgtggtacaaaatgagkttataatctatgaatataatgtgtaataattgaataagtctaacatatctatcacctcaaatacttatttttgtggtgagaacatttgaagctttcttagctattttaaaatgtacattattatctactatattctacatggtatgcaatatattggaatgtaaaaaaaaagcgcaacacttattccttctatttaattgaggttttgcacctcttaaccgtaatttctttatttctcccagtttccaggcctctgataatcacaattttactatctgattctttgagttggattgttttagattccacattaagtattgtgatatttgtctctctgtgcttagcttatttcayatggcataatgttctccaatttcattcacatagtcaaaattgacaatttttttgtttgtttgttaaggctgaatagtatttcattgtgcatacaggcagacctcgtagatattgcaggtttggttccagaccacagcaaaaaagcaaatattacaataaaacaaattacacaaagtttttggttttccagtgcatataaaagatgtgtttacattatactgtagaccatttgtgtgtacaatagcattatgtctaaagtacaatgtatataccttaattctaaaatattttattgctaaaagtgctaaaaacttatctgagctttcagggaatcatattttttaatgatggaagattctgcctcaatgttgatggctgcttactgattagggtgaaaattgctaaaggtttgagtgctggtgacaattacttacaaaagacaaacatgaattttgctgcattgattgaccattcacaaaacatttctctgtaacatgccttggtatttgrtagcattttatttactgtagagcttcttwcaaaattagttaatcttctcaacttctcacactttattatcaattaagtctatgtaatattccaaatcttttatagtcatttcaaccatgttcacagtatcttcatcagaaatagataccatctcaagaaatcactttttttgctgatccataaaaagcaactctttatctatttgagttttactatgagattgcagtaattcagtcacatcttctagatccacatttaatactagttctcttgctatttccaccatatctacagtttcttactccactaaagtcttgaactcctctaaatcattcatgaggattgaaattaatatcttccaaactcttgtcaatgctgatattttgacctccttccatgaaatattaaagttttaatggcatgtagaatggtgaatcctttcaagaaggtttttagtttactttgctcaggttcatcaaaggaatcactatctatggccgctatagccttactaaatatatttcttaatgaataagacttgaaagtcaaatgtacttttagacccatggggaataaaatgaatgttgtgttaccaggcatgaaaacaacattaatatccttctacatctcaatcagcactgttggctgaccaggtgcattatcaatgagaagtaatattttgaaagaaatctttctttctgagcagtaggtctcaacaatgggcttaaagtattcagtaaaccatactgtaaatagatgtgctttaatattgactttgttgttccattgataaagcacagtagagtagactcagggtaattcttaaaggctctaggattttcagacaggtaaataagcattgtctttacctttaagtcacaagctggattagcctctaacaagagaatcagcctgtcctttgaagctttgaagccagatattaacttctctctgttatgaatattctattatatatgtcatcttcttccaatataaggctgtttaacctgcattaaaaataaaatrtttactgcagccacctttgtcaattatcttagttaaatcttctaaataatttgctgcaacttttgcatcaatatttgctggttcacatatccttctatgttgtggagatggcttctttccttcaaccttatgaaccaatctctgctagattcaaagttttcttcttcagcttcatcacctatctcagccttcatagaatttaagtgagwcagggcattgttcaggattaggttttagcttgaaagagtgtaagaactgatttgattttctatccagatcactaaaactttgtccatatcagcaataaagctgttttaccttcttttcattcatgtgttcactggagtagcattttaaatttccttcaggaaccattcctttgcattcacagcatggctgcttggtgccagagtcctagcttttgacgtgttttgggttttgatatttattactcataaaactttgtctcttctaccttttgatttaaattaagagacatgcaactctttctttgacttcaacacttagaggtcattgtaggcttattaattaacctaattttttaaaattattattatcattattttttattgtattttaagttctagggtacatgtgcacaacgtgtaggtttgttacatatgtatacatgtgacatgttggtgtgttacacccattaactcgtcatttacattaggtatatctcctaatgctatccctcccagctcccccaaccccacaacaggccctggtgtgtgatgttccccttcctgtgtccaagtgttctcattgttcaattcccacctatgagtgagaacatgcggtgtttggttttttgtccttgtgatagtttgctgagaatgatggtttccagcttcacccatgtccctacaaaggacatgaactcatcattttttatggctccatagtattccatggtgtatatgtgccacattttcttaatccagtctatcattgatgggcatttgggttggttccaagtctttgctattgtgaataatgccacaataaacatacatgtgcatgtgtctttatagcagaataatgtataatcctttgggtatatacccagtaatgggactgctgggtcaaatggtacttctagttctagatccttgaggaatcaccacactgtcttccacaatggttgaaccagtttacagtcccaccaacagtgtaaaagtgttcctatttctctacatcctctccagcacctgttgtttcctgaatttttaatgatctccattctaactggtgtgagatggtatctcattgaggttttgatgtgcatttctctgatgaccagtgatgatgagcactttttcatgtgtctgttggctgcataaatgtcttcttttgagaagtatctgttcatatccttttcctactttttgatggggttgtttgatttttttcttgtaaatttgtttgagttcattgtagattctggatattagccctttgccagatgagtagattgcaaaaattttctcccattctgtaggttgcttgttcactctgatgttagtttcttttgctgtgcagaagctctttagtttaattagatcccatttgtcaattttgacttttgttgccattgcttttggtgttttagacatgaagtccttgcccatgcctatgtcctgaatggtattgcctaggttttcttctatggtttttatggttttaggtctaaaattaagtctttaatcgatcttgaattcattttcgtgtaaggtgtaaggaagggttccagtttcagctttctgcatatggctagccagttttcccagcaacatttattaaatagggaatcacttctccatttcttgtttttgtcaggtttgtcaaagatcagatagttgtagatatgcggcattatttctgagggctctgttctgttccattggtctatatctctgttttgataccagtaccatgctgttttggttaccatagccttatactatagtttgaagtcaggtattgcagctttgttcttttggcttataattaacctaattttaatattgttatgtctcaggaaataaggaggcctgaggagagggagagagatagaggaatagccagaaagtagatcagtcaaaatatgcatgtatattcattaaggtcactgtcttatatgggcataattagcctctcaaaacaatttcaatagtaagatcactaatcacagaccaccatgaaaaatataataaaatgaaaagacttaaaatattatgagaattaccaaaatatgacaaaaacattatgtgaacacatgttgttggaaaaatgrcactgataaatttggttgatgcaggattgccacaaaccttcaatttgcaaaaaaaaaaaaaaggcaataactgtgaagtggaattaaataaaacatgcctwtatataccactttatctttcttcattcatcttcatatctttctttattcccaccaacagtgcataagcatccctgtttctccacatccatgccaacattcatctgttgatagacactaaggtttattctataacttggctattacgaacaatgctgcaatgaacatgaaaatgcagacttcttttcaacatacagatttcaaccctttggagtaaataccagggggtgggattgctggatcatattgtaattctatttttatctttctgagaaagctccatacaatttttaaaatagttttactagtttacatttttaccaattaggtacaagtgtaccctgtttttcacatccttgacaacacttgtcatcattcatcatttttggtggagggaagcacactagaaataaaatatttatactctttttttatatttttttcactcattttatgcacaactgaaatagaatatgcattttaactttattttcaaggggtacatgtgtaggtttcttacatgaatatagtgcataatggtaaggtttgggcttctggtatacccatcattcaaacagtgaacattgtacccaatagatatttttacaacactcacactcctctccccttccccttgtttggagaccccagtgttcataacattcatctttgtgtctatgtgttcccattgtttatctccaactaataagtgagaccctgcagtgtttgattttttgtttctgagttattttacttaggacaatggcctccagctccatccatattctggcaaagaacaagattttattctttttatggctgcacagtattycattgtgtatgtataccacattatatttattcaattaaccagtgaagacaatgaggttaatctcatgactttgctactatgaatagagtaaacatatgagtgcagatttgttttttatacaataacttattttcctttgggtagatagtagttagattgctgggtagaatggtagttctattttcagttctttgaaatagtttcatactgttttacacgaggcttgtgctaacttaaattcccaccaacagtgcataaacatctgtgtttctccacacccgtgccaacatctattgtttttgattttttaataataattctgactagtataaactagtttctcattgttgttttaatttgcgtttatctgattattactgatgtgcattatttcatgtttcttagctgcttgtatgtcgtcttttaaaaaaatgctcattcttgttctttgtccactttttaatgaagttgtttgttttttcttgttgagttgtttgagttccttgaagattatttttgtcagaggattaatttgcaaatattttctcccactttgtaggttgtctgtttactctgttgaatatttctattgctgtgcagaaccttcttagtttagtttggtcccttttgtctattttgggtttttattttgtattcacttttgaggtcttatttataaattattttcctaaatcaatgaccagaagagtttctccttgattttcttctggaatttttatagtttcaggctttacatttaggtctttaatccattttgagttaatttttgtatatcatgataggtgaaggtccagatttattcttctgcatatggctggccaatttattcagcaccaattattgaaaaaggagttctttctttattgcttatttatgctggttttgttgaaggtcagttggtcataggtgtgtggctttatttcgggattttctattccgttccattgatctgtgtgtctattttggtactagtacaatgccgttttagttactataaccttgtagtatgatttgatgtcaggctatgtaatggctctagctttgtgtgttttgcttaggattgctttggctatttgtactcttttttgatcccatataaactttatttatttatttatttatttgtttgtttatttattttgagacagtcttattctgttgaccaggctggaattcagtggcataatcttggctcagtgcaacctctgccttttgagttcaagtgattctcctcccttagtctctagagtacctggggtttcaggcacgcaccaccatgccaggttattttattttattttatttcgatttttagtagggatggggtttcaccatgttgaccaggctggtcttgaccttctggcctcaagtgatccactggactcagcctcccaaagtgctgggactacaggcatgatccaccatgcctggctccatataaactttagaattgtttattctaaagttgtgaaaaatgtcattagtaaattgatattaactgcattgaatccatagaytgctttgggcagtgtggtcattttaataatatttattcttctaattgatgagtatgggacatttttccatttgtatcatctacaatttccttcatcaatgatttctagttctccttgtagagactttaccttcttacttaaatgtattctggctttcttaaggccattgtaaataaaatttcattctcagtttggttctcagcttgattgttattggtgtatgaaaatgctactaatttgtgtacactgattctttattctgaaactttgactgcagattttgtcagttctaagagccttttggtggagtcctcagagtgttctaggtataaaatcatatcatcagtaaaaataggtaatttgatttaagttcttatttgaatgccttttattgctttcacttgtctcattgctctgtaggatttcttgaactatgttgaataggagtggtgagagtgcacaacctcatcttgttttagtctgagagaaaatgctccccactttttccatttagtataatgttggctgtgggtttgtaatataaggctcttattattttgagatacgtttctttaatgtctagtttggttttttagtgtttttatcgtgaaggaatgttggacttcatggaatccattttctgcatctattgagatgattatatggtttttatttttaaatctgtttatgtggtgattgatttattgatttgtatgccttgaaccatctttgcatctctgggagaaaatctatttgatcacaatgtattatctttttgatgtgctattggaattgacttgttagtattttgctcaggattttttcatttatgctcaccttggatatttgtctgtagttttctttcttgttattgtgtgtttgcctgatttggtatcagagtgatacaggctttgtagtatgagttagggagaaatctctcctctttggtatttttgaatagttttagtagaattggtactagagcctgcatgtacatccggcaaaatttggctatgaatctgtttagtcctggtcttctttgttgaaaaattttactactgatttgatttaattgctcattattggtctgttcaggatttctgcttctagttttaattatctatttaaatttttgtgagtacatagtaggtgtatatatttgtgaagtaaattagatgttttggtacaggcacataatgcataataatcacattataraaaatggagcatccattccctgaaatatatatcttttgtgttacaaacaatccaattataactctttttagttattctaaaatgtgcaattaaattattgtgttagactgttctcacatggttataaagaaatacctgagactgggtaatttataaagaaggttttgacagagctgacattgtctcctccacacgctgttacagcactttccagagccttctctctcctgtgcaaaatagcaactcttaaggaaaaactcattgtaccakttgcggaagaagaggcaacagtccaaaacaataagatcactgtagtgagtgttggacaagttggtatggcgtgtgctatcagcattctgsgaaaatctctggctgatgaatttgcttttgtggatgttttggaagataagcttaaaggagaaatgatggatctgcagcatgggagcttatttctcaagamgcttaaaattgtggcagataaagattattctgtgacygccagttataagattgtagtggtaactkcaggagtccttcagcaagagggggagaggcgtctcaatttggtgcagaaaaaatgttaatgtcttcaaattcattattcctcaaattgtcaagcacacttctgattgcacataattgtggtttccaacctaggggacattcttacrtatgttacctggaaaataagtggattactcaaacaccatgtgattggaagtggatgtaatccggattctgctagatttcactgccttatggatgaaaaatttggcattcatcccagcagctgycatggaaggattttgggggaacatagtgactcaagtgtggctgtgtggattggcatgaatgtgacaggtttttctctccaggaattgaatccagaaataggaactgacaatgatagtgaaaattggaaagaagtgcataagatggtggttgaaaatgcctatgaagtcaacaagctaaatggatatacccactgggatattggattaagtgtggctgatctcattgaatccatgttgaaaaatctatccaggattcatctcgtgtcaacaatggtaaaggggatgtatggcatcgagaatgaagtcttcctgagccttccrtatatcctcaatgyccggggattaaccagcgttatcaaccagaagctaaaggatgatgaggttgctcagttcaagaaaagtacagataccccgtgggacatccagaaggacctaaaagacctgtgactactgagctctaggctgtagaaatttaaaaactacaatgtgattaactctgagcctttagttttcatccatttactggatcccagtttgctttgatcttcttcaacgtgaatttgggctcacagaatcaaagactatgcttggtttaatgcttgcagtatgagttcttgaacaaataaaattaactattgtagtgtgtttctgaaaaaaaaaagggaaagcaagaaggtttaattggctcatgattctgcaggttgtacagaaagcatagcatcatctgcttctgaggaagcctcaggaagcttctcatcatggcagaaggcaaagggagagccgtaacatcacatggtgaaagcaggagcaagagactgagacgagaggtgctatacactttaaaatgactagctctcacaagaattcactcactattatgagagtaccaagggggaatactgctaaaccattcatgagaagtccacccccatgattaaatcacctctcaccaggtcccacctccaacactggggattacatttcaatataagatttggataggaacacacatacaaacaatatcaattataattgactgtagcccccctgttgtactatcacatactaggttttattcattctttctatttttttatacccattaactatccctacatcctccccaaccccctcctacacttcccagcctctggtaacaatccttctactcactatctcaatgaatttatttttttctatttcttcctggtcaatattggtaggttttatgtttccagaaatttatttatttcttctagattttttagtttgtgcacatagcaatgtacatagtagtctctgatgatcatttcgtatttctgtggaatctattgtgacctctattatttcttctaatatttatttgaatcttctctttcttcttggttaatctagctagtggtctataaatttcattattatttccaagaaaaaatttttgttaataatttgcacggtttttgtggtctcagtcttgtttattattgctataatctttgtaacttcttttcttaagctaactttgtatttagtttgttcttgtttctcaaattgcttgaggtgcaatgttaagttgttcatttgagatctttctatgcctttgatgtaggcatttaatgctgtcaactttcctcttaacactacttttgctgtatcccagaggttttgctatgttgtatctctatttttgttcattttaaaaacttgttttatttctgccttaattttgttgtttactcaaaagttattcaggaacaagttgtttagcttcagtgtacttgtatagttttgagagttccactcggaattgtttcttattttattttattgtggtccaagatgatacttgatagaattttgctttttattgaatttattgacttgttttatggccaaggataggaccaattttggaggatgttccatgtgcagatgagaaaaagtgtattctgcagttgctgggtagaatgttctgtaaatgaygtaaatgtctattagttccaattggtcaacagtctagtttaactataattttttgttaattttctgccttgatgctctgcctagtgttgtcagtgtggtgctaaagtcccccactattattttattgctgttcatttctttttttaagcctagtggtagttgttttatgaatctgagtgctattgtatttaatgcatacatatttagaatacttgttctattgaccactttatcattatacaaggctctcctttgtccttttttttactgttgttgatttagagtttgttttatgttttatgtgatatatgaacagctgctcctagttactttttttcatgtatgtgatatatcttttctcacatctttactttaaatctgtaggcgcctttagccattttctgtgtctcttgtaggcagaaggtggttgagtctttttcattgtatccaatttgccagtctatatcttttaagtggaacatttaaaccaggtgtgtttagagttaatattggtatcagtgaggttttctttttgtcatagtgtttttagttagctaatttatagtctccattttgtgacagctttataggatgtgaattttgcacttacatgtgattttatgattatgagtatcatccttttgctttcatgcttctaactcctttgaatatttcttgtagggctgatctagtggtgataaattcctttagcatttgcttatcttggaaagacttttttcaccctcatttatgaaacttagtttggcaggatataaaattttgactggcatttatttctttaagaaggctaaaaaggtctgtctcgctggcattccaggcgccactggtgtatgaaaaaaactcttgcaggtagtttggtgtctgtccaaatggctgcccagttttgtgctaaaactcagggccctggtggcataggcacctaagggaatctcctggtctgtgggttgtgaagactgtggaaaaagcatagtatctggggccagagtgcactatccctcatggcacagcccctcacagcttcccttggctaggggagggagttccctgaccccttgtgcttcccgggtgaggcaacaccccagcctgcttctgctcaccctctgtgggctgcacccactgtctaaccagtcccaatgagatgagccagatacctcagttggaagtgcagaaatcatccaccttttgcattgatcttgctgggagctgcagaccagagttgttcctatttggccatcttgacagtcaccagccccccatctcttatagcttgtaggctttctgctgagaaatctgctgttaatctgatagacttttctttataggttactttgtgctttttattctttcttttgtcttaactttggataaggaaactgtggtatacatatatgatggaatactactcagggatttttgtcaccagcaggagtgttttgcaagagctcctgaaagaatcactaaatatggaaaggaaatactggtgccaacaactgcaaaaacacattaaattataaagaccaataaaactatgaagaaactgcatcaactagtgtgcaaaataaccagctagtatcatgatgacaagataaaattcacacataaaaatattaaacttaaaagtaaatgggctaaatatcccaaataaaagacatagactggcaaattggataaagagccaagacccatcagtgtgctgtactcaggagacccatctcatgtgcaaagacacacataggctgaaaataaaggaatggaggaaaatttaccaagcaaatggagagtggaaaaaagcaggagttacaatcctggtttctgacaaaagacactttaaaccaacaaagatcaaataagacaaggaagggtattacataatggtaaagggatcaattcaacaagaacagctaactatcctaaatgtatatgcacccaacacatgagcactcggattcataaaacaagttcttagagacctacaaagagacttggactcccacacaacaatagtggaagactttaacactccactgtcaatactagacagatcaatgagacagaaaattagcaagaatattcaggacttgaactcagatctgggtcaagtggacctaatagatatctacagtattctccacccaaaatcaatacaatatacattcttctcagtgctgcatgcatggcatttattctataatagaccccataattgaagtaaactcctcctcagcaaatgcaaaagaactgaaatcataacaaacagtctctcagaccacagtgaaatctaattagaactcaggattaagaaactcactcaaaaccacacaactacatggaaattgaacaatctgctcctgaatgactcctgggtaaataataaaattaaggcagaaatcaagaagttctttgaaatcaatgagaacaaagagacaatgtaccagaatctctcggacacagctaaagcagtgttaagaggccccacccagtgaggagggattgctcaggttcagacctgaagaggcactctgactgcagtcttccactgctggtgtgttgggctgtggggaatacctcttgggacctggcaatcaaacacccctggctctagcagggtaaaagtgttacctggagctatagagatggctgccgctcttccccagttctagaagcttagtgtgttaggcagctagcagtcccagtgttggctgccacccttcccccaaggaactcagatggcttagacagcaggcagcaacagctgtgatgatggccacccctctgccaaggaactcagcaggcttaagcagattctagctgagtggctgttgagagtctgcacagctcctttgttgggaccctaggccccagtggcatgggctcatgagtaggatctttaattccatgggttgtacggttcttttgcacagaaactgtgcaaaagcacagtttcccaggctgggtagcacactcactcactgcctcccttgattgggggttgggggcttctttgccccatgtggctcttagaagtgccaccacaccacagtgctctttcttcctctctgtgggtcatcccagccgtctagtcagtcctgatgacagaacctggatacctcggttgctggtgcaggattcacacactgttttagttcttattgatgggagtctctgatctctgctatttcaagtcaaccatcatggtcccacttctccagatatctcttcaatatactgatttcctttcttttgggtatatacccagcagtgggattgctgtatcatatggtagtttaattttagtttttgggggaaacttcaaactgtcttcatagtggttgtattaatttacactcccaccagcagtgtacaaaggtgcccttttctccacattctcaccagcctttgttattgtctccttttgaatataaggcattttgactggagtgaggtgataactcattgcagttttaatttgcagttctccaatgatcaatgatgttgagcaacttttcatgtgtctgtttggcatttatatgtcttcttttgataaatgtctattcaaatcttttgcccattttctaaactggattattagattttttctatagagttgtttgagcttcttatatattgtggttgttaattccttgtcacatgagtagtttcaaaatattttcctccaatcttaagttgtctctgcattttgttgactgtatcattcattgttcagaagttatttagcttggtaaaatcttatttatcaattcctgttttggttcactgtgcttgtggggtgttgcttgagaaatttttcccctacctttgccctggaaacttttcctaaagttttcttatactaatttttcacattttgagatcttaaatttaaatccattttgatttgatttttgtatatggtgagacataggtgtctagttttatcattctgcatatagatattcagtttttccagcactatttattgaagagattgtcttttccccagtgtatgctattgacacctttcttgaaaatgaagtcactaaaaatgcatggaattgtttctgagttctgtattctgttgcattggtatatgtgtctgtttttatggcaggatcatgctattttggttactgtagctctgtaatataatttgaagtcagataatgtgactcttcccattttattctttttgcttaggataacattgacaattctggatttttaatgatttcataaaaattttatagaagcttttctatttatgtgaagaatatagttgatattaggttggtgcaaaagtaattgatgtttttgcacttagaaacaactgcgagcctacatctttttcccctgctggatgcttcctgccctcgaaagtcgaactccaagttcttcagttttgggacttggactggctctccttgctcctcagcttgcagacagcctgttgtgggaccttgtgatgatgaggaggagccaagatggccgaataggaacagctccggtctacagctcccagcgtgagcgacgcagaagacgggtgatttctgcatttccatctgaggtaccgggttcatctcactagggagtgccagacagtgggcgcaggccagtgtgtgtgcgcaccgtgcgcgagccgaagcag

SEQ ID NO: 93312 - DNA, 13993 bp, Homo sapiens
ggtgaggcaagagaatcgcttgaacccaggaggcggagattgcagtgagccgagatggcaccactgcactccagcctggtgacagagcgagactccatctcaaaaaaacccaaacaaacaaaaaacaaaacaaaacaaaattagccaggtgtggtggcgcacctgtggtcccagctacaaggaaggctgaggcaggaggatcgcttgagcctgggaggtcgaggctgcagtaaactgtgatcacaccactgcactccagcctaggtgaaggaaggagctgatcaacagtctcagatgccccagaggagctcaagaagaatgctgagcaaaatccagtggctttggcaatcaggaagtctcaggcaacctttgtgaaacagcaggtgagaggcagccaccgagttgtgagattaatgaaggccatggtgggcagaagtagaaggggtaaatcaagtccctcagagtttgctggttaagagaccaggcgcagcagcttgcacctgtaatcccagcactttgggaggccaaggagggcggatcacttaaggtcaggagtttgagaccagcctggccaacatggccatctctactaaaactataaaaattagccaggcctggtggtgcatgcctataatcccagctactcaggaggctaaggcaggagaatcgcttgaacctgggaggtggaggctgcagtgagccaagatcccaccactgcactccagcctgggcgacaagagcgagactgtctcaaaaaacacacaaacaaaaaaacaccatctagaaaggttagcaagatcacagaaggcttttgtttgttttgttgttgttgttgttaaatagaagtgatctaaacatgttattgctgagtgagtagggggcgggtggagaaaaatggggaggtttagagaatggaataaggagacaaccacaggagagccaaagggtgtctgggcagccaaatagaacccggtgatatcagcaggcacctttgccgtggacctgtcaccatgggcagtgacattccttagcatttcagagggagggacagactggagaagagggcattttccaaggctgaggattggcaaggcaagaatggcagagaatcaagggggattctaggctgctggaaactactggaaattggctgggagccagagccaggcagtaagggaagagtggtcagtggagggaaacagaggaggggaataggctgggagaagaatcctgaatggggagcgctggggttcctgcatgctgaggacgcagaacgctcccacagtggcggtggcgtggtggagggagagggggatgagagcaccatcagagagggcacttcagagtgtgagttcttgaactctctcaaatagcccctaatgatggtgacaggggatgtgagctgctcgtttgtgttttggcactgtgtcccacaggcatcttgtgaaaatgccagcaccacagcacagggagcacctggtagatcacagggcactggcgttttctgtgagtgagtcattggttttccatccagagctgcttcaggagatccaatgagttttgttggttatcgaggttctacctcctaagaatggcttcagagtcagaggcccagaggctaacatgagactctaaggcattgcaatgtcaaagggtggagggtgtgttatctctagtattcctcatgtccccacaaggatcgggagagtgggcaagagaagaccctcctctccatcatctccagatagaatgtaaggattagaaatcttgtcatcatcttgagtgcttagaaacacacctatgtttgaaagaatgagcataaaatggagaactatcacttgaggcaggggcaacctctgggggaagtggggctagaggaggctctgatgggagatggcacaatactcagatcttgccagttttccacttttgcaaagactgacctaccgtccaagacttacaggccgcctcatgatatgagaggctcattcaagcactgagtttacacacacatgcacacacacactctcacttgccacagccaccctaaatggggaagggcaaagggaggccctctgttccccttaacctagagggcaagggctagtgactcagtcctggctgggcactccgatgggcagctccctctcagcttccccttctgctgtggagctacaactgtccctgcctttgttccttcaattctcaagctccctgactcagcctcgttcctgaacttcccagcaggggacaaagcccttgtcagtggggtggtgtgggggcagtggcagtgagggggatctgggggaaagctgtagagtcagagttccagtccttttcccagtctcaaccttcagggtccctcagccttgccagttcagtggtcacctctaggctcctccccaacttgcccagatctctctctgaggccagactgatggggtggaaatggttaactagaaccttcctcccacccagctgggcaaagtctgacacctggtggccaaggtgagtaatggccagaaggccccttttcaagtcttcccggaactgctccagagcctggatggccaaggtgaaagaggaggtgactagagaagaaggtgtggagggtggtaggagcaggacagaagatgcagtggtagaaaaacccagagaccccatcctttccactcaagctgctgcgatggaagcacattaggccagagaacctggaccaggggaagagggagtgtctgggaaggcagtgagggactaggaaggactgcctgaaagaattctggcccacagggtgaggaatggggcccacggtgtgtgagtatgttgggggccggggccaggggtattctggctgcccagaatctcctgagtgggactgactttcagctcagggtgggtggcagggcccaagggcctgaggaaggggggtactggcgagagggaagaagagctggatccaccccacagcccactgggtcccaggcagctgctcccctctctccacctgcctccagcttcccagctctacctggctctccccacaaacctcatggtgaggtgggggaagggaatgcaggtgcagtgctgaggcccccattctaccacattgtctgagctaagccagacctaatccttcccttgagtgcagtcagcggtgggcctcagcccctgggaaggtgccgggttcctgtttcagttcttttctctcctggacccccaggactctgggcttggccctgaagcaagggtcttgggtattgttaccaggctgaggtgcaaaggtcactcctactagtctcatcaccagcctctgggtgtcggggctgacacaagggtctcaggacattcccccagggagagagaactcagcacccaacccagaactctggcctggccatccagtctgaagcctgaacaggctccaagacagcagtttagggaatgaggccaggatgctgcctgagtaggtgaaggggttctaggcaagaaggtacagaaggtggatggggttggacagcaaagaaggaaaagacctgaggacaggaaggtcaaggtccagcctagtcctcagcgcaccttagggattcaggtgctgagtcagggcatgccagttggacagggatggttccaaaatccctgggtgccaactctttcctaggggctccaccctactgccatctaagagagagcagcaatgctgcctgcagagagttccctcaactccaaggcagaaagccaggcctagggtgcctgcacttgagctgaccactctgaatctttttcttgggtgtgggggtagctgaagcctgagggagacatcttccagcctgggttggggcctgtgccaggcaaagctggggaagctggcagggacagcccagccaacatctacagagcagctcaggatgccagaggctgcccaaggagaaaaggcaataggcccaggcggtggtaggagctactgtggctgcccagcggcacaccccatttcacgctccctgggcggtggcagggccccacggctatcagctttcaggggygggagggactgggaatgaggaggggtctgccccacccatggctccctactccctcagggcttggtggactcaggaggtgggtgccacacacctctggaaacagcccaggaacccttgccaagaccctctggggaggggtagtcaatcccccagagcctagacgccatccctacctagcatgctcagcacctgactggactcagcacctaggcccttcccagccctggtagacagggcctccctgcttccatcactaactccgcagggacactgtctccctgaatgtgggccccacttagtccgcaaggcagatggggggattagactaggcccagcccaaacaatacagcagaaagggccctccagctccatgcagtgcccccacaagctccctcctctaggacgccgatggggagagccaggcaggacgtggaccctgaagacatggcctgctcctctgcctcccctctggtggtctcctttccagagcagcttcctcccttgtgcccacgtgtaccagtggcttagccctcttccagtgcagaacacccagaycccagagcagggaaaggaggaggcagaggcctctgagcaggcagcagcccaggagtctgtgccccaccctcccagtatccctggaaggaagaaccggatgggatctctggagggtgattagagctgggctggtccctgtgctggttcccagactcccactggccagtacttttgcctcctgccaggaagttggtgagggggaggcagcagtatgggtgagtcagtgatgacaggagcccaagggacaaaggtcatgggtggagaattgagagacattgtttacagcagtccacctcctccaggaggccttccaatgctaatcatccctgtggtcctaaccaatctctgacccaccctttccctcttctggtaggaattatagcctctcactgacaactgtgcatctgtctgccttgtgacagtgagctcctggggtgcaagagagactgtggtttgattggggccctacaatgcctgtgactatcagcagtgataatcatttagctatacttcctactttcaaaaactttttgacatctattttaattaacatgtgggaaagtgcttagaacagtacttggcacatggtacgtgcaatgagtgttaggtttattattaatattttctgctcagactcacattattgtgagagacagggcagattttgccagtgaagaactagggatccaaacacattgtggtggggggaccagacccttgctctgccttcctactcagtatggaatcttcctgactggtggggcgggccggacacgacttgggaccccaggagagtcaaaacggcaaacacttactcggactaagagtgggcagcatctttgggcacagactgtgagaaaggaggtttcagaacccatgggcttctccagccaggtctcctggggccagtgggggttgggtgggagccgggaaggggcctggattagcccaaactctcttcagacctccagacctgcccccacaaggcggggcgggccaaaggaccgagtgaaggctccagctggactctagggagttacaaactggccacggggattagcgaagctgaaaagaacatttgcctaggaagggaaaacgggaagtgagaggctgaagataactctcctgaagtctctcgggacccacagcagaccaatgggggccggggaaggtggtgaagtcggggcatcccgacaggtcccccgccccagcctgcccctcctcccgcggcccacagctgaggcaccgccccgcccctcaccctacactgcctaccattggctagcgccagggccccgccccgcataggcggcctgccattggctgaagtctttcctgtttgcgtgcttttgggggtgggggaggcgtccctccctggaccccggcgacttcctctctcggtttgtctgggtcatcttgtctgcccgccgctggcctggccccgtctgtctctctcagcagctgtctttctcgcgcccactggccggtctctcctcttccccgcagttgcctccttctctgcctgcctgggtggccgccatgggccggaagcggctcatcactgattcctacccggttgtgaagaggagggaggggcccgctgggcacagcaagggggagctggcacccgagctaggtctctgaggtgtgagggaggcaggaggagtggacacggaggggcctagaggaggcccctagaggggcggaggggccgatggaaagggaaaggtggcctgtcctcccctcccgacaccaggtctagctgcggggtggcagaggcaaagcggtggtgaggaaggctgggaggtgaggggcaggagactgaagccaacctcgtactgaagagcagctgtcattgcaggggaggagccccagccccsmgacgaggaggaagcggagctggagctgctgaggcagtttgacstggcctggcagtacrggccctgcaccggtgagaacccacccagccccacggaggcgcctctcccagccagtcacccacacgtctctgaagtcacccaagcgcttgcgtgactcygaccctcaggaactgtctccccccaacacacacattctccagctcagactctaccccaccccccacaagtctccagagtcttcttcccaccctggcagggatcacacggctgcagcgctggtgtcgggccaagcagatgggcttggagcctcccccagaggtgtggcaggtgctgaagacccaccccggagacccccgcttccagtgcaggtcagagacaggccgggagggctttcaggggagccagggccttctccaggcactgtcaccctgctgtcctgacctgagggagaaatggatggagggttggaaggccttgctgaacaggcaagaagattctatgaggtgcctggctcaggaggacacgccactataataattctttttttttgagacagagtcttgctctgttgcccaggctggagtgcagtggcgcgatctcggctcactgcaaactccgcctctcgggttcacgccattctcctgtctcagcctcccaagtagctgggactacaggcgcccgccaacacgcccggctaattttttctatttttagtagagacagggtttcaccgtgttagccaggatggtcttgatctcctgacctcgtgatcccacccacctcagcctcccaaagtgctgggattacaggcgtgagccaccacacccggccaataattcttacctctacaagctagtggggggcaaaggtacacccaggacccaaggaactatctatttagaactgaggggtttcccaaggactatgggcatggccaagaataagctggtgaaatcagatccagggactcaacaactgattctctgtttctctctctctctctctggggtatccctccctcccaccccatcttccacagtctctggcatctctatcccctatgaggcaccacgtaagacctcctgcccttagctctcttgctyaccacccaagaacctcaggacagaagcgagagcccattgctcctgctcagctcagcccggctgcggaggaacccttggcaggcagaacctggaggtgtcagaggctcaactcctccatctaaccagcaggctcccagagtccccggaagagcctgcgcagctgaagcagagtgcttctagatggagagtggtcactggggaaaaggacctggccatcaccttccaatacctgctgcctgtctccctgacccatgatytggcaagttaggcacagtcagacatggacagttgatccatgaggaaaagatgctctcccmcctaaggccaggaatytgagagcaggactggctgagctcccagggcaaggggttcactaatgcttatcaataaagaatattgagcctggaatcctgaccttcagtcctttactgtggccctgctttgactggcagtccctagcaagttaggagatgagagaggcaccactacagctcttttccttcaagaaagtcctaggccgaagagggaggagacagtcatcttgagacggatcaagtcctcggaagagctgagcgacctctggtgccccctggtggcccacagggaaactactcatgactcaccttctggagcagccagggaaaacctacctgactagccagccacctgccttgctaagcggtgcccacctcacaaacatgggtgctttgccagagaaggacccctggggtccatagctcatgaagtccaaacatatctatacattcccagcaagcacctctggcttcccacatcgggggccaccttgatccaaagcagggctggcgagggtctcaacttgcaggacctgctcagacatgaccatcatctgaggggctttggtaagaaactgatggctgggcgcggtggctcacacctgtaatcccagcactttgggaggccaaggagggcggatcacgaggtcaagagatcgagaccatcctggctaacatggtgaaaccccatctctactaaaaatacaaaaaattagccaggtgtagtcccagctactcaggaggctgaggcaggagaatggcgtgaacccgggaggcagagctggcagtgagctgagaccgcatcactgcactccagcctgggtgacagagagagaccccgtctcaaaaaataaaaaaatacaaaataaaggctgggcgcagtggctcacgcccgtaatcccagcactttgggaggccgagggaggtggatcaggaggtcaggagatcgagaccatcctggctaacatagtgaaaccccgtctctactaaaaatacaaaaaaacttagccaggcctggtggcgggcacctgtagtcccagctacttgggaggctgaggcaggagaatggcgtgaacccgggaggcggagcttgcagtgagccgagatcgcgccactgcactccagcctgggcgactgagcaagactccatctcaaaaaaaaaaaaaaaaaaaagaaagaaaaaagaaactgatggtgctgggggatggaggagaactggctggagccagaaacaatgcccaggggacccagggtcagggtatgacatggagaatagagtcagtaaccgcttctatagtgttaccttcatctactgtggcagccctctatcctgggggtagatggaggcagcactagtaagttcttggaaacaggcctagagggcagctaagtggcctgtgtagcccccgtctgagcactgatcatgtctcaggtactttaaatgtattacctcgaatcctcctaaaaaaccttccaggtaggttttactgagggggaactgaaactaagaaaggttaagtaaagttgcccaaaagcacacagcaggcaagaggcagtgcagtgaccaggggccacttgcattaacctcttccagactatgccatacctcctgcccagctgctaagcactcactatgtgccaggcaccaaaggtccccttggggtattactaatggtcaggagatgggcaaaaacaaacacgtaagttaattatgacaggtagcagtcagtagtaagcaaaatcagagttgggatcagaaagggtccaaggatgccaggggcgctatgttagagagactggtcagggaaggccctctgctaaggtggcatttgagcagagacttgaaggaaggaagggagcaaggtctgcatctgagggttccaggcagaaggagcaacaaggagaagcttcctgaggaaggagtgtttccagcctgctccaggaaaggcactgaggaggccagtgaggctgggggccagggagtgaggaagggtagtgggaattgagggcagacaggcagcgggctggtccctagggccatgataagaaactggatttgattctgagtgagaggggaggatactggagggcttgaagccaataaatgacagagtcaagcttatgtttcgaaaacattactctgttggtggaaaacaagattgtggagctggggaaaacagaggtagcaaaaccactcaggaggctactgaagttggcctcatgagagctgagggtgatctggaccagcgtggggaggtggactgctcagaagtggccaggtacgctctgtatttttaaggaagagctgactggcaggacttgcctattggtcgactgtgggatttaagagggaggagccaaggataactccaaaggttttggtttgggcgactggaaggacagagttctcattactaagatgggaagacttgtgggaagggtggggcaggaatctggagctccatcttagacatgctgaagtatctgtgccacttccaaagggacatggggtataggcagtggatatgtaagtctcggattctgaggcattctaggtttaaaatataaacttgggaatcttttagatggccttgaaagctccaacagtggatgagatccccagagtgagtgtagagagagaagtgatctgagagatccagtagcgagggaacctgaggttaccggagatgaggaggcagttgtgtgagtgagatctttgtgagggtgaggagggccaggaaccaggatacaggaagagggtggccttcagtagacacatgcactgtgacaggaagggaggcagagaatatgagaggagcctcaggtagggggatatatttggggatgggaatattcaagaatcagatatttactaagagcctgacactgctgggagggctctgatgtttactaagtgcctatccatgccatctgctatgtgaaatgctgcacacatgttatctagttgaatcctgagaacaatctcattagggaagtactatccatgttttacagataaggaaaccaaggctgagaggaaaagtgccttgctcaatcagtaaacaccagggcctgaattcaccccgcacctgcactccagatgttggaggataagaatgttgtcgaggagataaggactacatatgtggcaagttagaaaaccatgtaatatgagtgctttcccgaggcaacctaggagtggcacagacactgaattgtctgagttctcagaaaggaaagagcaccatgggtgacagggacccgctgcaggggcctcgagcacagggactgcaaccttcctcccgctgcattgtattccccctgctgcacctcatctgcacctagccccttctaatcaggggtccctgtttctcaccttcccaccttccaccgcagggcgaatgcagactccccactgtaggggacagcaccatgcggaatgttcttagtcatttccttcatcaattttgcattctactccatatgtctggagtagttgtacttcttttttgacacagagtctcactctgtcactcaggctgaaatgcagtgggatgatcttggctcactgcaacctctgcctccagggttcaagcaattctcgtgcctcagtctcccaagtagctgggattagaggtacccaccaccattcccggctaatttttgtatttttggtagagacggggttttaccatgttggccaggctgctcttgaactcctgaccttaagtgattcactcgcctcagactcccaaaatgctgggattacaggcatgagacactgtgcccggcctggagtagctgtattaacataaaagtaggtgaaattatttataattaaataaaatgaagtctccaggaagatgtgccacatgtggcttatggctgctttcaggtacccctgatacatctactataccacctcactcagtttgaacagcacttcagaaatactaaaaagcatatatatatatatatatatatttttttttttttttttttttttttgagaaagggtcttgctctgttgcccaagctggagcacagtggtgcaatcatggctcactgcagcctcaaactcccaggttcaagccatcttcctgccttggtctcccaagtaactgggactataggcacgtgtcatacacagctaattaaaaaaaaatttttttttttttttagagagatagtcctgctatgttgcccaggctggtctcaaacacctgaggccaaataatcctcctgccttggcctcctaaagtattgggattacaggagtgaactgccacacccagccagagaatagtgttctagactaagggaatgagctgaacaaaggcaagcaggagggaattatgtgtgtgccacaggctaggtgcacagagctgtgaagtatataccacagaggtttccacataaaatcataaaaaactagcatttggctgggagcggtggctcatgcctgtaatcccagcactttgggaggccgaggcgggtggatcacctgaggttgggagttcgagaccagcctgacaaacgtggagaaaccctgtctctactaaaaatacaaaattagctgggcgtggtggtgcatgcctgtaattccagctactcaggaggctgaggcaggagaatcacttgaaccggggaggcggaggttgcagtgatgcagtaaccaagatcgcgccactgcactccagcctgggtaacaagagcgaagctccatctcaaaaaaaataaaaataaataaaataaagggacaaagaactataagagatgttgcaaaagaagttggcaaaacttgcatttggtaagggaagaatggggaggaggtgtcaaatatgactcaggttttgagcttgggtgggtgagagaatgctgatgccatgggaagaaaaatggaaactgggagggggaagacaggctcaattttatacatgcttggtttgagatgacgacaggacaccaaatggaaacatctggtaggaaatggaaacagagctcaagtccagcagagaggtcaggggaggggcagtatccaggggacaaggaaatcacctgcatagaactgacctatgcgcacagatgaaagattcaagagagacagtcaaagagaagaccaagcatggcacctgggaaaattctctctagaaaatggtggaagaagatccagcaaaccagaggggaagagtgctcagagtggcaggagaaccaaggcagagcagtgtcccagaggtcaccggtgtgatgctgcagagacatcaaggaagacactgtcaggaagcatggaggggacttgccctcaattccattcctccatttcccacttcccgctatcctcgttttgtagttctctcgagtgtctttggctgtcatggtaactaccagtaccacacccctctatgaaggccacactgattcattctttattgactcaggtgtggcaacatttatccaccctcagacaaactcactagtagcttgaaggtttaaggagctaatttaccaagaaactaaagtcaacacaggaaagaagcaagtttctgaactggtctagaaacagaagaaaactacaacagtgccagcttgaggccaatttgggttactgccacctctgggactcaagagattctcaaaatgattcctggttttccacgcagtttatccacctgagtctatccacctgagtcctaagctagaaaaccataactttgtgctagtcatggcagatgcaaatgattagaaccccaggccctaagccccaagagctcactgtagtagggagacagaaaacagacgcgcaagtatacttcaaacaatgctgcaagacaggcatgggcctggcctatgacaaccttcagctgagtatgtaaggacgagtaggggtgccctccaggtgaacaagtgatggtagaccatgtgttggcatctgagatctgagtccttcttaagcccaactttggtcctttgtctcttgaaggaaaaggcatctcctaggagctccctctgggatgtgagcctccatcctgacctcgtggatgccccttcacctcacctagaggcgccaatggttcctatgcctgcaggccctgcccttgact

SEQ ID NO: 93313 - DNA, 43349 bp, Homo sapiens
  misc_feature (1)...(43349): n = A,T,C or G
cctggcttcaagctattctcttgcctcagcctccagagtagctggaattacaggcgtgcgccaccacgcccagctaatttttgtatttttggtatagatagggttttaccatgttggccaggctggtctcaaactcctgacctcaggtgatccacccacctcggcctcccaaagtgctgggattacaggcatgagccactgcactgttgttttgtttttttttgtttgttttttttttttttaagaaacatggtctctccctgtagtccaggctggagtgcagtggtgcagtcatagagctcactgcagcctccaactcttggactcatgggatccttccacctcagtcttctgagtagctgggattacaggcatgcactaacatgtccagctaatatatataattttttttcgctctgtcgcccacactggagtgcagtggcgcaatctcggctcactgcaagctctgcctcctgggttcacgccattctcctgcctcagcctccccatagctgggattacaggcgtccgccaccacacccggctacttttttgtacttttagtagagatggggtttcaccgtgttaaccaggatggtctcgatctcgggaccttgtgatccgcccgccttggcctcccaaattgctgggattacaggtgtgaaccactgcacctggcctatttattattattatttttttttttttgagatggagtctcacactgttgcccaggctggagtgcaatggtgcaatcttggctcactgcaacctctgcctctcaggttcaagcaattttcctgcctcagcctcctgagtagctgggattacaggcacttgccaccatgcccagctaattttttgtatttgtagtacagacggggtttcactatgttgtccaggctggtctcgaactcctgacctcaggtgatctgcctgcctcagcctcccaaagtgttaggattacaggcgtgagccaccactcccagtctcctctgggttcaagacacaaacatccagtggtctcctgacaagtgtgatgtcctgtgggtgtctctactcagcacatacaacaccaagttcacaaagtttgctccccaaaaccgttctcctctgtggtctcctatctctcatgtggtaccaccatccactccactggctgcccagcaatcggggtatcaccccaactcctctcccttcctccttcagctgatccccacacctgccctatccattctagctgccgtctccccactatctatcagcttggtcctcttcctgtaccactgcataaacctaagtcaccatcacctccattggggccacagcggcacctgcagcccctctctgggtgcaaacctggtaggtgctagcagtttgcacatctctgttccatgcatggccatggcagtgagaggggcaattatttcaagcattatgcagagaaagaaatggaagtccaaggtcatgcagtggctgagtaacagcctcagcacccagccctgggttcctaccacctccctcttacctgacactgcccaaaagaatgcagtgaagaaagacagggggcctggcacggtggctcgtgcctgtaatcccagcactttgggaggccaaggcgggtggatcatgagatcaggagatcaagaccatcttggctaacatggtgaaaccctatctctactaaaaaaacaaaaaacttagctgggtgtggtggcgggcgcctgtagtctcagctactcgggaggctgaggcaggagaatggtgttaacctgggaggtggagcttgcagtgagccgagatggtgccactgctctccagcctgggtgccagagtgagactccgtctcaaaaaaaaaaaaaaaaaaaaaagaaagaaagacagggatggggtggggaggagtgagctcacagtgaattaggagggctcctcagtccattctcttggatttattttattattttattttattgtttttgtacagacagggcctcaccttgttacccaggctggtctggaactcctgagtgcaaatgatcctcctgccttggcctcccaaagagctgggatcataggtgtgagccatcgtgcctggccctcttggatttgcttttcttttctttttttgagacagagtctcactctgttgcccaggctggagtgcagtggcatgatctcggctcactgcaaccttcaccttccgggtgcaagtgattctcctgcctcagcctcccaagtagctgggattacagatgcctgccaccacacctggctaatttttgtatttttagtagagatggggtttcaccatgttggccaggctggtcttcaactcctgacctcaggtgatctgcccgcctcagcctcccaaagttctaggattataggtgtgagccactgtgcctggcccctcttggattttcatatcatctacatggttaattgaattttcaattcacagaccttgttttgttttgttttcatatcctgttaatgatgcttatatggatcccagggccagaggtcatcaggatctccccgcagcagcgtggccaacgtagcgagacctccatctctacaaaaaaactaaagaaattagcaaggcatggtggtgtgcacctgtagtcccagctactcaggragttgagcccaggaggctgaggctatagtaagccatgatggcaccattgcacactccagcttgggtgacagagcaagaccttgtctctaaaaaaagaaaaaaagaaaaagaaaaaaaaamaaacaaaccaaaaacaaaaaaacctcccggaattccatagctgttactatcagtagcagctaatgtttcctggctggcctcttgcccagaagccacagttaccgcttttcctttgttgcaaccctggctatgaaaccagaaatagttgttgctggtagagacactgaaatacctcaaagtaaaacccagaggttgggccaggctgtggtcagctccggggagaccacagactttgcagaggggcccagggtccctgaagatgggtggcagccaatggagctgctggggagggggatgggcagccagccagaaggagcctggagcctagaagaggaggagataaaaatcatcacagtgaggtgtctccagggccgagctgaggccctggcccaggaagtctcaaggctgtagcgtggctccatctttggggtccacaatttggattcaggtcctggctctgtcacttacacagctctgtgtctctggctagttggttaccttctctggtcccctgcttccttatctgtaaaccaggagataaggtatagccactgcagagtgggtaagtaaaatgtatctgcatgttgctgatgtaagaggcgaagttgccataaagtaaaagtaaccatttgaaagtgaacaattcaggagcatttagtgcattcgcaatgctgctgacgtaagaggtgaaattaacataacataaaagtaaccattttatttatttttatttttttattattatttttttgagacggagtctcgctctgtcgcccaggctggagtgcagtgacacgatctgggctcactgcaagctctccctcccaggttcacggattctcctgcctcagcctcctgagtagctgggactacaggcgcctgccactatgcccagctaattttttgtatttttagtagagatggggtttctctgcgttagccaggatggtctccatctcctgacctcgtgatcagcccgcctcggcctcccaaagtgctgggactacaggcgtgagccaccgctccgggcagaaagtaaccattttaaaatgaacaattcaggggtctttagtgtattcaaaatgttgctgatgtaagaggtgaagttgacataacacaaaagtaaccattttacttatttatttatttatttattatttttgagacagagtctcactctgtcacccaggctggggtgcagtggcatgatctccgcttccagcctccacctctcaggttttttgtttgtttgtctgagacggagtctcactttgttgcccaggctacagttcactggcgcggtctcggctcactgcaacctccagcccctgcgttcaagcgattctcctgcctcagcctcctaactgggattacaggtgcctgccaccacacccggctaattttttgtatttttagtagagacagggtttcatcatgtgttggccaggctggtctcgaattcctgatctcgtgatctgcccgcctacrcctcccaaagcactgggatcacaggcgtgagccaacaagcccagctgacctctcaggcttaagcgattctcccacctcagcctcctgagtggctgggattgcaggcgcccgccaccaagcctggctaatttttgtatttttatttttagtagagacaggtttcaccacgttggccaggctggtcttgaactcctgacctcaagtgatccacccacttcggcctcccacagtgctgggattacaggtgtgagccactgcacacggctgatagtgagaaatttctaagctgagacaggcatcacagggtgacattgccagaggctgtcaccttatttacatacgtgcaattgcatatatgtatgtatacaacatagacatattatacatgcataatacaggtctatatgtatgtgtacaatatataaacatatatactacatacatacacataggtaacatgtatgcattacacatacgtataaacatattatctactgtgagtgtgtatataatatacacatatattttgtggtggttgtttgttgcttttcccccccactagaatacaggagggcaggggccttgcccgtctccctcacttccacatttccagggcccggtgggttcggaactcctttgggactggctgcagggagtggaagagtgaagagatgaccttggttggaaggctgcctcgggagtccatcggagggggccaactaaaaatatcacggattgaaaaagttcttggggtggatggtggggatgtgaaagtgcttaatgccactgcagggagtgcttaaaaatggttaagatgggccgggcgcggcggctcacgcctgtaatcccagcactttgggaggccgaggcgggcggatcacgaggtcaggagttcgagaccatcctggctaacacggtgaaaccccgtctctactaaaaatacaaaaaattagccgggcgtggtggcgggcgcctgtaagtcccagctacccgggaggctgaggcaggagaatggcgtgaacccgggaggcggagcttgcagtgagccgagatcgggccactgtattccagcctgggcgacagagcgagactctgtctcaacaacaacaacaacgacaacaacaacaacaacaacaacaacaaaggttaagatggtaaattttatgttctatatattttaccataatttaaaaaaaaaatgactgggcctggcgcggtggctcacgcctgtaatcccagagctctgggaggctgaggcaggaggattgcttgagtctaggggttcaagaccaccctgggcaacatagtgagacccccgtttctattaaaaattaaaaattagccgggtgtggtggcacctgtctgtagttccatctacttgggaggctgaggtgggaggatggcttgaacccaggaggtcgaggctgcagtgagctgtgactgcaccgctgcaccccatcctggacgacacggtgagatcctgtctctaaaaaaataaacaaacaaacacacaaaactacattgatgccaagaacaattactgcatgctcactatgcattaggcatcttgctaagctctttacccgtgtcatctcgtttgtctcacatactccctgaaaggtagggtcactaacctattatattttacggattggcgacaacctcagagaggttaagtcacttgcccaaggtcacacagcgagtctcaagccccagccggtgagcatcacgatcctttgccaatgagccgatgctcgagaaagggtcggatagacaacaggcactgcataaaggttggttaacgggatcgtgtttggctgcaacgtggagctcccgggtcgaacggcgagacagctgcgcgtccccgagccgccgcgcgcccggtccgccggggcggagtcaacgccgcggattggctgctgagaaaggggcgtggctcgtggcggccggtgggcggagtcgatctctggccgtaaatacggcgccacatggcactggctcgcgagggcgggggcgggcgggctggccgggcgcaggcgcgctgagggcgggcgcccctcggcctccgtggcccctccggcggccgcgacgtctcgcgagaagacgaccggtaggaggggctcctgcgccgggggcggggccggcgagggctgcctctggggggtccgctagtcgcggggcggcggcggcggctgcgggcgcgaggtgaggggcgcgaggtgagggtcgcgaggtgaggggcgcggcgggcggcgggctcggggcgcggtctccctctctctcggccagtgctgggctcccagggcccgggcgggggtcccgggccgcgctgaggggcgcgggtcggctctccttaacctggcctggcgggcgcggcttgggcctgggttcgagttcccgcgccggcgcgcagtgtgaccttggccctgcgcgcgccctctctgagccccgctcgtcgtcctcggccagggggacccagccctggggccctgatcagcgcgttctgcggctcctcggggtctggacgagaaatctgtggttctgattcagcgacagcagaggctgcagcggccccgccggcccccaggagtccccctgcccggcatcagcctctgccgcccggcaggggtaggaccaattcccgggcttggagttccaggatccccagctcccgagggcccccgtgtgcctgctgtcacctgaacggggctccccggccccgccgaccgcagccctggagcctgcagacgccakcagcaccggcaggtcgctcagggtatcccttaaatgacctctcactccagaagccgcagccctgcccctctgggagaggaaaccgtgcatttagtccgggaacagtgggacttagacctcctctgcgggctcccggccaccgagacaccgccggcaaagccttggctcgggcagaggctccgtctggcaggcagcacaacaagccatagtgtttccagcattattaaattatttagttcataagcggggctgtggggactcggaagccccggggtgaataggaatgtgagttgcaggcgcggtgctggacgcagtacatcttccaggacaccaggccctacggtgctgttcccggctgtgggtggttggggacagctcagcgggtcccccacttacccccacgcggggacccgggttagcccctcaccgtgagcatctggtgttgggagtcagggctggtgtctgagtgaggatggagagaaaacaggggtaatgaggagattgctacacgaaggtgcaacgcttgagatctgaaagagcacctgcctggaatggcatagatgtttgatttccctgcaaaggagtttatgggactttgggctgacgctttggggccagcagtaactgtctgctgtcactcagctgactccagctttattatcaaacctccaatcgagtgcaagatgctaagctggggtagatgccggtaatagcgtgggccttgccctgggagctcacggccagcctggctacaactgtgtggagttgagactgtggtgcaggcgttaacagaatgtggcgacattttccgacattttccacagtggagaggacctatgaattggggcgtttggaggcaaagggcatgcagagatgtggaagtgaaagtgatgtttgggggagatggtgggtcgccgtgttcttgatgaagtggggtttgaggattgggttggaagctaagactggaaggccgggcgaggtggctcgtgactgtaatcccagcactttgggaggcagaggcgggcggatcacctgaggtcaggagtccgagaccagcctggccaacatggtgaaaccccatctctactaaaaatacaaaatttagctgggcgtggtggtgcacacctgaagtcccagctacttaggaggatgagtcaagagaatagcttgaacctggaggcggaagttgcagtgagccgacactgggcctctgcactccagcctgggcaacagagtaaaaaaaagactggaaagatgggtttctgattgtgcaggggcctgaatgctgtgtgagggagtttaaacttttatccctttggtggtggtttgggtgcgacgcgattagatgtgtttcagaaaagtggtcgtggtgagaatatgggaggtgggttttgcctctgggcagtggagctgagttgagtagccttgtggggcgtgggtctggggcagtgagagagtgggggcgggcatggagctgaaagatgttgccaaatccactgggcggtggcgctttgtgagatgtggcgacctgtaacagcgagggcagccgggacttctcacctgcgatgaggagcgctgcggccaggtgggagaggaagggccacacaaacacacgtgggttttagacctgcagagttggcggtattggtggccatcctggaggagatgtgacctggtggagaagagacagcctgtacaaggagggaatccccaggaaccccagtgggaagggatccagagctgaagagaggcccgttggttggctgaccttgggcgtgcagttccttgactacgcacagtcattgaggctggcaggtgattctcttctagtgtgggtcaggggctgaaggagccatcagtgggaaaagacgggttattgatgatactgaaacacatgcggcttgtttgtcatttaaaaaaaccgtacatcttgagtttcgattcttaagttgtctttcttttcggagagtagctgttagtttcacacttgcttagtgggtctgtggctgcaggcgggactgtggttctccagccctggcccacagatgtgcctggagataattgactctccaacttattacttcctgctgttaaggtggtggtttctgtaactgtttagaaactttaaagatatttcagagaagaatgggagacaggtacagttgagtacggggtgggggcacagttgagtatggggtgggggcacagttgagtacggggtgggggcacagttgagtatggggtgggggcacagttgagtacggggtgggggcgcggttgagtatggggtgggggcgcagtgctgaacagggcacaggaggaggaagcgaacagggaccctttggctcccagaacatgaccagctggggcttttccctgtagacaggaggatggatgtgtctttggggaatctgagtagcccaagagaaaagacctaaaattaatgacatcaggaggtccccagtcagcagacccagctggatcccttgctaacgaagcccgtcattaataaccccctcccagtgttcaaggcatcaagctttaaaaatccccatcccttaaatatgagcagataaccaagggcatctgaagaaaacctctgctacaggagattgagaccagaatacacactgggaaaccagagagcgtgcaggaaggagccttagaaagcaggctgtcattaatgtccacgcggaggtgagcgaaaatatcgcgaacatgaggcaagaacaggaagctctaaaaaaaagccaccaaaaggagtattcgaatatccaaaaagagaactctcggatgtaaaaaaawaaaataaaagcagaaataagaaaatcagttagtgggtgaaagataaagttgaggaactccctcagaaagtagaacagaaaagcaacgaggtggcaaatgagagaaaaaagaaacggaaaggatcagatcaggaagtcagcagctgaatagtaasagcttcaaagctgaggtgagaggatcgtttgaggccaggagttcaagaccagcctgggcaacatagcaagacccccatctctacaacaaaatttaaaaattagccaggtgtggtggtgtgcacctgtagtcccagctacttgggaggctgaggtgggaggatcacttgagcccaggagtttgaggctgcagtgagctgtgatcatgccactgccatccagcctgggtgacagagcaagaccccatctctaaaaaataaaataaaatacattttaaaaagtttccagaagaaaaaaatagggaaaacaggatgaaattcacaaaataatttcctagaacccaaactttctgggttaaagaggctcacccagtggccagtaccacgggtgaaaatgcaggtatccttcactttcatagcctcttcacttctcagcttggatattaaaagcttgggaaggctgggtgtggtggctcatgcctgtaatcccagcaatttaggaggtaggtgaatcactgaggtcaggagttcgagaccagcctggccatcatgatgaaaccccatctctactaaaaatacaaaaattagccaagcatggtggtgggtgcctgtaatcccatactcaggaggctgaggcaggagaattgcttgaacccaggaggcgggggttgctgtgagcccagatcgtgccactgcactccagcctgggcaatagaatgagactccgtctcaaaaataaaatttaaaaaattaaaagtctgggcagcaaacttggatagtgagagaggctgagtttcagataaagactagtgagagcttgggaggggaaggatttatttgaaagcatgtctgcagctgttgaccccagaatttggatagtgagagttcagaggccaggcgctgtggctcacgcctgtaatcccagcactttgggtggccgaggtggacggatcacttgaggccaggagtttgagaccagcctggccaacatagtgaaaccctggctaatacaaaaattagccaggtatggtggcaggtgcctgtaatcccagctgcccaggaggctgagacaggagaattgcttgaacctgggaggcggaggtaacggtaagtggagatcatgccattgcactccagcccgggcaacaagggtgagactccgtctcaaaaaaaaaaaaaaaaaaaaaaagatccttgcgtaccctctccaggacatactgttgtgaaatctcagaacaagaggagaaagtaaaaacaaatcacaaataggtcatcacaggtcaagaggcagaaggttagaacatgtggaaaaaggcagaagaactaactacaattaaaatgaaaagaagcagaagggcttgggctttttcaaagcagcactgggtggcaggagacgggagggccttgcttgagaaattctgaaggatgcatttgcagcctggaagtctacactcaggcaagggagggtagggtaaagacamcttcagacttgctcccagatttgttcctcatgctttaaggaggtgattggcagatgtagtctccccagatgaggcagtaagtctagactgagagagactggctggtgggaacaggatttcccccaggtgagaggtgagaagaacctgctgaagggaaatcccagccaggtgctggygtgaagagcagacatgtcctgaccccagctggtcagaggctccaagaggagattctttgggagaagatgaaattagcaggacacctgacatgctgcagcatctggagaggagttgatacagttggcagagttggggcgggattagtgataagtactaaacaaagcaaatgaaaacacaaggctgttattagttccagggaaaataaaccatcgtgcgggaaacgaaaaataattatggtgtactacaaggcgcagctgtggatagcctcgccgcaatgatagtaatttatgtaaacactgactgctgctctaattgaaattatgatgcacctgggcagagaaggtgtggggaggagagcgctgcattttcgcctgtcgccttgggaagtcagtcgctaatgccccaagctgaacaaccaaggttcactctgaaggcagacattaaaagaattagctaaaaagaattatggagcgggtagggcgtggtggttcgcacctgtaatcccagcacttcaggaggccgaggcaggaggattgcttgagtccaggagttcaagaccagcctgggcaacatggcgaaaccctgtctctactgaaaatacaaaaattagccagacatggtggcctgtgtctgtctcagctccttgggaggctgaggtgggaggatcacttcacttgagcccaggaggtggagattttagtgagctgagatcgagccatcacactccactctagcctgggtgacagagcaagatcctgtctcaaagaaaaaaaaaaaaaaagaatcatggagaagggcggaggtgagaaagggaagcagggacagagactgttgagtttcttaataaacttcacctcacggaatgatttcactctttcatggatatgtatgtgtggcattgaattgacccaaatgggaacagtctcagatgggctttctgctctgatggaatggcggccctcgcctgcctctgtgcacaggccctgttaacagggagggtttccttgctctgatttcctcttggttattgtcattgttctctgtatgctgtctcgtcgttgtggtcatttatcagagattctgagcactttttttttttttcctttcaggcagagtctcactctgtcactcaggctggagtgcagtgatatgatctcattgcagcctctgtttcctgagttcaagcaattatgattacaggcctgagccgccacgcccggccgagcgctttctttcgtygttttcyaagggggttttaaaacataccgaccagtagagagagcagtattatacatcatccttcacctgtccccaagtttcagaaattaggcaatcagagtttgtctggtttttgttagaacatcacctctttcttgagcaagtactgagtgccagatgctactgtaagccttgagaatacccgctgtgaggcaggacgaggacctcccttttaagtcagtgcaggaagacagtgagtggattaacyggtgtatatgagctatttgaggccaggcatggtggctcacgcctgtaatcctgacattttgggaggctgaggcaggaggatggcttgagcccagcagttcagggattctgcgattgcaccactgcactccagcctgggtgacacagtgagacactactctaaaaataataaataaaagatttgaggtagggatgggataaatgctgctatgaagaaaaccagggtatggggagtgcagggtagagactgggatctactttctcagggtggttagggaaggcttgctgaggaggtgagcgtcaagcagagatctgaaggaagcgtgggactgccctgggattccccagctgagggatggtggtgcagaggcccagcagcaggagcctgctgggtgcggtggatgaacggcaaggagactgttgaggctggagagggtcgccgagggggactgtgatagaagaggagatcagtggagtcctggtcacgggccatcagaaggactcgagataggaagccactgatccaacttttaatagaataaccgtggctttggggttgaaaatggattgtgtgggcctgagagcagaagcagggagactggtttggagcctgttgcaataacgcaggtgagagctgatggtgattggggcagggtggggtgtaggtagggcagaggggacttgacaagttagagcctggataactatttacttttttaaattatttatttatttatttttaaattttgagatgagatctcactctgtcatccaggctggagggctggagtacagtggtgtgatcatagttcacwgcagcctcagcctcctgggcttaagagatcctcccacctcagcctcctgagtagctgggactacaggtgtatactaccatacctggctaatttttaaatttttgtacagatggcttcttggtatgttgcgcaagctgatcttgaactcctggtctcaaaatattatcctgccttggccacctaaagtgttgggattacaggcatcagccactgcacctggctgagcctggatatattttgcatgtaaagccccaagcaggttcttaaactgatcatagtgagatttattatcattttcttctgaaataatttctttgagttaacttaactcttttttttttttttttttgagacggagtctcactgttggccaggctggagtgcagtggggcaatcttgactcactgcaacctccacctcctgggttcaagcaattgtctctgcctcagcctctcaagtagctgggatgataggtgccagccaccacacccagctactttttgtatttagtagagacagggttttgccatgttggccaggctggtctcctgacctcaggtgatccacccagcttggcttcccaaagtgctgggattacaggcgtgagccactgtgcccagccacgaattgatttaactcttaagtcagttgagtcaagtgagttatygtttggattctagagtcaaatacctatgcaacaaatatttgagccttatgaggaatacagaaggtacatgagatatgatccctgtcttctaagaacttgaaacccagtttgggaatattggactggtatacgtgcgtggatttcctgtctacctgggaagggccaacagagggcttagagacgggaaggaagagaacagggtgagctgatagcctctgtgctctaggaccggctctgcagggaagttactttacttcaaaggctaagtttgggctcagttttcattcaggtctcctgggatataaatcaacattccattctcatcaatgtgaccgttaattacatatttttatttggatatactgtcagatatagttaactgaacacaaatgaagtaattgtataagcaaataaaccatagtcctggaggtaccgcgtgaaaatgtgtctcacgatggaggttttaatgtagtaccactgtgtgtaagttccaggcagcccaggacatgcagagagcaaatattgacaccaggaacagaaactttccacatttttgttgactacagcgatgggaactgcagtgaattatttgccttatatagtgtctgtaaagctggaaaagaagtaggtagtttctggtctttgtgtcagtagcataaataaataaacttgaaacattcttgcgcttcttattgaaggtcatgtcacttgatttagtgctcaagagcttggttatttggacacgaagaagctacttccctcagcagtaaaggaaatagaaatttgactgtctagtgaaacctaccaattctgcctaaacatatactgtagaggccagcagagcagagtggcaaggaaggggggctctccaacaacagcctgagttctgaggccagctctaaacactgctagctatgtagacttgtgcaagtctgtagctacttttcccagtttcatcccagttcatgtgaggattaaacaaagtaatatgtgcaaagcccttagaacatcacttttaacaacatgttagctattggtattgttattttaaaatcaatttgcaaatagacagtttttttttttttgacttgataactggctcttggtagaaagcatgagtaataataaaaataacacatatttgtgtaacaaatatttgagcytgatgaagacagagagataagtaaggccggggcagaktctaaagaaagtgctttactattttatcaaccacttagctgtgttttctcatttttgtgctctcggtagctctggttagcagaaaggcctagtttgttcttcttttgtagatggactgaaagtcagacataaaatgacttggcccaggccactcagcagaggccggacttggtctcagtatcccttccctcttcctcccagtccctccgtgtctgtgcggaactctgcactggtgttttcttctgtactgtggaaattggtgagagctgggccattgcattcatattagagagagaagtgttagcctctggagatcagcttcataaaaccacaaacattttctttttaactttaaatcaaatgtattgagtatgatttacatgcaataaaacgtacccattttaagtatgcagtttgaggaacgtggccaaacatattcaccttgtacctgcctctgcaatcaaacagtagagcatttccatcgccccgagtttctgcgtgctcctctgcagtctatgattttcatcacgattttggcctcttttaaatgtcatataaatggaaccacagaacatgcagtcttttacgtctggctcctttttcagtgtgcgacctgtggcgttcacccatgaatcagcacttcaccctttttacactcacttgctgatgtacattggggttgttttcaggttttagctttttttttttttttttttttttgagacagagtctccctctgtcgcccaggctggagtgcagtggcgtgatcttggctcactgcaacctctgcctcctgggttcaagtgattctcctgcctcagcctcccgagtagctgggatcacaggcacccaccaccacacccagctaatttttgtatttttagtagagatggggtttcaccatgttggccaggctggtcttgaacttctgacctcaggtgatccacccacctcggcctcccaaagtgctgggattacgggcatgagccaccacgcccggccagttatctcattttaatttgcatttctttgatgactaatgatgatgagcactttcctatgtgctttctgactatttgtatctcttcttttgtgaaacgtctgttcaaattttttgcttattttttaattgggtttattttccgttgtaagagctctttatatattctggatataggcactttgttagatatacatattgagaatattttctcccggcctatggcctgtcttttactttctttttttatttttctttttctttttttttctctgagacagagttttggtcttgtcacccaggctggagcgcaatggtgtgatcttggctcactgcaacctccacctcttgggttcaagcgattctcttgcctcagcctcctgagtagctggaattacaggcacttgcccccatgcccggctaattttttgtaattttagtggagatggggtttcgccatgttggacaggctggtcttgaactccttacctcaggtgatccacccttctcggcctcccaaagtgctgggattacaggtgtgagccaccgtgcccagcctttactttctttaatggtaaaatttgagaatcctaagttttaaattttgataaagtccaatttaccacatttttctctcatatttgtgcttttggtatcccaacaaatctttgccttctcccaagtcatggagattttttcctgttttcctctgaatattttagttttagtgtttatgtgtaaggccatgatccattgtgagttaatttctgtgtgaggcgtagggttgaggttcattctttttcatgcagatatccagttgtttcagcaccatttgttgaaaagattgttattccttattgaattactttgccaccttttgaaaacagccacatacatgtggatctcttttgggactttgtgctgtctcatttatctctacaggcatacttcagagatgttgcaggttcagttctggaccaccacaatcaagtgaatatcgcaataaagagagtcaacaaagtttttgcgtttcccagtgcatataaaagttatatttggccaggtgtggtggctcacgcctcagtccctgcactttgggaggccaaggcgggtggatcacctgaggtcaggagttcaagaccagcctggccaacatgatgaaaccccatctctactaaaaatacaaaaaattagccagatgtggtggtgggcgcctgtaatcctggctactcaggaggctaaggcaggaggatcacctgaaccccagagtagaggttgcagtgagccgagattgtgccactgcactccagcctggatgacaacagcgaaactctgcctcaaaaaaaaaaaaaagttttatgtttacactatactgtagtctattaagtgtgcaatagcattatgtctaagaaacaatgtacatacgttaatttaaaaatattgctaaaaaatgctaacaattatctgagccttcagcgagtggcaatctttttgctggtggagggtcttgtcttgatgttgatagctgctgattgatcagggcggtggttgctgaaggctggagtggctatggcaatttcttttcttttttcttttttttttttttgaggcagagtcgctctgtcgcccaggctggagtgcagtggcacgatcttggctcactgcaagctccgcctcccgggttcacgccattctcctgcctcagcctcctgagtagctgggactacaggcgcccgccaccacgcctggctaattttttttgtatttttagtagagacggggttttaccgtgttagccaggatggtctcgatctcctgaccttgtgatccgcgcacctcagcctcccaaagtgctgggattacaagcgtgagccaccgcgcctggctggcaatttcttaagacaacaatgaagtgtgctgcatttattgactcttacttttacaaaaggttttcctgtagcacgtgatgctgtttgataacattttacttatagtagaacatcttttaaaattgtagtcaatcttctcaaaccttgccactgcattatcatgtaagtctatggaatattctaaatcttttctggtcatctcagcagcgttcatagcatctttacccagagtagattcctcctcaagaaactgctctttcgttccttcgtaagaagcaactcttcatctgttcagctttgaacatgagattgcaattatttggccacatcttcaggctccacttctgattctacttctcttgctgtttccaccacatctgctgttacttcctgcaccggagtcttgaactcctcagagtcatccatgaggactggaaccaacctcttcaaacttctattaatgttgctattttgatctcttcctgtgaatcccgaatgttcttaaaggcattagawtrgtgaatcctttccaggttttcagtttactttgcccagatcctacagaggaatcactatggcagctttagccttacaaaatgtattcctttaataataagacctaaaagtcaaaattactgcttgatccatgggctgcagaatggatgttgtgttagcaggcatggaaacagaaacagatctcagtcgatttagaggtgtattttgccaaggttaagaaagaaacacaagtcattgtaggatctgtggcctgtgtgctttttctaaagagggttttggaaacttcagtatttaaagaggaaaaagtaggcaggaggggaagaggggaagaaaaggaggtggagtaggcaatgaggccagtggtcacatttttgtgaggcttttagtaccattcagtgaatctacattttacatgtgaaaagaagggagtggggcagagtcacatacgccttctccgcacagtaaatctgcattttacctgcgataaataagcacgtaaattactttatctgggaaagaaaagaaggcagcttttcttttgcgtaacttggttgttaagcttaactttccctttagcttggtgaattcggggtcctgagattttatttttcttttgcaatgtgtatacaaagagattgatgataagaaattggctcacacaattacggaggctgagaaattcagaccctggagagccaatggtatgactccagtctgagacggagtccaaagrcgaagaccaatgtcccagctcaaagacaggcaggcagagagagttgattctcttactctaccttttttttttttttttgaggcagagtcttgctctgttggccaggctagagtgcagtggcgtgatctcagctcactgcaacctctgcttcctgggttcaagcaattctcctgcctcagcctcctgagtagctgggttacaggtgtgcgccaccatgtctgacttttttttttttttttttttgtgatggagtctcacagtgttgcccaggctggagtacagtggtgtgatcttagctcactgcaacctccgcctcccaggttcaaactattctcctgcctcaacctcccatgtagctggaattacaggcatgtgccaccaggcctgactaatttttgtatttttagtagagacagggttttaccatgttggccaggctagtctcgaactcctgacctcaactgatccgcctgccttggcctcccaaagtgctgtgattataggcatgagccaccacacctggccttactccacttttctgttgtacttgggccttcagtggactggctgaggccctctcatactgggagggcatccgatatctcagttcacccatttggatgttactctcctccagaaacatgctcacagacgcagtcagagtatgcttaaccaaatatctgggtaccccacggcccagtccagttgacacataaaattagccacgtattacgtgacctttttgtgtgatcgatgtcagttctgctgtaacaatgtggaaaatgcgcttctggggggcttaatatagatctggccatgtggcagtgtcttccagagcaggatggctgtggtcacgtcacggtgacacacagctgaacacgartgagctaaggccatagctgtctgtgcyagctgccttttctttctctagtgttttgcccacagtcagcatgagtatttggaccagtggccttgcgtgggcagccggcatggacttgctccctggggctgcagagtctgcccctggcttcatgccctgcatgttgtgtgtgagcaaagaaatatttaacagccccacccggagctaagacacaactctgtcagcctaaccacagtgtttgcgtttaaacctaacctaataattttcagtgccatttatgagggcatctgacacagccgccgtggaaaagcacctccaccgctacagtttcctggcggatgatgcttctaggtgaaactttgctctgtgggttcccttgctggaggcagcagcccacggttggtgtgccgcaggcgggttatacgtctgttcatctgagatgcctctgcgtgctctgcttcaaatcacagggggctttttgttgaaacactgggagatttgcatttggaaatcatgtcctatttctttttaatgaaaaattactttatggcttcagtgttgcccatgatgtgttttggaagcaggtgggatcatgaccgcagtgctcagcccagcggttctatcggacccttccctgaatgcttctctcctgcccagaaggtagcaaaagtcacgtgggcttcaggccggagctgtgtcagtcactgggccagacattcttgtatgtccaagctgttgtttctgttgctgttgttgttgttttgttttttgggatgtggtctcaccctgtcacccaggctggagtacaacggcacaatcatagcttactgcagccttgacctcctgggttcaagccattttcccacttcagcctccagagtaactgggaccacaggtgtgtgccatcatgcccagctaattttaaaaattatttgtagacatgaggtctcactgtgtggaccaggctggtcttgaaccccttggctcaagcaatccccctgccttggcttcccaaattgctgggatcacaggcatgaaccaccatgtctggctgtccaaaccgccttttaaaattaaaacttggctgggcgtggtggctcatgcctgtattcccatcactttgggaggccgaggcaggtagatcacttgagcccaggagttcaagaccatcctggtcaacatggtgaaaccccatctctactaaaaatacaaaaattagccaggcgtggtggtgcacacctgtaacccagctactcaggaggctgaggtgggaggatcacttgagtggggaggttgcagtgagccaagatcacgccactgcactcaagtctgaatgatagagtggaaccctgtctccaaaaaaaaaaaaaaaaaaaaaatggctgggcatagtggcttacgcctgtaatcccagcactttgagaggccaaggcaggtggattccctgaggtcaggagtccgagaccagcctggccaacatggtgaagccccgtctctactaaaaatacaaaaattagccaggcatggtggtgggagcctgtaatcccagctacttaggaggctgaggcaggagaatcgcttgaacccgggaagcagaggttgcagtgagctgagattgtgcaactgcactcaagcctaggcaacaagagcaaaactccgtctcaaaaaaaaaaaaaaaaaattaccattgtaaccatttttaagcatgcagtttggtggtgttaagcacgttcacatcactctgcagcaatcaccaccctccagccccagaactatgttcatcttgtaaaactaaagctctgtccccattgaacacaaactcccatccccctcccctgcccccacaaccaccattctactttctgtctctaggaatttaactgccctgggaacctcatacaagtagaatcttgaaatatttgtctttttttttttttttttttttttgagatggagtctcgctctgttgcccaggctggagtgcagtggcacgatctcacctcactgtaagctctgcctcccgggttcatgccattctcctgcctcagcctccagagtagctgagactacaggcgcccgtcagcatgcccggctaattttttgtatttttagtagagacggggtttcaccgtgttagccaggatggtcttgatctcctgacctcgtgatctgcccgcctcggcttcccaaagtgctgggattacaggtgtgagccgccacaccggccaagtatttgtccttttgtttctggcttatttcactgagcataatgtcttcagggttcatccatgttgtagcatgtgtcagaatttcctttcttttgaaggctgagtaatattctactacatgggttgaccacagtttgcttgtctgttcatctgtcgcgaacacttgggttccttccaccttttggctattgtgaatgatgctgacatcagtgtggacatgggtgtgcaagcatctcttcaagaccctgctctaagttgagtgcagtggctcatgcctgtcatcccagcactttggggggccaaggtggaaggatcacttgaggccaggaattcaagaccaccctgacaacatagcaagatgccatctctacaaaaaattagctgggcatggtggcaaccacctatagtctcagctactcaggaggctgcttgagcccaggagttcaaggctgcagtgaggtttgatggcaccactgcaccccagcctggacaacacagtgagaccctgtctcaggaaaagaacaacaaccttgctttcagttattttgggtgtatacacagaagtggaattgctgtatcatatggcaattttattttattattattttttaagacggagtctcactgtgtcaccaagtctggaatacagtggtacaatctcagctcactgcaacctctgcctcctgggttcaagcaattctgcctcagcctccttgaktagctgggattacaggcgtgagtcactgcacctggcccctcatatggtaattttatatgataattctgtgttaatttttttttttgagacagagtctcactctgttccccaggctggagtgcagtggtgccatcacagctcactgcaacctccatctcctgggctcaagcgatcctcttgcctcagcctcctgagtagctgggactgtaagtgcacaccaccatgtcctgctaattcttttttttttttttttttttttacattttttttgtaragaagggtcttggtatgttgcccaggctgggatgcagtggcaacatcatagctcactgcagcctcaaactcttgggctcaagcaatcctctcacctcagcctcctaagtagctgagactacaggcacacactaccatgcctggctagttttttagtttggtttttttttttacttttttttttttttttgagacggagtctcgctctgttgcccaggctagagtgcggtgacgcgatcttggctcactgcaacttccacctgccaggttcaaatggtccttccatctcagcctctcaagaaactgggattrcaagtgtacaccaccatgccaggctaatttttttatttttagtagagacagggttttgccatgttggccaggctgtcctcaaactcctgagctcaagtgatctgcccacctcagcctcccaaagtgccaggattacaggcatgagctactgcgcccagcctttttaaacattttttatagagatagggtcttgctatgttgcccaggctggtcttaaactcctgggcagttctcccgcctcagcctcccaaagtgctgggattacaggcatgagccaccatagctggccctaaaagatattattaatacttagttataatcctaaaatattttccttgtaattaaactgaaatcttattaaattatccatgaaaagtcataggttttataaaatgatgtagtcactggcattggttgtatatatgtaatgcttcttggctgaaaaataagcagaagtgcttaggttggctcagtaacgcccttatctagttcttaggtacagaattcgtggacggcggcagcatccctggcctctggcgtctgcctatgtyggcgatgtgactgactcccctgcagcttcactctcctcgttagtcttcatcttaattggcaacttccctctcaagttgtttgtcatgttaacttttcccctttgctactttctttttctttcttttttttttttgagagggagtttccctcttgtggcccaggctggagtgcagtggcgccatctcggctcactgcaacctccgcctcccaggttcaagcgattctcctgcctcagcctcccgagtagctgggattacaggcatgtgccaccatgcccggcttattttgtatttttagtagagacmgggtttctccgttattggtcaggctggtctcgaactcctgacctcaggtgatccacccgcctcggcctcccaaggttctgggattacaggcgtgagccactgcgccctgcctctttttttttagatggagtcttgttccgtcaccaggctggagtgcagtggtgcgatctcagctcactgcaaactgcgactcccgggttcaagcgattctcctgcctcagcctccccagtagctgggactacaggcacacaccaccacacccagctaatttttgtatttttagtagagacagggtttcaccgtgttggccagactggtctcgatctcttgactttgtgatccacctgcctcggcttcccaaagtgctgggattacaggagagagccactgcgtgcagccctgctttgctgctttcttagccttcagaaaacctttttttttttttttttagtgtggtttcattcactgtcatctgaagaaactgttgattgttacacatcctcgagaggggtggtcctgaaaacttgaacagcacaggtacttaggatctagttttaaaaataggctgcagtggctcacgcctgtcattccagcactttgggaggctgaggcacttggatcactcgaggccaggagttmgagaccagcctggccaacatggagaaagcccctctctactaaaaatccaaaaattagccgggcatggtgcgtgcctgtggtcccagctatttgggaggctgaggcatgagaatcccttgaacctgggaggtggaggctgtggtgagccaaggtcacaccactgtagtcccgcctgggtgacagaacaagactccatctcaaaaaaaataaaaaaaagtagaaaaataggctgtaaaatcgtgtggttataaccgttcagagggtattgaaagctggtacaggactgcatgttctcgtcccactcacaccctgaacacactgggagggcaggtgaggaatgcggtgggggccatggagagacagcagcgggggccgtggagagacagcagcaggccctctgatgctcacgttttcgtgatttctgtagtggggtcattgcctttctctggtttgagacacgtattagctgtgcgtgatgctggtgcactacaggccacagggcgggaggaggttggagtcctctgggtgctgggcttctctgcctccatcaggcatgctgagctctgtgggtccaggaagcactgagtgaaggtggcagtaggcagagggcatccttttttctgagaatcatcccagctcctttcatgtggaagcccaccaccctctgtacactgagctttttactgtgatttacctcattactcttgccattgaaaaaatgaattaagaggccaggcgtggtggctcatgccagaagcagaggcgggtaaatcatttgagcccaggagttcgagaccagcctgggcaacatggcaagaccctgtctctacccagaatacaaaaattagctgggcatggtggcacacgcctatggtcccagctacttgggaaactgaggtgcctgggaggtcgaggctgcagtgagccgagattgcagcactgttctccagcctgggcaacagcgcaagactgtatttcaaaattaattgattaattaaggctgggcacaatggcttatgcctgtaatcctgacactttggaaggccatggtgggaggatcacctgatcccaggagttcaagagcagcctgggcaacatagggagatcctgtctctacagaataattttaaaaatgagccaggtatggtggtgtgcacccatggccccagctttttgggacaacccaggaagttgaggctgcagtgagccatgatcacaccactttactctagtctgggcaacagggtgagaccctgactctaaagaatataaagaaagaacatgaattaagaatccacagaagttgcagaggtggatgcagagtacagccacatttcagcctcatgaactttgaggttcatttaatgagaatctgtgaagggtcaggcagtggcttttagagtctagtccagtgcgtgagaggcagatagactccgagaagcttatgccggaagaagtccaggagggtctcccagtgcgagactctcccccggaagactcccgggcaatccgcctgtttgtgcttggatgccctcgggaacagagatcttactacagtttttggccccttaactcattagcgtatctgttcattcactgggctgactgtgctgtccgagtgttgtcttctgaagctgcagaggtcaagcctgctccccctcctctgtgacagcccttcaggagtttgaggcaccaacagaaatcctcctcgtcctgaacagccccagctcccacagagctccccttccacaagatgctgtgggaaaagagacactgagagcctgctagagcctgttgtaatcagggtgcccccgtggaggagcaggaggaggaggcaagaccccgctccaggccgggcgtggtggctcacgcctgtaatcccagcactttgggaggccgaggtgggcagatcacttgaggtcaggagttcaagaccagcctggccaacagagtgaaactccatctctactaaaaatacaaaaattagccaggtgtggtggcgggcgcctgtagtcccagctactcgggaggctgaggcagaaaatcgcatgaacccgggaggcagagattgcagtgagccgagattgcaccactgcactccagcctggtgacagagcaagactccgtctcaaaaaaaaaaaaaaaacaacaaacaaaaaaaaaacgtaaaaaaacaaaccccggcccagtgaggaccgcgcttagtcagcatgtcggtcaagacaggtgtggacacaaccacagtgcagacaagggtgagtgccaggagagaggggtccagactgttgggctcttccagaaaccccagaccaggtcatagccactgaaaatggatatatttcatattcaccttttaccctccacccccaaaagggcctmtgagatggccctgctcaaacatctagaaagaaagagataggatctggcctctgacggagatgagtgcctctggggatccatgccctgtggccaccattgtttctggatgtggctgaggtcacaggactgttgtgagcacaggtggtgagtcacctgtaaggcccacacgcgggacaggtgcagggggcccacatctgcagatgtgtgtgtgttcaaatgcaaaatagcactgcatttgcttttttttttttttgtcttttgtcaagcttgtcccttttcctcttgtatccaacttgcaggtcttctcccatgctgtctatttgatctttatttttttgggtggagaacttaccacttatcccactatacgtttccatctcttatttattttcagctttacttctcgtctttccagggtgtcatctttctgaatgcagattctggggagtctgcactctggtggtggcagcacaggtgccaggggtcaggggttagacgctctgggggaagggcctggcagaaggcagtaagctggagggagagacaggctggggacgacggggctcgctagatcagcaggggacctctttgggggacctgcatagtccgggatgggagtaggtagatgggcatcgtgcgaagggactgccagtgagaagagggcagctggctgtggggacgaatattcagggggctgggactcatttctgtaaaggaaccaacgtccttagcaagaagccaaggcaggaaggtggcccagggttgccccaggataggacctggcatggaacctcaggggcttggtcacaaggggcttcagagccaggctgatgtgatgggggcctctgagcctgagattcactcggtattgactgcaccctaccatgtgcatgcacgtggtgagcacaaccagacggagcccaccctccccagctatgtgagtgagagcgggagtaattaaacatacacaccccaaataagcacacagttgctgatgggacctatggagagtgcatagtctgggatttgacccaactgggaaagacttcgctgagctggggatgagtaggtgtctactgatgacggggcaggggcgggtagacagatgtccttgccttgttcatgatcttggtggtaaggtactcactcttgcacccttaattatgaggttagctgtaggtttttttttttaaagcactcagattgttgctaatattaaaaaaatataacatacaagagtgacaggagagacatacagkccgggtgtggtggcttatgcctgtaatcccagcactttggaggccgaggaaggtggatcacttgaggtcaggagttcaagaccagcctggccaacatggtggagctccatccctactaaaaatacaaaaattagccgggtgtcagggtgggcacctgtaatcctagctgcctgggaggctgaggcatgagaatcacttgaacctgggaggcggaggttgcagtgagccaagatcatgccactgcactccagcctgggtgacacagcgagaccctgtctcacaaaagaaaaagagagagagagagagacatataaatgaaaaagtactcagtttaagaaatttgtagcactttgcaaggccgaggtggccaggctgaggcatgagaatcacttgaacccgggaggcggaggttgcagtgagccaagatcatgccactgcactccggcctgggtgacacagcgagaccctgtctcacaaaagaaaaaagagagagagagagacatacaaatgtaaaaatactcagtttaagaaattcatagcactttgcgaggccgaggtggccagcttgctagagcccaggagttcaagaccagccgggttaacatggtgagaccacaactctataaaaaatttttaaaaattagcccggcccagtggtgtgtatctgcagtcccagctacttggaaggctgagacgggaggatcacttgagcctaggaggtcaaggctgcagtgagctgtgattgtgccactgcactccagcttaggtgacagagcaaggctctgtcttgaaaaaaaaaaaaaaaagtttacacatttgtttgaagatgaaaagttcaacacagtttgggccttccatctgccacccccccctacagagatgatagaaaaatggtacagctgtagggtgtttgtagatgccctataagttgaggatatcctctttgctaagtttgctgagagtgtttataatgaatggatatgggttttgttgttccttcctgtaggagttgattttttagcttgttaatatgatagattacatggttgatttttgaacattgagccgttcttgcataccctacttggtcatgccgtgactcctttttgtttgtttgttttttgagatggagtcttgctctgtcacccaggctggagtgcagtggtgcgatctcggctcactgcaaccgccacctcccagattcaagcgattctcctgcctcagcctcccgagtagctgggactacaggcacccgtcaccatggccagctaattttttgtatttttagtagagacggggtttcaccgtgtttggatctcctgacctcgtgatccacccacctcggcctcccaaagtgctggggttacaggcgtgagtcactatgctgtgattctttctatacactgctggatttggtttattaatattttgagcatttttgcatccaagttcataagtgatattggcctgtagctttctctctctctttttttttttttttgagacagagtcttgctctatcacccaggctggagtgcagtggcacaatctcggctcactgcaagctctgcctctcgggttcaagtgattttcctgcctcagcctcctgagtatctgggattacaggcgtccaccaccatgcccagctaattttttgtattttttagtagagacggtattgtgggatctggccagaagcccacaatgcaacggggctcttttatttgttcccaggcggatcagcaggtcgagaaataatagacacacacaagacagtgaaagctgggtccggggggtgaccgccttctggtcctgcgatgccgccaatgcactggatataccagcatttattattaagtttagtgagggcgggggtaggttagtgagggatttagggtcatttgattatgaggtgagatggtcacatggggatgaagtaattctttaacataacatctgtatgcagaagtacagtatacagagataagaatttacaatatagcatgtgcatcagtaatttctaacagccttaaaacagaaacacaggctttccataacctatgattagcaagatattaatcagcagtaatagttgcagcaaaagctggttacaaacaatccatagaaacaggacgtgaagctagacagcyagttagaccagaaattctcagaagggagtatgccttaaccctaaagaggcctagaagagccgtggcaagatgagggcgtttatagcactatcttatccatatggacaggcgccccccatgcgtccgtttgtaggctctccacaagggtcgcattccattcccagagctatgaacatctgcttttctgggataggaatcttggtgatgtgaaagctccctgactgcatgtccgttcataggctctctgcagggggaagcatatcacgtgctgttggctcattctgacagtccaacctggcattgtctttacacaatcctgaatgcaactttgtatttacagtaatcaggagcatttcatcttttattccatagcaatagtttcagggggtctccctacaagacagggtttcgccatgttggccaggctggtcttgaactccttgacctcaggtgttcctcctgcctcagcctaccaaagtgctaggattacaagcgtgagccacgacgcccggcctctttttttttgtacttattttcactggtttgggtattaggatgatgagttggacatgtcctctcttctcctttctgtaagagattgtataaaattgatgttgttattctttgaatgtttgatagaattcttcagtgaaaccatctgggcccagagatttctttttaaggagcttttacgttacaaatttagtttctttaattagtataggattattcattttggtagtttgtggttgtcaaggaattggtctgtttcatctaggttgctaaatttgtgggcgtaaaattgtttgtaatagttccttatcctttcaatggctgcaggatctataatttcattccttgtcttgttcctgataaagataatttgtaggtttttttcatttgtttggttggttttttgtttttgtttttcttttgagacagggtcttggtcttgctaagaccaaggctggagggcagtggcacgatctcggcttactgcagccttgacctcctgggctcaagcgatcctcctgcctcagcctccagagtagctaggactacaggtgcatgccaccatgcacggcagatttttgcattttttatagggatggggttttgccatgttgtctaggctggtcttggactctagggctcaagagaccctctcgcctcggcttcccaaagtgctaggattataggagagagccaccgtgcccggccttttctgctttctaatgctcttggcaccacagtgactgtaacatatgttgtattttcattctcattctattctgtgtactttaactttttcctttgctattatttagaaatgtgtcatttattttccaggaatttgtgtttgtggattttcctgttgtcttttctgttattgatttctagttttattcctttatataaaatatttcaattcttttatttttatttatttattcatttttatttatttttttgagatggagtcttgctcagtcacccaggttggagtgcagtggcacaatcttggctccttgcaacctctgcctcctgggttcaagcgattctcctgcctcagtctcctgagtagctgggattacaggcgcctgccaccatgcccagctaatttttgcatttttttagtagagacggggtttcaccatgttggccaggcgggtcttgaactcctgacctcaggtgatccacctgccttggcctcccaaagtgctgggattacaggcataagccaccatgcccagcctaaattttgtattttcagtagagacagtttcaccatgttggccaggcgggtctccaactcctgatctcaagtgatccacctgcctcggcctcccaaagtgctgggattacaggcatgagccaccacacccagcctaaattttgtaatttcagtagagacagggtttcaccatgttggccaggctggtctccaactcctgatctcaaatgatccacccgccttggccacctgaagtgatgggattacagatgtgagccaccgtgccctgtcaagatttcaattcttttaaattagctgaggtttggtctaccatggtgaatgttttgtggacacttagaaaaaactgtgttctcttgttaggtgagtgttctgcatatgtcggttatgtcctgttggttgctggtgttgagttcttctgtatccttgctgattttctgcctcatagttttgtcagttatcaagagtgaagtgttgaagtctccagccataattgtggatttgtctgtttatcctttagctctatcgatttttgctttttgtattttgaggctctgttgtttggtgcatacatgtttaggattgttatgtcttcctggggattgaactgtttgtcattatgtaatgtccttttgtctctagtagtttccttccttctgaaatttgcttcatctgatattaagatagccactcctgctttcttttcattaatatttgcatgattaatgttttccattcccgggagagaggaggtgagaaagtagagggccaacttgccccacctctaaccacctcacgccatgtcatgggtgccagataggggtggagtagagttggagttcagctcctactgggccctgacctggctgggggagagggagtcagagtgtggactctcctgcctcacaccatctccttccaccttgtggatgccaggtggggtcaaggcttagctccctgctggaccacactgacagtaccctggtgggacagacagaggaagcacctctacttccatgggcagaggaaggggtatcagctcccagctcagccccaccaacaccccctggtgcctggcaggggaatagcaatgtgccacttacttttgggaagccagggtggtgtggaaggtcagctctcagggtggccctgatgaagctgtagggtgcagtttttccattggcattcgacttaagtagagtgggtgttgccaaaacaattttcctgttgttgggtcactgtgaagttaaggaatggttcccaagacccctcttacttatgacaccaatagcaaatgcaggcgtccctgagaccactgtggggtttgatgatttgctagaaagattacagagctcactgatcacagttattcttgtggctatggtttattataggaaaaggatatagattcgaagattaaaatcagccttggcaggagaatggcgtgaacctgggaggtgcagcttgcagtgagccaagatcgggccactgcactccagcctgggcgacagagcgagactccatatcaaaaaaaaaaaaaaaaaaaaaaaaaaaaaaaaaaaatcagccttgggaagagttgcagagggcagagtccaggagggctcacacctggagctggtctccactccctgggaggcgtcctcttcttgggagttgtgggcaatattactttcccgccagtggcgagtgtcagcacatgtggagtactgccagccagggaagcacgcgagccttggcgtccagggtcattactggtgctcgggcacatggatgtgtagactccctgcactgctgacctcagcctccagcccctctggagggcgagctgatatcacgtggcccagcgctcctgctcctccggacmccagtcccccactgatcagaaggcaggagtcagagccccagtgcacctcagtcattaactagtgtgtcattgcatctgcaggttcccagcaggatgccccggctctgcaggaagctgaagtgagaggcccggagagggcccagcccgcccggggcaggatgaccaaggcccggctgttccggctgtggctggtgctggggtcggtgttcatgatcctgctgatcatcgtgtactgggacagcgcaggcgccgcgcacttctacttgcacacgtccttctctaggccgcacacggggccgccgctgcccacgcmcgggccggacagggacagggagctchcggccgactccgatgtcgacgagtttctggacaagtttctcagtgctggcgtgaagcagagygaccttcccagaaaggagacggagcagccgcctgcgcnggggagcatggaggagagcgtgagaggctacsactggtccccgmgcgacgcccggcgcagcccagaccagggccggcagcaggcggagcggaggagcgtgctgcggggcttctgcgccaactccagcctggccttccccaccaaggagcgcgcattcgacgacatccccaactcggagctgagccacctgatcgtggacgaccggcacggggccatctactgctacgtgcccaaggtggcctgcaccaactggaagcgcgtgatgatcgtgctgagcggaagcctgctgcaccgcggtgcgccctaccgcgacccgctgcgcatcccgcgcgagcacgtgcacaacgccagcgcgcacctgaccttcaacaagttctggcgcckctacgggaagctctcccgccacctcatgaaggtcaagctcaagaagtacaccaagttcctcttcgtgcgcgaccccttcgtgcgcctgatctccgccttccgcagcaagttcgagctggagaacgaggagttctaccgcaagttcgccgtgcccatgctgcggctgtacgccaaccacaccagccwgcccgcctcggcgcgcgaggccttccgcgctggcctcaaggtgtccttcgccaacttcatccagtacctgctggacccgcacacggagaagctggcgcccttcaacgagcactggcggcaggtgtaccgcctctgccacccgtgccagatcgactacgacttcgtggggaagctggagactctggacgaggacgccgcgcagctgctgcagctactccaggtggaccggcagctccgcttccccccgagctaccggaacaggaccgccagcagctgggaggaggactggttcgccaagatccccctggcctggaggcagcagctgtataaactctacgaggccgactttgttctcttcggctaccccaagcccgaaaacctcctccgagactgaaagctttcgcgttgctttttctcgcgtgcctggaacctgmcgcacgcgcactccagtttttttatgacctacgattttgcaatctgggcttcttgttcactccactgcctctatccattgagtactgtatcgatattgttttttaagattaatatatttcaggtatttaatacgaaatgtggaagggaatgctggagtaaaatatcccctctcccctccgcccgcccrcccgcccgcccgctcgcccgcccgcccgctcgcccgctcctgtggtttttctgagcgtgcgggckccgggaggggatgctgaggctgatggagctgcctccagggctagggccactcaccggaggagggcggggcctgcacttgaagtcaggccgcacctgtctgtttttggaagggtagccgacaaatccttccagagggaaagttctttgtttaagtgttgtacttgaaaaggtcaatcttcagggcttcctgtttgaagtcaagtcagaggtaaaccggtcagttacagaagcaggatttytaggatttctaactccagctgttcccatactgtctagtttaaattatggctgttaaggccgggcgggtgactcaggcaggtaatcccagaactttgggaggcccagacagaaggatcgcttgaggtcaggaatttgagacctggccaacatggtgaaaccctgtctctactaaaaaaaaaaaaaaaaaaaaaaaaaaaaaaaaaatgagtcgggtgtggtggtgtgcacctgtagtcccagctactcaggagttctgagatggaaagattgcttgaacccaggaggcagaggctgcagtgagctgagatcgcgacattgcactctagcctgggtgacagagtgagattccatctcaaaataaataaataaatattaatacattatggctattaaggctgggcacggtggctcatgcctgcaatcctggcactttgggaggctgaggggggaagatcacttgagcccaggagttcaagaccagcttgggcaacatagcaaggacctcatctctacaaaaaataaaaaggacgtggtggtgcacatctgtaaacccagctactcaggaggctgaggagggaggatcacttgagcccaggagttcaagatcagtttggaccacatagcgagaccctgtgtctacaaaaaataagaaaatcagccggacatgatggtgcacacctgtaatcccagctactcgggaggctgaggcaggaggatcgctggagcccaggagttcaaggctgcagtgacctatgatcgtgccactgcactccagcctgggcagcaaagtgagactctgtttctaaatagacagatagaagataggtagatagatagattaaatagaaagtaaactatggctgttgaggtttacagttggcaggagtggagtggtttggcgtttatctctagaccgtgctggatgacagtacccagtgtcaccaagaagaggctccgtgtgactgtctctgtggctttctggttggtttagctccagtgccttcaccctcaaggacacgactgaccttgaaccctcaggtttgatgggccctgtcttgataaaagtgtcagaggaggctctggaaacatctggctgaaactcctttgctatttctgcttctaagctgtagttggagagatggttgcaatcatttcgtggtgtcgggcaccctgcttgacctgtcttcctcgtgtgtggtatttgtcaccactgcccagtccctggttgctggccacgctcagttgggacataccctggtgtcctctgtgtgtggtgtccctgtgtttcccaggctcaggtgggcttgtgtgggtcttggcccccagtgcctgctagcctcaggtgtcccctgtgttagacacctcctgccttcctttctgaagcttcgctttcttttatttttgttttgttttgtttttggagacagggtctcgctctgtcatccgggctggaatacactggtgcaatcacagctcactgcagcttcaacctcctgggctcaagtgatcttcccatctcagactcccaagtagctggggttacaggtgagcgccagcctgcccagctagttttttattttcagcagagatgaggtctcactgtgttgcccaggctgctctcaaactcctgggctcaagtgaccctcctgcatcaccctcccaaagtgctgggattacaggcatgagccatcacacctggcccctccaagttttttattatgataaaaatgtttaattttaaacgtaccatcttaaccattgttaagtgcactgttgtgtggcattaagcacattcgtattgtcgtgccaccaccaccatcatctccagagctttctcatcttcccaaactgaaactctgtccccattcagcactcgctccccattggtagaaggcagcagcttccactctctgatttctactacccgagctccctcagaaatggagtcacacagtattggtccttttgggactgaagtacttcacctcatgcaatgtcctctaggttcatcggtgtcgtggcaggtgtcagaactaacttcctttctgaggcggaataatgtcccattgtgtggaagaggcatggtttgtttatctgttcatcagttggtggacactgagttgcttctgccttcctgcgaatgtgaattgaatgctgctgtgaacagggtgtcagtgaatctgctgagggcttgttttccgtattctgggcatggccctttgtgtctgcctttgctggagcacctccccgggatgcgtttgtttataggatgttcagacgaatgtcagaacccactgggcggttcactcactgaggggggcccgcgtcccctccatttctgcattcccagttcttggtatggttcctctgaggttcggttttcctgagcacctggggtgtttgcagggatgtggaggggttcctgcagaagacaccacccacatccacgcacctgctcagattcccgggccatggtcggggccaccgcccgtggggatgactccggatgggagtggcagaaaagggcctgctgggccgaggggaggcgtctccgggaagagagggaggtgtgagcggggagaacccactttgattcttcgctgtttgcctgatgcgcagcaccacactgcgtagagacctttggctctggttttttctttttccactgaaacacagcaaattatacattttatgaaaattggcatcgtacaactggaaaatttaaccataaacttaaaactcttttaccctgttggcccccatcctccagctgtgtccacactttgagcacagtcatgagaatgacttggttgggtgcggggtggtgtcacaaagccctgtctcttgtgtgatggctgcgcctcgaatcagtgggagggcacctcgcccgtttacagttgggcaatgcttgggctgggcggcctggctgctcctggactcgcctcccagcgtctgatgctgtgtattttccatctgccccaggaatttgacacaggtgtgacttgcaggttgtgtgggtgatgcctccctccctctttcctcttaaagcatctcatgcttcttcattcgctgatacttacaacccccagtggatatttagtggagtttgctgtagtgcttttgccatttatttggactattggaaaaatttcaggtttggttttggccctatgtcttgatggagggcaagggttaggatttcagtttatcttcccggtgaggtctgagcacgtctgtgccctgaggtgggtggtttggtgaaggtggggctttaacctagctctgccacttaggaatcagaacacacacacacacgcgcgcacacacacacacacacacacactctctctcacacacacatcgggatatttttcttgtttccttcttccagagggtgtaggagttgtgttccaagtttgttcctgcaaaccctccgatgaggccagctgcattcatcggggcctggatggccgcacctctctctccccgccctgtctcctgcactcaggtgagaggctggcagggctgccgtaggggtggagagtgaacgcagggtggctaagccctcgtccctgtgagggacagtgacacggatgggagcagccatctgagctggaagctgtggacatggtccttgtgtgggtccaagcaaagtgggtggcgtgtgcattttgtgaacacgtggtctgcttcctggtgcagaccaggtctccccagagggaccctcctgagctgagctgcccggggcacctgtccctggatgtgaactgccttggttgtaccttggtggggggacctttcctgaatgtgttggttcggcatggtgacaggtgtttccctgcggcagaatgttggggccacaccaacgtccccagagtcttctccctagagtctctgaaaggaagcctgggttcctggtggtgctcccctccatgtgtgctcacccgcctgkatggaggcagcccaggggagyggctgagactcttggcagagagctggggacgctctgttctcattggcagccccaccctgaagaataacagactcccaaatatcacacaggctgcagataccacccagcccccaaggatgccatcaccaggctggggcgctcccatgcccattatccaggggtaatttttgctcacttatttataagccacacatcctcttctatcctaccaaacctaagaatatcaaaagggaaagcttggcttgcatggacgtaattaacctaaaagtctttaaacgtttctcccgagtgttggagtgactgtttgcacacatctgttgtgttttgcctgtgtgcattcctcctcctggtcagagagcccgtctcttccgccctctcccttaccctaggagggctgagtcaggcctccctacccaggcccaagggcagatgcacctgagccattgtgtcccatggttgatacgggacggggctgatttcctgacctggacccctgagacccagtgctcttagctgtgagcctctgggaagaggttctggcaggtggaggggatggacgttacagtgctgtggccacctagaaaagccgtcccggaactgagaccaactgctgagggaggaagggccaccagatcgggggccgggccggggtgagcacctgaagccggctccacctgctcttctcagctgtgcgcctccaggaatttgcactcgcttcagctgatttgggttggatttctagcgtttcacatacaggatctagactcgcacacaactgcattaatatgttggtgtttgataaactagggttgaaggagttccatcagtgaagagagaagccacgtgacctgaggatgcagggcactgttcacgtggacatgagccgtttcttagcatcatgagattttagaaacatgttcttactctgccaggacccagggataggtgaggctctcctattgggataccatttcaccagcagagagattaattggagaatgtgtaattttttcccctttggaaataatttgttcttttttttttttgacagagtttctttctgtcatccaggctggagtgcagtggtgtgatcatagctcactgcagcctcgacctcctgggctcaagtggtcctcccacctcagcctcccaagtagctgggactacaggcatgcaccaccatgcccggctaatttttacatttttggtagaggccgggtacggtggctcatgcctgtaatcccggcactttgggaggccgaggtgggtggatcacgaggtcaggagatcaagaccatcctggataacatggtgaaaccccgtctctactaaaatacaaaaaaattagccgggcgtggtggtgggcgcctgtagtcccagctactcgggaggctgaggcaggagaatggcgtgaacccgggaggcggagcttgcagtgagcggagattggcgccactacactccagcctgggcgacagagcgagactccgtctcaaaaaaaaatttttttttttggtagatacggggtcttgctttgtcacccaggctggtctcaaactcctgagctcgagtgctccttctgcctcagcctcccaaagtgctgggattacaggcgtgggctgctgtgcccagcaggaataatttctcagtgcatctctgatggggaggctaatgaagaaaggacacctggtttgaaggcttctctgtgtctgtccgtgggcgctactgatctgagccaagcaccattccgcaggcatgcctgaaatgactcccatggctgtcatggtgccatctggagagcatttgctcactgtaatggtcccgtcacacttgtctgatgaggatctgttggttgactttgacagtgataaacgaacacagcctatctgggtgttttttgcacttatagtttgggggtttgaagtactggctagaagctggcggggtgtgtgtgtgcaggtgtgcgagtgcatgtgcaagtgtgcgtgcaagtgtgagtctgcacttgtgtgcaagagaatgtgtgtgtgtgtgtgtttggagatttggacttgaaaattctagctcaggtctttggggtagtgtttgacctgaactctgaaaggcagagggtcccagactttcctgggatgatgggaactgggcaccccagatgaggctcggttgtgagtaggagcggggtgggccaccgaagagaagaca

SEQ ID NO: 93314 - DNA, 26641 bp, Homo sapiens
ctggtagcaaacaggtgtcatgacaaaggtcttctatcactttgtctcatttattattttgtcagtgaagacataagtcccagattttctctgatagacttgctttcaggttgtcttattgttttcaataaaagaagatttagtaaacatataaataaatgtgttttttatgcttccatcttggtaagaatttttatataagtaatttcacaagtccaaaagacatcttttctgaccatgtactccaacattgatttggaaaatacattcattgttgaagccttggaaaggtgatttagacattttgttgtcctgaaaaaagtaaatataaaatgtaaacaataattacattatttttcctttgttttacagatggtaaaatcaaagtacagaacaactgacttgcttaagatggcaatgaaagagtcgggcccttacttaggtcagctaccatctaggtcggttgctcatccatggcacagattttctacagagcttttgcatcatcttagctcccttgtagtttcacaccaattgctcatctatttttagcaggcaaacccactggggaagagagatgctaacaaatgaaaggaaaagaatacaaggcacaagggcagaatgaatgtcagaggtgagataacagtttaaaaaaaaaaaaaacctacaagagaactcaaggacatttcaaggataacatttaagtagatgaaatgcactttattcatgatggccttttcctccatttccctaatctcacaacacggctccatccctttctcttctgaatcttcctggcatgctgtttgttctctaatgacactttgttagatcctgctttctggcaatgtacagtggcaatcacaccctgactagaccaatgagactgtcagctttttgaaggcacagtgttttggacaaatctgtccccctacttcccgcacctcttgctgagtctagcacgtttgttgaatgaataagagaatctgcacagctagagtgaccccaaataacctagttttgttttgtattgttttgtttgtttgtcttttgagatggagtctcgctgtctcgccctgtccaggcaggagtgcagtggcccaatcttgactcactgcaacctctgcctctccgggtcaagggattcttttgcctcagcctcacgagtagctgggactacaggcacccaccatcatgcctgactaatttttgtatttttaatgttggtcaggctggtctccaacttctgacctcaagtgatccgccagcctcccaaagtgctgggggattacaggcatgagccaccatccatgcccagcctccgagttcatttttatcccgtttggagaagtgtttctttccaaaatttgtttctgaaattttgaagacgttttatcaaaatgcttgggacgttagcacgtgactaaacaaataaataaaaactatgagctctgctgtccatgagtttatattctaaagcagggacaaggaggagctagagatcgtcctttatcttatggcattatagtgtgcttggctcttcagagggcgagatgggaaacctatgaaacttggactcggagctgagaagtcttcttctgctcagaatcatacagggtcggaaatagaccagacctgagaaaccatcctgcccaaactcttcattttgcaggtgaagaaagtgaggccaaaggagactgtcttgcccaaggccaccaagctagatggtggcatagcctagattgaatagttttaaaataaagcagtaaataaagcaatgcattaaaacctttctgcagagaccctgggttagaaacttaatcttttattattttttatttgtatttatttatttattttgagatggagttttgctcttgtcgcccaggctggagtgcagtgaggggatctcagctcactgcaacctctacctcccgggttcaagcgattctcctgcctcagcctccagtgtagctgggattatgggtgcgcgcccgtcatgctggctaattttgtatttttagaagagacagggtttcaccatgttgaccaggctggtcttaaactcctgacctcaggtgatctgcccacttcggtcttccaaagtgctgggattactagcgtgagccacctcgcctggccgatacatagccttttaaatcattaataagtgctagagtatcaagcatagaaaacaaaaaagatctgtaacaaagtcaggacttaaaaaaagaaatcctcaggctatgtctttgagagtttttggttaggttcagtgtgaactttgaagactttccttcgctttcagtcctgacttgatgggcagaggtacgtagggaaggacaggcatttctcaattccatttctaaacgttgcctaagaacacgctgtgtagaccacaggcttctctsctttcaggagcaggagagggtctcccagttcttttgagccttcccactaccagggggcaagttccctaattagttgatctaagaagcctaaccaacaagatctgtgcaaaatggattattcctgttccagttcgacgtaatagcaaggctgcctctttgctcaagaaaggaaaagccacaggacttttctttccatcaccaccttaattaattcattaatgatttttcaggcaagttttattcaggcactttgggacagagcagtgagtcagaggttggcatcaaaactagaayagaagctgtacttctctctggggattctactccgggctttagattccccgatcatacaacttcctaattggaaagaaatgttcctaaacaagagcaggtgttttgctggagcctgacagtgactaataaggtcggtctaaggactgactgatgaaagagaagctggatttacttgtcacagcgaatttttaaaagttctttcaccccgaggtttactgctgaatataaataaaagacctctccttgggcaatcccatcccaattcctacaaatatgccttagttaattaaattaactttgaaatgacattccgtgtcttgctccaaattgcctttgttttctccaagatctgctcattgacaagctgtttcacaaggttcctgtttaaaatggttatgtttcgtccacagactgcagacgaattggagacaggttttatctatagccggcatggagtagccctcgcgttgtactcatttaactgtggaccaatggttcacaaacatacaattaaaaaatatatatctagggtgtttacacagtatcccgataaatacaatatggtaacttaaatctcctttgctgaaattcacacaactgaaggccaattcctgagttggcaatggggtgtggattttaaaaattagtcttttttaaaaatcaggccttcgctttcgcaattcaagtggctctcggcttaaacacattaagtcccaagctgtgactcccttccagtgaacagccgcgtaggcgcgggcacgcacacgtggacacacacactcacacgcgccctcccacacccctttccgtgtgaatcgcctgcgggatttagggcttctccaccagcgattactgtcaggtgcagaaagcaagcctctttgttctatgggcattttcctccccctggatttgactgttatttactggccacgtgagcgccaggcgcgggtccggcggggaaggcgaccccagaacagggtagacaaaagctggcccagagcgcgacccgtgcgccccagggacgtctccccagctcctgcgacacgcgtgaaattggcccggacctgcctcctgagaggcttttcccagaaatgtcttgttaaagcctttgtaaaggaatcagtgtttacttgcgccgggagagctccggccctgggtcctggcaggcggcggatttctgagctgctggagagcaacccgggaaagcaaaatcagccttggactgtcggggcccctggggctccttgctccttatcgaaagcgagttattagatagacccccacagtcccattcagcagaatgggaaactggactcagacaccttttgccctccccacagggaggccacgccgtgcggctttgaccactgatctcccacccggagtgcccgacgcccagggtcctgccaccgggcagcctcggtcagtccacagttgtggctccttccagggcctggactagggtgagcacaagccttgagcgcaacatttaagaagggcgccgaaaagtcagtaatcaaaagaaatatcttgatgcaatgcctctttaaaagaaaaaaaaatgcaaaaaatccatgatgaataaaatactaaattttaaaaagagaaaggatccgtgcagtgccatcgtaagccattttggagcccggagcaaaaggaaatatcaccttgcccaagcggtgcccctacagctcatccgagtagggcccgggggtcgaggcattcggggcccagtgggggacgaggccagtcgaaggtctcggaagtggaggctccgccgagctccggtcggggagtgcagggatggcccccgggaccggaggtgagagctcgggaaagccgctccgcccggaacaaaggcatggggagagggtgagcttgggcgggagagacccggcgggtaccggtgccctcgctgcctgggtcgggcttccacgcgcgccccggaatggaatacgctactctgcagcctccgaaactgcgagcgagtcctgtaactcccttgctctgtgattaattctcactaacaagacttggcaagatgtcgggcgaatgatttttggcttctgcacggtccccaccgcgtgcgtgcacaaacccccagccaaaagccgcctctgggaaattaaatgcaaaagagaaatggggatggggagggctgctacgtgaccaggaaaaagggatgcccagaaacatgaatcggacccagagctgctgaagtcctttcaaaaggtcattctttgcgggtacattttccagggtccagctccgcaacaaatgtggaccctgtcatttcctgaaaggataattcacaactatgcaagatagggtgaagacgtttcccaaacccgaaaaccttgtttttcccccgaccagggttaaataaacatcttttaggaagcgtggacaggagcgcagcctgctctcctcsctcggaacaccattccggcaattaatgcctccctttgggtagtaaagcaacaaaccccacacctcactccgatcctgggcttcgggcgggaggactttctctttcatcttccaagcagggggttgcccacgttcttggggaagctataaaactgatttaatggctttagatgaaaatcgatcacgctaatgcatacgctaacgtctcaggaatcgcatattcagaaaggactggccgggccgaaagcgcacggggagtctggggctaggaggtgtcaggccccgctgggtgggcagcagcgctccggtcccctctccacttgggtaaccgggaaaaacctacggggctgtcacgcggggaagcgcgaaggtgccaagggatgaaagctcaaacccgagccctggcctcctcagccggctatttcctttggcgccgcccgcctagcggcggggtgcagcggcggcacaggtgccggtgtcgggctggaggcgcggcgcaggctgggcccgcgggtagacggcgaaaggcgccgcgcgctccattcacaaagtccgggcgctgcccgccgctggcggcgggtcggaggccgcctccctcttcctctcggcctcggttttatgaatgggcctgatggcgagcacccggcgccctgtttactccgctctttgtgacgtcgagttcccgtgaccgggagccagcggccgcgctccattcaagctccggggagggggtgggaggaggggcccggagggggcggggagwcagcgcggggggcgggggacggcgcggggcccggaatggaacggggcggggcctggcggggtagtacctagcgccccctcccccgggagcgcggaggagcattaataaacctctaagccgaggagaaaactctggctggggcagtgcgctgagcgccggaggagcgtaggcagggcagcgctggcgccagyggcgacaggagccgcgcgaccggcaaaaatacacgggaggccgtcgccgaaaagagtccgcggtcctctctcgtaaacacactctcctccaccggcgcctccccctccgctctgcgcgccgcccggctgggcgcccgaggccgctccgactgctatgtgaccgcgaggctgcgggaggaaggggacagggaagaagaggctctcccgcgggagcccttgaggaccaagtttgcggccacttctgcaggcgtcccttcttagctctcgccygcccctttctgcagcctaggcggcccrggttctcttctcttcctcgcgcgcccagccgcctcggttcccggcgaccatggtgacgatggaggagctgcgggagatggactgcagtgtgctcaaaaggctgatgaaccgggacgagaatggcggcggcgcgggcggcagcggcagccacggcaccctggggctgccgagcggcggcaagtgcctgctgctggactgcagaccgttcctggcgcacagcgcgggctacatcctaggttcggtcaacgtgcgctgtaacaccatcgtgcggcggcgggctaagggctccgtgagcctggagcagatcctgcccgccgaggaggaggtacgcgcccgcttgcgctccggcctctactcggcggtcatcgtctacgacgagcgcagcccgcgcgccgagagcctccgcgaggacagcaccgtgtcgctggtggtgcaggcgctgcgccgcaacgccgagcgcaccgacatctgcctgctcaaaggtaaacgagggctccgggcgctagctggagtcggggagatggagggggtcttggcggcctgcgccttattggcacgggaaggagtccccggcgtgattcgtggttgcggggatccccgcgcgcccctttgtgtktgttggtgtgtaggggtttgcaaggtttctgtgcaagtgcgaggttcaagtcctcagggaaagtgcggacgggtttctccggtcacctgcaattccgcaccgtcctagcgaggccccgtttattgacattaacggtcctagcctcgaggatgaagcgactcctctgcgcggtccatcttgagtcccgggaacagtttccaagtaccacggggcgcgtggggacaagataggcctgttggtttggcgtgctggggccctacactgagccggaccgggagaatcccagaggtggagaaaaggtgaagaggggtgggcgccgaggtacaattggccttgccagtttcactgaaaacaagaccctggcaaatgcagaaagggagattgggttgcacacactgtgtagagcgatctgtatctgcgttcccgctgcccaactccragctcagcttggaaggtggccaatccccgtcccgggctagatccaggctctgggagcgggaggctgaaggactgggtatctgggggacgccgggcggaaccggtcctctagcgcctgcaaatccgggcagcggagaatgatcaccttttgttcagcccggattttcgactatctgatggcggcgcgtgccggattttagcgagccctggcgaaactctcggcggcgagactgtcttgtcacatttggtagtcggaaatcctggaaaaatcgcgtgctgtccgagtccctggagggacctggcgcccgccacacctgcagggcagggtgggtccgcggccctcgggctagggagcgggcagggcgcgtggggtccgggcgccccccgccgcgctgcgcctccgcctcccgccgccgcattccgcgcattcttccgcgcgggtagggtctgcgcttccgagcccggtaggcagttcagacccccccacacccatcaaagagccgctcctcccscccgcaggcgccttcgccgcctccctcccttcctttcctttccgctcctcttccgacctgtccacccgggaggaagggagctggaaagggggcggaaacctctcccctccaaaaagcacaacaaaactgttcagtgcggaggagccgggttcrcccctgccggacagcggggggctttgttccccgcagttgtttcctgcccatttgacctgtcagctgctggggaaacgctgctgttgacctttggttgaactgctaaggcgattttgctgatttttctttctttttccgcgagggctgtcttttgctcctccaaatgagcccagtccccctcccttctccccaaagcgctccaagagaaagtgccaggaaggggcttgtcccggaaggcctggcggctgagcggggccaggtcctggttaggcyaccagggtgggcgtccgcgccattgtttgagcttgtcggcgctggtgggrgagatgagggcaattcctctgggacgcaagtcccctcgaatggccggggctggccgggatgttccccgcacggcgctgccctcgagtccccccgatggagagcgcgggcgcgccttccttcgctggcgtccaaacccgggaccagctagaacacagcagggctgggactgggttccagccccacgtggagtctggatttgttttgttgtgttttgctttccttcctggaagaaatcccgaggggaccgccctagagcggcagctccaggacctcggcccttgggcttccgggggtgcagccacttaggccccgctcccggggagagagggattattttttaagatttatccccagggcgcgcggcatttccctgtccctcgtgaatcccgttgagagtcctccctccccaacctcctccatttccccagccagaccgattcgagagccctggagattctgggcgaggctagtgactgggtagtacaggcctctaggtaaaatgacagccctctggtgggtggcgaggtgcctggccaacataagagaagtactttaagggctgtttcctcctggagcctgcactgcctctcgtagtcggccccgacgcgggcagggagaatcatcttctgcatctcaaagtggacatccttgcagatggaggtgtgcaggcctgggccacagatttagcttcggtctcttctagaatagcccctcctagccagaagttcagcttctgcttccaaagggagcctgcccttggaagcaagcacctaaaattgagaggtgggggaatcttccagcctgctctgttgtggtgaacatcgttgaggttaactgggccctattcggtttagcttagctgattttgacatatgtgttcagcagaggccatctttaacccagttcctcttcttcctctttgccctctaatggaaaggcatccctagagaggtcagaaggaaaaagtcagtatctgctcccacagctctgcgggaaggggctggggaaggaaatcaaggtgtctcccaggtctccagatacacctcccttccatgcctggaagccagtgcagtggagcaaatgtggtttcccgggagggggctctggggcagagacctaaaggggaattttgagaagcaaaggaagaaaaagccccttagattatctttagtaaatgcctgaattggtgaagggttggagaatttgtttcctactggagtaattcattttattttccagcgagggaatgtatgtatgtctcatttcaggtgtgcctgtgcgtgtctgtaaagcaggacaggaagccagtggaaggcttgatggttggtgtctgccattcttggaggggttaggagaagcagtaaaagcaacaagagtattttcagaagtgatagtagcatgtccagccaaagctatctaattctattaattgcattttaaaattcagtttttctatttctgccacgttgaagggttacttcaaccacgttgaactggttactccatgcaggtggcaggaggtaaacttcgcttaatatcaagaaagtacagcctagcctttacatttcctcagattacccgacttttgctaaaagcaataacgaaaaatctaatgttttctatctttgctagtaaaggatttccagtggggtaatttttttaaaactcatttaatttaaaatcttgtaaggcatttttagagtcagtttggaaattttagtttttcagattttatcacaatacacttcttgaaatccctttctctctcattcgtaaatccttggattagagtttgagactcccctggtcattagagaaagacaaaaagagctttttcttaccctattctttgcctttattaaccccaaataacaaaataatctgttatgcaaaaagattgyaggtataaaaacattaccttcctttccacctacctaaaacttccctcagcctttgtcagttctaatttaaaagctgtcctggagctgttggagaaatggggaagatcatctagatawtccagtttctccttccactcaccctatagtaccggatagcatccaatagcccagggcctgaccatacagcccatgatattaccctttctgtagaaaacagtcactaaggccactgatgaatgtggggggagaggaacacaattaacagctctggaaactctggtgacatttttctgttttttctctctctagccccaccattgctctctctgtcttcagttccccaggagggcaatggcatcaaacagcacagctctgggggatgtcaatattgcataccttttctacctaaagggaaaatgactcgcttttctgcttgcaaataaatttctgcttgcaaatatggtagtttctgcttacaaatgtaatacaatgcccatgacagccaaggactggaagcataagttgctaggtcttacaggtgattttttacaatgaagcaaactcactatgttagacaccatttacattggatgtctccaactaacaaaagtaactaaagacagatgtaggtgtaaattgagagtgaaatttgaccctttagaccgtcacaacttccttgggcttatcctgggtgcttataggagaggtgggctccacccacaaaaatrgactgctcagaaaaatgagggagagagaaagggtggccactttcccgagccaagaaattccttgaaaaaaaatcagaacatctgaaaccagagagccgatttccttaccgggaggcagttcctggctaacgaagaggaagcacgatgggaagaaaagttcactccaacggaagccagtttgctgaacatagcagatcgcccaggaggactgggagagactgcaaaccagttcgagcccccagcatggcgttaggtgtcagccagctggcaggaaggtccaggtgtctgtgttcagagtctcaaggtgagaagttcacttagttggattttaaatacagctcagcatttacataggtgcttactaagtcaacagtcacataaagtagagttcccaaaggcaaatggccttcaaacaaccccagactttcttgcaagagcatgacttttctggcaagagcaaggccatgagccctgcctgggacctggcactattctgagtgttgggggcataatggggaaaaagtggcagccacattaagattcatgaccaaggccgggtgtggtggctcacacctgcaatcctagcactttgagagactgaggcaggcagatcacttgaggccaggacaacatggcaaacttggtctctacaaaaaatgcaaaaattagccrggcgagatggcatgtgcctgtaatctcagctactcaggaggctgaagcaaggagattgcttgagcccagggaagtcaaggctacagtgagccataatcgtgccactgcactgcagcctgggtgagagagtgacagtgacagaccctgtctggggraaaaaaaaaaaaaaagatccatgaccatagtcaccaccaaaggacagtcttccccatcacaaatcccagtaacagtcctattatggtgatattatcaatctgccctttgtaaagtacttttacatacattatctcctactyctgcaagggacrggggagtgtggtggagggcttctaatgaggggtcctcatttccactaaacttggaaaattgcctccctgtatgaggatgtgagaaggaggaggcacagtggagttgaactgtagatggagttattcttaagtaagtctgatgaaaatcacactcctttttwtcttccagactttcaaattgtaaaataaaggtgataaaatgagagatttaggaatagaaaatatattcttaaataaggacatgggaaaaacaggttgaaattagtaagaaacctcttatggaattacattcagtaggacacagacacgttcaatacattcatttcatacattcaaagggcataggaaaaacagaattcattcattcagaatggcacatttgataatgaaattattcaggagatagaaatgcagattttaggcacctgctkcttcagagctggcaaaactgacacgcaaataagtagatcctggatatttagaagcagaggatattggaacttaaagatcattataatcagaaattcttacattttgagagtgggaaaaaccagagttgaggagggaacatacttgtccaagttccacaagttgagttggacttacacctggatctgtctccacttctccttgcacacctgctaggggcacgggaaggagcccagcccctttgtagacaatgagaataagctttccctttcatgattttttgggataaaactaggtgatctaaatctagctcttgaaagggctgtggctatggtacttgcatggatttggggatgggtaggagggactgagtggaagtcaccttagaataatcttttttaaccctgcccacagtaagaaacacattttaatttatattgtgacccaggagagggatacatgcacatctgaagaaaagttccataaaatgatatcctctttaagggcagtgcatcctcctaattcctattctattgtattccattttaaaaatgtgggtcatgactctttaatgacagcctggattaggaaaccaatgggtagaagcagagtttggtgaaatatcagcagtgccctatttggatcagttctgtttttgcatgaaaagtctgtcttcacttgatgaaacctgcaggcagtkccccctggagaagggcccaccaggaaggggtggaaggcagaggtggcatagactgacacccagagatgacttactggggcatggccctgtggggggtggacttgagcagcttcttccaccgatggataaatgctaacttgcatgcatcctcccgcatcaccttcactgtgtcctccgggctccaccagcccagaacatatcgttctcacccatgagtgctggcctgagtgcagcccagggcccaccaaaaggaaccccctttagtgtggcatcttgtgaaaccagccacagacccccaaaagctggccaccactgtcagggacgagaaccttccagtgtttmtgccccttgagcgaatctgcttcttcaccttgttccttttttttttttttttttttgagatggagtctcgctctgacgcccaggctggaatgcagtgrcgcgatctcggctcactgcaacctccgcctcccaggttcacgccattctcctgcctcagcctcccgagtagctgggactacagacacccgccaccacgcccggctaatttttttgtatttttagtagagacggggtttcaccgtgttagccaggatggtctcgatctcctgacctcgtgatccacccgcctcggcctcccaaagtgctgggattacaggcgtgagccaccgcgcccagctcaccttgttcatttttgcttgttctttaaaactccctcagagggaactgacttttctgtaatcatttttctgctgccttctaatggtgccttttccagacagttgcgatgagcctgggggagatgacgaatggccctctcaggccacatctagcctgttccccaccaaatgggtcacttgggccctccttgccccccacaccactccatggccagcagccggtgccaggtccctgacaagggttctgctgagtggcagccatggccatgcctgggagagaagatggaggtctggaggtctccggaaaccaagagacaggtttccrggagagcaggctgtcaaatgcccagtaccttaccagcattaccctgtccccggttcctctttggcctttgaggatctctgctgagggcatccgagggcacccctccatgtaggcaccgagaagggaaaacttcatgatctgtctccctgatgccaggcacagagcctggctgtcagaaccagtcctcataggcctttgtgcaggggactttcatcacttacagacgaggaggaggctccgagaggttcaggaggcccgggctgcacaggtgatacatgctcagggtggggtgcaacctcatggcagagcctgtgccctttcggaacttcactccagtgccctgttccataccctcagcaatggagacaacatcctctcagctgctctgggctcttcctgcttctccagccctgagggccactctgctctgtgaccgtggggcctgccctggcactcctgggccacccaaccattcacttttgagtgcaggcgatagcttgtctgtcttggtggtgagttttkgcaggacaccacctgtgtctaacatgttgttttaaaatgtgttttaatagctcaaattatgtaatagacaaaaggatcatgtacttagaattttttcaaatcctagagaagtatatagagtaacaagtgatggcttgggatacaagtgatcaaccactgttaatgaatgagtttcccttccactttctccgaaagggagcatggactgaagtttcccatcacagaagcccctgaaggacttcagctgcagacagatatttccttcctcttcyctcatcctctaattactgcattttgggcagcagtggtggcagccgaataaggaaaggggtttatgatgggagggagggggtgcttctgtgatgaagtggctgccgaggccaccagcatgaccgaggctgacggtaccagccccaccagcaggttttccatccagggaggctggtcactgtgactcagcaggaacaagggcctgtgaccagagagagatccayttatatcctgagggagggagaggaggggaatagagaagcctccggtcagagaggaaaaaatgtacaccctgtttctataagcctcatgatgtggtagagaaccgtttccttcctctcagtaggaagcagtctttagggttgggatttggcgcaagtgactgactcaccgtcacatgtctgcacattggaaaatttctatcaatggccctagggcacagaggtcctatgtcactgtcatgaagaccgcaaaggtagcgacatccaggactgttggccaaattgtcattggagtcagttgaatgggtttgttggaatggtggttctccaacgcacaggccctactgaatcaattgaatccatttctggccctacagacactgtaaaataaaaataaaagcagggccatacattgatagcactgtggattggaagttggccgcaaaaggaagtcccagagatcacaagaaagccagagatagggcttgaaaggttgtctttttggatggcctccctgtggcctctccctgtatcccacctgcctccacccctcctagataggagcactcaccctaccccagctcagctggccatttatcatcatcttctttttttatttaaaagatctcccttctctggaagatgatcccacagataaccattccagggcttacccactctcaggtcaggaaatactcccttgccccaaacctgtacatagcatgaggggtttatttagatttaagcccgttttcctcttgttctggtctcttggtgacggaacagctattcatgaggacgtgcaatgracatctgttccattgctgagatccagaagagtttgtaccagggtcattttttcccttctttctcacattggagaacctcccctgaggaagggctggaatcaggggtggcaggtgtctctacaggtacttagtgtccttggaagcccagcgtgacctttgcttctctattttgtcattgtcctgaggagctactccacagtcacttctgcacatccccctgcacgtcttcctttgtatgtctacctctctaacccaagtcttgtccataaagcttatccttccagctttgctgcagtcctgacgagtgtgtcctctgcatctctggaaaccactccatggccattctctaggtccacagcgccacctagtggccaatatggagcacgccagcccctgccttcctagcagtccgcctgagtctgtaggagtcgagttctttctgacttcctgctggcttagtgaccccattaacctgagcttctttctcctttacaggcggctatgagaggttttcctccgagtacccagaattctgttctaaaaccaaggccctggcagccatcccacccccggttccccccagygccacagagcccttggacctgggctgcagctcctgtgggaccccactacacgaccaggtagactcggggggcagggcttggaagtggggggcaggaacagcgtaggggccagtggatgccttcttttcagagttctgacggtrttttttgtctttgcttttgagacagtcttgctctgtcacccaggagtgcagtggtgtgatcatagcttactgcagcctcgaactcctgggctcaagggatcctccctggtagctgggactacaggtggcactaccatgcctggctaattttaaaaggtttttggtagagatgggggggggggggtcttgctatgttgcccaggctggtcttgaactcctggcctcaagtgatcctcctgctttggcctcccaaagtgttgggatcacaggcgtgagccactgcatccaatcctgagatttttttaagtctttgaatgttatgcctcaatttggggagaatgcggtgaacccggagtattggggtgggatgttaggtaggacctatttacttcttggaaatcttccccttccctctctaaatatcctcctaagaaaaaagtctaaagacatgactccctggcttggcctctaacgtcgtgtccggacaagtgaggaggcctccagaagccctgggggacctgctctctgggaagctgaggtcattctcctctgaagtagcaggccatgaaatacatctcagtcccygacaggcaggctgctcccaygtatcagccgaatgaacayagatggtcacccaccctccctccaagaaaacctgcttgagccactgtgtttcttataagcccaccctccagccctttcagttagatggactctgctgcccacatctcatgtgctaaatttaagccactgttgcctcattttgccaagatcctctctcttgtctgtgtggccatgagggcatcagcttatttatttgtttatttttagagacagagtctcactctgttacccagrcttgagtcctgtggcscaatcatagctcactgcagcttcaaagtcctgggctcaaatgatcctcccatttcagcctcccaagcaactgagactacaggtgtgcaccatcatgccagcttcattgtttgagagatgaggtctcactgtgttgcccatgctggtcttggaactcctggctcacatgatcctgccacctcagcctcctaaagtgctgagattacaggtgtgagccactgcacacctgtttttgatatgcccagtgaatacatatcaaaacaaataagtatctaaaccacacagcaaatggcttgatgattagcagatataaactcagtgtcacagatggtgccataaggccggcattgtcctgccgcttattttgccatgggggaggtgcaggagagtcccacaagactttacctgccctggcctctctgctcacaagtagagggcaaaggctggagaagtcccactgggcctatcacccctccaagagttccaggaggctacagggggaggctgggagggccaggcccagcaggcattctccctgggtttggaaaggaaagctcttctcagacaagcttccactccctgtgccaagcactttaccctcatgtcattcaggggcctttgtttccctttctgtgcaggggggtcctgtggagatccttcccttcctctacctcggcagtgcctaccatgctgcccggagagacatgctggacgccctgggcatcacggctctgttgaatgtctcctcggactgcccaaaccactttgaaggacactatcagtacaagtgcatcccagtggaagataaccacaaggccgacatcagctcctggttcatggaagccatagagtacatcggtaggctggccctgctctggggttcctgggtttgagggcgggtgggaaggataaggaacccctgtaagcctgggttgaaggtggacattggaggcactgaatccaagggtccccattccccctcttcctcattgggaaggcttatacattggatgttgggttgggagggaggagggaagatggacctacacacaggcttagcttgcagagccagtccccttccccttgcatggcttcagtgcctagatggtaagagtttttggacggggaggaagacacaaggagcattgagtcatagtttttattttatttctatttatttatttattttgagacagagccttgctctgtygcccaggctggagtgcagtggcgccatctcagctcactgcaacctccgcttctggggtgcaagtgattctcctgcctcagcctctggagtagctgggactacaagtgcaccaccacgcccagctaatttttgtatttttgtagagacagtttcatcatattgcccaggctagtcttgaactcctgagctcaagttatccaccctccttggcctcccaaagcgctgggattacaggagtgagccaccaccctggaccccactgttttgtttctgcaaagggaaatccttgaacagataataggatttaaccagcttcagcatagtgattcgggaaaatagacctcagaattgggggcattctagagacctgcctacatgggttttcttcctctccagtccttggtctagcacggctagtccttccttcagagccccccgaccccaggggctggccggtgcccctggtcggggctggggtctgcagaaacgtgcactaacctattgaaccctgtccccagatgccgtgaaggactgccgtgggcgcgtgctggtgcactgccaggcgggcatctcgcggtcggccaccatctgcctggcctacctgatgatgaagaaacgggtgaggctggaggaggccttcgagttcgttaagcagcgccgcagcatcatctcgcccaacttcagcttcatggggcagctgctgcagttcgagtcccaggtgctggccacgtcctgtgctgcggaggctgctagcccctcgggacccctgcgggagcggggcaagacccccgccacccccacctcgcagttcgtcttcagctttccggtctccgtgggcgtgcactcggcccccagcagcctgccctacctgcacagccccatcaccacctctcccagctgttagagccgccctgggggccccagaaccagagctggctcccagcaagggtaggacgggccgcatgcgggcagaaagttgggactgagcagctgggagcaggcgaccgagctccttccccatcatttctccttggccaacgacgaggccagccagaatggcaataaggactccgaatacataataaaagcaaacagaacactccaacttagagcaataacggctgccgcagcagccagggaagaccttggtttggtttatgtgtcagtttcacttttccgatagaaatttcttacctcatttttttaagcagtaaggcttgaagtgatgaaacccacagatcctagcaaatgtgcccaaccagctttactaaagggggaggaagggagggcaaagggatgagaagacaagtttcccagaagtgcctggttctgtgtacttgtccctttgttgtcgttgttgtagttaaaggaatttcattttttaaaagaaatcttcgaaggtgtggttttcatttctcagtcaccaacagatgaataattatgcttaataataaagtatttattaagactttcttcagagtatgaaagtacaaaaagtctagttacagtggatttagaatatatttatgttgatgtcaaacagctgagcaccgtagcatgcagatgtcaaggcagttaggaagtaaatggtgtcttgtagatatgtgcaaggtagcatgatgagcaacttgagtttgttgccactgagaagcaggcgggttgggtgggaggaggaagaaagggaagaattaggtttgaattgctttttaaaaaaaaaagaaaagaaaaagacagcatctcactatgttgccwwggcwcatcttgagaagcaggcgggttgggtgggaggaggaagaaagggaagaattaggtttgaattgcttttttaaaaaaaaagaaaagaaaaaaaaagacagcatctcactatgttgccaaggctcatctcaagctcttgggctcaagagatcctcccacctcggcctcctgagtagctgggactgcaggtgtgtgtcatcatgaccaatgtgaattgcttttgaagctggttcatgggcatgtaggccaccgaagcaattttagaccacagtaagtcaagcttttttccctccgatgatcactgggtggttgcagcattttttgcataaacctgcctaagacttgtctatcgtctgtgatcaatatgccatattacactaaggtgctcctggaaaattgggtgcagttcaaattttcctacagcaaatcatttggcaaggccagccattggggaaaccagacaactagagataaccctgaaatgaatccttttgtaaattgaagcaccatcttttctttttttgcataaattggaggttttaattttagggcagttacctgaagtgaaatataccaacaatttcttgtgttctttaaattcctagttaggtgaatatttttgaaggtcctcttttgaataaagaggggaatggacaccacatttcaggtcttctcgaagtgtggaagggcaagagagcatcagtgagctgatggtggattgcttacatcggattccattggtatgaatttcccaaactggaaatcaaagcgccagggtggggttggggctgactgctggtgagggggctggccgctggctcccgtgacgtgcgtcatgggcacgcaggcgccattttgaatctatcgtcggcacgtgggtgccattttgaatccttagttgggcctttctaaatggagaatggctttggagggagacacgttttctgtggggagggtttgggggggagggaggagggaacaagctacatgctattttgtttgtagtattgtggaacagtcttgttatggagtgccagcttagaggttgttgcaaacttgtctagaagtgagagcatggttttttttagccctttgagagtctacatctaatgaacattcttgctcacccataaataacgtcaagcctcaatgtcaccgtcacgttgggatactctttctcatctggcatcctagacaggacaaggttggttacctttccttccatgaaccatgaacctgtgacggcatcattcatcctgacttcaccaagctccgcctgtgggtgaggccagagctcccactggcaatttttagaagagccagaggctccctgcttcctctagaaataacagttcagggtgaagcatggagggtttcagttcccagacaatggaaccatttagagacaacacagttggacatttccactttttccttgattcctggaagtccagtgggttctgcagctgaaaaagccctgggtcccagcagcagagagacaggacagaggggatgcttgggcggggagggacggtaacctgcagaacagattccatttttatagaacgagtacacgtttgctaaaacagtcctgctttcccagactggattcccaccacagggacagtcggaactcaggactagctccagcgacatctttcctccgaattcaagccttctatcacaatgtcaaaacagctatttataaagccattttcattgtacttgataacagcacgagtcccaaaacttttagaaataaaataggacattggcttgattgaaaagagggactttttaaaaattgttctttcgtcagaagccttttggatgacttacaatagctctgatgaagataccaccccagcgtcagtccaataggtcagtgagtttcaacaggcatccatccctcccatgaagggattctggtgatgggaagtttctgtaatgacaggaaagcattgaccctcattgattgtcaactttggtattagccatgaaagacaggatgctcattgggtgttctgtagagtgaggaatgctgcctattccctcccagaacgtctgacccaggggtgtgtgttgaggagccctgggggaaatggaccaagttttcccacagagcagtattaggctgaagagcaggtgactggtaggccccagctcccatcattccctcccaaagccattttgttcagttgctcatccacgctggattccagagagttttccaatttgggaagccatgagaaaggtttttaaatcttgggaagatggagagagggacataggatagttgactccaacatgacaggaagaggctggagattgggaattggccatcaaccaagcctgtagtagtaaagccatggtcccgcattggaattacttggggaacttatacagttctgatacccaggctctcctagaccagttcaaccaattctaggtgggggactcaggcatcagtgtgtttcgtagctccccgggtgttttccctgtgcagccgagcttgggaaactgccatgctttttggatgtcaaggcgctgttggaggctgggtgtgacagcacagagccaggttgtcttgtggaaaccacagccacgggtttgccactggctcagcatggcctcactgccagtcccagcctggctgagggacaagatggtttctcttgggagttcctgagtggagcacccttccaggctttttgaaagccagctgatctgtggagccttgttaagggactcaatacggtgtttggatattgatgtttttccttgagactgtcttgtccatcaataaagatggaggatgtctcctctttgaaccccgcttccccaccagtactctctctcccttagagtttatgagttattcaaggaggagacttcttaaagacagcaacgcaattcttgtaacttgtgtaaatagccccatctttcagagtgataccatttctacatttgataatgcctgtattcctgtaggatgtatatagtttaggggattttttttttgtttggttttgttttttagaagtcaatatgtctggttttatttattgcttgaaaaagatcatttgaaaaaaataaatacattttcaaccacttctggcttggttagacctttccttgaaaactgttctgctgttatgacttggaaggggaggaaagaaccgctgggtcagttaataatcttgcccacttaatagcgcagtggagatggagtccatttgtttaccttcttttcttttctttttttttcttttcttcatggagcccttttcttttctttctttctttcttctttctctttccttctctctgtgtctctttccttttcttcttttcttttctttttttcttagacaaggtctcactgtgtcccccaggctggaatgcagtggcacaattgtagctcacggcaaccttgaactcctgggctcaagcaatcctcctgcctcagcctgccgagtagctgggattatgagtgcacaccatcacaccagactaatttttttttgaggtagggtctcactctgtcgcccaaactggagtgcagtggcgcaatctcgattcaccacaacctctgcctcccaggctcaagcaattctcctgcctcagcctcctgagtagctaggattataggcacgtgccattactgcctggctgattttttgtttttgttttttgtctttttgagacggagttttgctcttgttgcccagactggagtgcaatggcacgatctcggctcactacaacctccacatcccaggttcaagtgattttcctgcctcagcctctggaatagctgggattacaggcatgtaccaccacacctggctaattttgtatttttagtagaaatggggtttctccatgttggtcaggctggtcttcaactcctgacctcaggtgatctgcctgtctcggcctcccaaagtgctgggattacaggcgtaagccaccgagcccagcctccacctgggtaatttttagtagagatggggtttcaccatgttggccaggctggtctcgaactcctgacttcaaatgatccactcatctcggcctcccaaagtgctgggattacaggtatgaggcaccacacccagtatttttttttttaagagacatggtctccctatgttgcccaggctggtcttgaactgagctcaagccatcctcctgcctcagccttgccaccacacctggcatgaacccttttgctccctgaacactcttcaaagcaggcgagaggagaaggctgatactcatctctaagagcctgatttctccacgccattctccagtagcagagagacaaggaagaagtaaatgatgagagatagcacttcctcttagcctctgctgtgtgtcatcacttaggcctttaagactgacctctcctggccgggcgcagtggctcacacctgtaatcccaacactttgggaggccgaggcgggcagatcacgaggtcaggagattgagaccatcctggccaacatggtacacggtgaaaccccatctctactaaaaaaaaaaaaatacaaaaaattagccaggcgtggtggcaggcacctgtagtcccagctactcgggaggccgaggcaggagaatggcgtgaactcgggaggtggagcttgcagtgagccgagatcatgccactgcactccaacctgggtgacagagcgagactgtgtctcaaaaaaaaaaaaaaaaaaaaaaaaaagattgacctctcccactgaggagccatcattatatcctgtacttcgttgtaatagaagaatgcaaaaggaatgaccactcctggaacacccctccccattggggaggaggtccagcctgtctcagagaatctgaagaaattttactgacctcttattccactgggatcatgaaaatgagggctatgtatcaaggccaggttgaagaagtaagctgataaaggtggtgtcatatgtcagtggtacccctggtgctgattgtgggttgcttgtatcagatttcattggtatgagttgccaaactggaaatgaaaggcattagtaaacatgcattcccaccgtatctgacaatttaacagtattgtggaagcactggccaatgtaattagcaagggagagaaatgaagtatacaatttggaaagtgggaggtcaaatgattttcagatgatgtgtattaaacaaaagagaatcaactgagaaaccatcagagataaggtaattcagtaagtggttgattacaaagtaaacataaaaaacagctttcctataggaaatatcaattaaaaattaactagaagtggtagaaaatcccatttgcaatcattgcttaacacacctatgatagaccttaacagaaataggtaggatgtatatgatggacatggtatagccctgccaagggacatgtagagacacttggagaaagcggaacatacagatggtccccaatttaccagggtttgactttacggtggtggagaagtcatatgcattcagtagaaactattgaaaaaggaaaataaatctcaggacccccaaaccactaagccaaatggaactcactaataaatcttgggaccccaaatatcactaggccacaaggaaattccttgtgaacaaagaacagacagaactcaaagtcctctctttgctcaccatgagacaaatgcttatctgattgcttcctttgccatattgtttcactaagagactaaggcctaagtgactattcctgtaaattgtgttttcagtggaaggcttatcagaaactcaaaagaatgcaacgtttgtctctcatctacctatgacctggatgcccccatccccactttgggtcatcccacctttccagatcgaaccaatgtacaccttacatatatttgttgatgtctcatgtctccctacaatgtatagaaccaccatcaggacctcctgaggctgtgtcacagacacattcttaaccttggcaaaataaactttctgaattgactgagacctgtctcagttattttgggttcacaccgcactacccatacaggcatcctgactttcaatttcagtata

SEQ ID NO: 93315 - DNA, 12538 bp, Homo sapiens
cctgaggcagagcacgtgtgtctgtgtggggtatacaagagctccaaccacttttagcctgccccactcccactacactaactgtcctctggggccagggtcaggccaggccatgttgctggattctgggagagcctgagtagaagagatctgatttcacaatatgagcagcattttacaccgcagtcctgaacaagcacgcacatgaattgccctgctcatggctgtttgtcttctgggtcagtgaccgagggaggcagtgtttccttccaaaccctgcgtgggacccagagagagaacatacttcccagtggaagtcagacagctgaggctgtctcagctcctcaaggccccaggccagtggagacaaggaagggggttgcttcatatcatcatacctgggctgggaaaacacttaaagggccagatctgttctggctggtcccatgcagggcagggtgaggggagggcaagggagaagtcaaaactcaagtctacaagtgatacaatgtctgggatttgttaaaaagtattccaaggtggaagcaaggctcagtggctcacccctgtaaccccagcactttaggagcctgagatgggcaggttacctgaggtcaggagatcaagaccagcctgaccaacatggagaaacctcgtctctactaaaaatacaaaaattagccaggcatggtggcgcatgcctgtaatctcagctacctgggaggcggaggcaggagaattgcttgaaccagggaggcggagattgcggtgagctgagatcgcgccattgcattccagcctgggcaacaagagcgaaactccatctcaaaaacaaaaaacaaaaaacaaaaaacaaaaaaaaagtattccatggtgtgtagagtggtgagggtggggaagggaagaatagatggaacaatagtgacaaaatattgacaactggtgggtacttggggcttcactataccattccatttttgtgtaagtcttccataataaaaattaaacaaagaaaaactaatccaaactcttgtttacttttgagacctgtagaaaacaggccaattctactccccaaactaaccatagcttcccaacacgagaactgtcatcaggaagtgccataatggcactgttactcaagttgccatcccacccagatacaaccatgtacacgagtgagaacacagggccagggggaggggtcttccctcctgctgatcccacacagtgttcaaaggcctagtcagaccccgctgtctccaagaaaccttcccaatgctcgattccagcctacactgacctgtatgtccctcttccctactgggtccctagcgctgcctttgcaaatactcctgggggttggtcagggactgagagcagatccttttgacccccagtgctgagatcccctgcatagctcatgcctcagcttcccagccttaaacctaaaggaactgaaggctccctgttaaaaaaaaaaaaaagaaagaaaaaaaagccttttaagttctgaccagactgggcacagtggttaacacctgtaattccagcactttgggaggccaaggcgggtgaattacctgaggtcaggagttcgagacagcctggccaacatggcaaaaccccgtctctactgaaagtacaaaaatttgccaggtatggtggyaggtgcttgtaatcccagctactcaggaggctgaggaaagagaattgcttgaacccgggaggcggaggtcgcagtgagccaagatagcaccactgcactccagcctgggagacagagcgagactccatctcaaaaaaaaaaaaaaaaaaaaaagttctggccaactgccctctagacaaattctatcctctgttattctctgcattctttggagggagaggcacacttacttattaaccatgacctatctttttccatgacaatttcacaacctttcctttagttgtgcccatccccattccccctttcctaggtgttcatatcccaccaatcccacagcgggaggctgctcatccatagacactcctaattagcctgcatgcttctgttgctgggatcacatctctgcccttttccaggtgcctaacacttaataggttcttacttgatcatcttgcgacctaaaagcttgtacatctctgctcattttgacgttggtagatctttgatcactgataagcaattcagtctgttttctacacttgcccaattcctttcttctgccttctgcagaaagattcatgtttgtgtgtattctgcagagggtcccagaggcagaaatctggcagtgtctacctgtgggtgagggtgtgggagacagctcccagcacactgcagtgtgggctcctacgcaatccactccacgtaggttatgtaagcacgagctattcatgcatgtgaggctctgctgtttccccatatgatttgggtactctgttggtaaaggttgtatgaaagtgcatgcatatctctctaagtgcatacttaagtgagcccagactttcaaagattttcatattttgaacacatcaccacgtacttgttttttaagttaaaaaaatgtaacactgctccctcttttcacccaattcctcattttcaccagtctctggcaccactgtctcccctcatccatggctcccctctccccttagagcactttacctgtgtggggtggacgttgtggcgggggcctgcatccttccggagcctgtgctggaggcccccattctcagagggcagtccgtagctggtgcagtgttcaaagggcatatactggtactgggggtcactaccccaccagctttgttcacccccaygctgctgtgaccgggattgctccatattccctcccccckagccccrgccaggccttggcctgcttgcccctgtccttcccccagtgtagctccttaagcctctgctcttgctgtccccaaggcgtctggggcagcatgcccacctccagctatttatagmcccctctccgtcacatgaccccccactgccacatctgatctgcttggggtcgaagcaggtgtgagtgcagtgtgggggtgggggttgggatgagaacctgagggacagccccacagggaattccctctgctgagccagtggcattgtcccccttcttagtcaccagtagtaggcttccagctccatgtcactggtccctctataaatatcgcctggaccaggatgagaaactgctgagtatgctctcaaacctatgtgtagagccggatctgcatggaagccctccagttgcccatctctcttcttcaggatgcggaaggtgaggggtgggtgctggataaagatgaagcgactcgaagttctggaaacactggcacattaactcacctgggaaagtaactggtgcctctctgccacatctcctggccagcttgttcccaactctgtgtccacccagggttctgtctggccagctctgccagcccatcccatgtccagcgttcttctctagctctttgcccttctgtctgccagaggctgctaataacagcttgggggcatcccctgatcccatccttatcactcactgggtgtggaacacttatgggaagtgggaagtcgagggtcggtaatagccttgggttctagaatttctcccacttcccagactgttaggtgtcagccacactgccaacccggagggactgagcttccatttggactgtggagtgcccacactggctccatcagatagataacaagggagataacaggggagaatcgaaagtagaaagaggcacagggaagggagaggtgggaaaggggtgagggcttctcatgacaagcccgacaaacatgaaagatgatggggaagtgctctctgctattcttcccttttcaggtcaataaatacttttttggccaaggacaaacttttcttcctggcatcacgttataaaaccaattttcctatgacatgtcttccctatgaactcttcactgtaggagaaaagatatgaactgagccaaagtaaagtttaggatgcattaccaagtggggtctgtcccaggacagtccaagttcagggactgcagggtagggacaccaaacatctggtctacaatgtgattttgacctaggctaaatggaaccacccaaagcaggagggaagccaatatcattaaaagtactttttctagggcctcaacatcattaatcatcaggaaaccaaaatcataatgcaatatcgcctcatacctgttaggatggctattatcaaaaaagcaagagatagccattattatggctatggatattatggttcatgcttataatcccagcaatgtgggtgaccaaggcgggtggaatgcttaagcccagcagttcgagaccaacctggcaacatggggagaccctgtctctataaaaattataaaaatcagccatgtgtggtggtgcacgcctgtagtcccagctacttgggaggctgagacaggaggatcactgaagcccgggaggtggaggctgcagtgagctgggaaggcaccactgcaatccatcctggtctacagagtgagattatgtctcaaaaaaaaattaaataaaaagatgagataaatgttagtgagaatgcagagaaaagggaacccttgtgcactgttggtgggaatgtaaactggtatagtcattatgaaaaacagtataaaagttcctcaaaaggtaaaaacagaactgccatatgactcagcaactcccatacatccaagggaaaggaaatcagtatctcaaagaggtatctgcactcccatgttcattacagcattattcacaatagcctagaaatggaaacaacctaagtgtccactaacagatgaataatgtcatgtgtatataaatatatataatggaatactattcaaccctgacaaagaagaaaatcctgccacttgtgacaacatggatgaacttggaggacattacgctaagtcaaacattgcagacacagaaagaaaaatactgcatgattgcacttgtatgtggaatctaaaatagtcaaactcatagaagcagaaagtagagggtagttgccaggggctgggctggagtagggggtgggagaatggggaaatttggtcaaaggatacaaggttcacttatacaagatgagaaagtcctggagatctaatgtgcatggtaactataggtagtaataccacatacttgaaatttgctaagagggtagatcttgaatgttctcacctccctgcacccccaaagcaactatgtgaggtgatggatatgttaaccggcttgattgtgatgatcattcacaatgtacacatatatcaacacatcaagttgtacattgttggaggccgcacaaatgtttcttatgattaggtacaattgaagcttgtcagtaacaatatgaacctgtgatcaattcagcagctgaccaatcgttacctccttcttgttcttgttacccagtaaatatgaagggctgagaagctcggcaggggagctgcctttgctcactagaagcagggagctctcttcttcttcatgttgcctttccttaaaacagtttcttttgtcttaagttttcatttctacattcgtccctttgttcggtcataatgatggtttcaagtggtaacagtagtaactgctgtaatcacggtctcaagtagtaattaaatatgtataatttctagttgtcaattatacaccaatgtagctaaaaaaaaaaaaaaacaaaacacctgctctaacaacaatcctacaaacctcaaggcctataatctctccaaaaaattacaaatgtgtgatgaattgagagactaaacattctgtgatgatacccaccttttctgcaggcagaaaataaggatagacatctatgggattggtatgagcagaaaggattactttcttaacaaagaaaatagaatctgtgggttcctccctccttctgagcctctaccctgcctgctgtgtgggagacaggcagagatggcaggtgagatcgccaaggctcaggtcgctcggcctggtggcaacactgtcttcrggaagatcatctgcaaggaaatcccagccaaaatcatttttgaggatgaccagtgccttgctttccatgacacttcccctcaagcaccaacacgttttctgttgatatcgaaaaaacatatatcccagatttctgcagcagaagataatgacgaaagtcttcttggacacttaatgattgttggcaagaaatgtgctgctgatttgggcctgaataagggttatcaaatggtggtgaataaaggttcagatggtggacagtctgtctgtcaagttcatctccatgttcttggaggttggcagatgcaytggcctcctggttaagcacattttggtgataattttcccttctctgggcaatgattaagttaggcaagttccagtatgttaagtagcacacttattttttgcctgtgtatggagagattcaagaaataattttaaaaccgcatacataataaaagacattgttgcacacacaaaaaaatagagtgccaaggtaacactgcattccttggaggacttcagaaacaagattctcccatttgaggagtatagctttcctgaaagtgatcagttgctgtagaaacttgataaatataagcagcaagatatgagatacaattatgactttcttactatttctgagaaagacagggccctaaaacagagcagcctagtcatggactctgagatttgaaggcagagaccagtggagtagggaagtgctcacatccagccaagctgagtggaagcgtgtggtctagaaggaaagcaccaactgcgattcttaaaaccagattctgaaattaggagggtcaaagacatgtacagactgccagtgctggtgggcaagggtttgagagtaaatatcctgtgtttgaaattaggaatagtttaaatcccatgggtttaaatccctgcaagagaacaagaaaagaaaatgtaaaccatgcccactcctcactccatcatcccgctgggcttagtagcttaggttcttatttggaggcacaaagatgggcttctagggattcctgtaaggctcctgaatgtggaagcaaattcataagcatgcataaatgatatatattctttcgggttttatttattttatttatttattttttgagatggtgtctcactgtcacccaggctggagtgcaatggcgcgatctctgctcactgcaacctccgtctcccgggtttgagcgattctgtcacctcagcctcccgagtagctgggattacaggcacttacggtcatgcccggctaatttttgtatttttgtagagatgggtttctcaccatgttggccaggctggtcttgaactcctgacctcaggtaatctgcccgctttggcctcccaaagtgttgggattacaggtgtaagccactgcacccggcctcttttggggttttaaatagatcatcctagggtccattatacaaaaagtttaaaagcccataggcttatagaattgctatttgaaggaaaatcgtaaaaagttgccatgcaagatacatggaggagaagttttgtgttgggtataggtgaaagaattttctttctgggttacacccttgttttcagactctcacgtcttccagtctggcctccccagcatagtgggcagtaaaacccttatgttctttaaaggtgttttcagtcatcactttccctctgcatatccaggcagccatggaacccgtggccacctactttctgaaatttcagctaagctacaacttcctctgaagacactttgtattgtatgccactggcggtcatgtctcctctcctctttattgtggcttgcctccttattcttttttattttttttttttgagacggagtctcgctctgtcgcccaggctggagtgcagtggcgcgatctcggctcactgcaagctccgcctcccgggttcacgccattctcctgcctcagcctccggagtagctgggactacaggcgcccgccaccacgcccagctaattttttgtatgttttagtagagatggggtttcaccgtgttagtcaggatggtctagatctcctgacctcatgatccgcccgcctcggactcccaaagtgctgggattacaggcgtgagccaccacgcccagccagcctccttattctttaagcatccttagtcctttcccatcccctgcacgtcaggctttccctgtagtattcgacaggtctccttctcccccttctggcttttcaaacatgatacattttcccccaaactcctacctaattaggacttaagatggaataaggtttgggtctcagtttcattcccacagcccaatgggaggaatcttacagcccaaaaaaaggaagaaaaaaatccttcatgccagaataagtcacagaagcaaggctgttagcatacgctcaaactgacagctttggtttcacatcctgacctcagtttcctcagaaaggaagtaactagagggttaagaagataaaataacacatgcaaaaaaacatgctataggctgggtgcggtggctcacacctgtaatctcagcactttgggaggccaaggtgggtggataacgaggtcaagagattgagaccatcctggccaacatggtgaaatcccgtctgtgcttaaaatacaaaaattagctgggcgtggtggcgtgcgcctgtaatcccagctactcgggaggctgaggtaggagaatcacttgaacccgggagacggagattgcagtgagccgagatcacaccactgcactccagcctcacgacagagtgagaccccatctcaaaacaaaacaaaaatgtgctatagtgtttgattcatagtaagaactgttcactcatattaaactgaagctcattctgtgagttaacatttatcaagcattttttatgcattaacaccatgtgatttacatgcatcatcacatttaatcctcatagggacattggaaggtagacacaattttcctcatttttaaataagggaaattggggctgtgttagctaccttgatcaaggtctccaatatcttcaaaggcagagccggcattcaaaatcagatctactgaattctagagtccataccgttaaagctacatttgtggccaggcgcggtggctcactcacgcctataatcccagcactttgggaggctgaggtgggtgaatcacctgagctcaggagttcaagaccagcctgggcaacatggtgaaatcccatctctactaaaaatacaaaaattagctgggtgtggtggcgtgtgcctgtaatcacagctactcgggaggctgagacaggagaatcgcttgaacctgggaggcagacgttgcagtgagctgagatcacgccattgtactccagcctgggcaacaacagcaaaattgtttcaaaaacaaaagggaaaatgactccttcacagaagcatggggaagatgaaatggaaagctcctctcaatgcctacaacataccaaggactcaaacagttgtagctattattaatgtcttcctccttctcagattagacgtctttcctcttgtgttgtgtgtgtgtttttttttttttttttttaaagatgggggtctcactatgttgcctaggctggttttcaactcctgggctcaagcaatcctctctccttagcctcttgagtagctggtactatacgtatgtgttactgtgcctggcctcattctttattttttagagacggggttttgccattttgcccaggctggtcccaaactcttgagcccaggtgatccacctgcctcagcttcccaaagtgctgggattacaggcatgagccactgcgcccggccagtctggcaccattcttaatatcacagctttggttgggtgtggtggctcatgtctgtgatcccagtactctgggaggccgaggtaggaggatcacttgaacccagatgtttgaaaccagtgtgaacaacatagtgagacctcatctctattttatagaataaaattttaaaaattaaaaaaaaatcagctttggtctgatattacagtttttccttcttcctgttttccttttccctattagaggaaacaggatggaggagggcagcagagggcagcccccagctctgggaggggaataattttagaagagaatcctctggcagaggtaagcagaagggagcagagctgtgaaattcaacctcatacccttattcaagggcaagggggttggggggcggggaggacatggaatccagttcagagatactgctctgtaattctcaaacatatcacaccactgaaaatgcttcctatcctgaaaatgggtatttatcttacttccactatttccataatttcttcgcctgtcctagattttgtatccttcccttgaggctatcccatggttgtttttcttgcagtacaaccaaccagtttcagtccatttttcatgcccttttgtctccagtgttctgtaccaaattctgctctatctgccgaggtgcttcagctcacctcaatccccttctgctcttcctagactgccatacccttctctgtatgactcaacaatatttccagctcccacagctgtttcctaccaaacaaaaaagttttgtttctggtttgttataggtggctcatacctataatcctagcactttgggaggccgaagcgggctgatcacttgaggccaggagttagagaccagcctggccaacatggtgaaatcccgtatttaaaaaaaaaagttttgtttcctaccaaaacttctgtacaaagttcctacagaacattccatctcttgccaaattccatggcccatctgcacctgcacttacctctcaggcatatcctttagatacaatgcacccccaaaatatcccaacttacacaaattcattgctttgatctcttctatgctgcactagaattctcttacaatctatgcccactctagaagaccttaaatgcaaccaggtaagaaatggaattttactatcttcactctcccatccttctattccagcccaatctgttatggcagcctacatctcatagtctaaataatcaagaaccagcactgtttgctaataacttccatttcatctgtgagaaatcccaggactacgcaaactgagatgggcccacacctgcatatatttacaggatcacagcagcaaaataagaagggttttcaggtctgggtatgccttgtgaggtggtaaggaatgctgcagtgtaaggggctaaggaaacgaaatctgtgggcttcagaggactgagtatctacagaaacagatattgagcacacatcagtaataaatatgagcatttatttggcacccgatggcaatacaaaatcctggcagtgggagtggaaaggttctctctctcaaatacttccatactatgtcgacccaaaggcaggacttggcagcaaggctcacaaaccacccaaacaaatatttattgagcaccttgactactacaggcctagcattttgctagggaccatgggagatgtgaaggaagttatctcacacatgatatgtcttcaaggagctaaaaatgccagtggataaaagcaaaacacatggaaaaacaaagtacaaataataatccgtgtatattgtcaaaaggaacattttatcaaaaggtaggattgtagctaaggttggcttgccttcttccctcttttattcaacaaacatttaatgaaggcccactatgtgccaagcacttggtacatgatggtgaataaaacaaacaaggtttctgccctcatttacagcctggtaggggagacagaaatgaacaagtaaaagtagcatatatataaactgcaataaatgcaatgaggggaaaagacaagatgtggtgacagacacagaagtagactgctcagggactgaagggcccgggaattgtcaagacttgaggaagaaggacaccacctgagtcaagagtggtgggggtggagagctgagaaggcccaggaaaagggcaggaaagagcacaaaattagaagctgagaggagaccactcgggctggagcttagcaagaaatcaccatttaatgaggttcaaggggaaggcaagaaccagttctcataaaccaaggtgaagagtttacattttaaatgaggggtaatagaaagcagaagggttctaagcaggggggtgatcagatttatatttaaacaaccaaatcctggccaggtgtggtggctcatgcctgtaagcccagctatttgagaggctgaggcgggaagatggcttgaggccaggagttcgagaccagtctgagaaacatagtgagaactcaccttaaaaaacaaaaaacagcaaacaaccaaaaaaaattaaaaaccaaaactactctgttatgtgagaacagactggaggaagaaagaatggaagtttttttttttttttttttaaaaaaaggtcttgcccgggcgcagtggctcacgcctgtaa

SEQ ID NO: 93316 - DNA, 56280 bp, Homo sapiens
atgagacagcaccacacacccatcacgatggggcagacgggacagcaatgtgagcacgctgatgctcgacatcgcacactgcagccatgacgagacagcaccacacacccatcatgatggggcagactggacagcaatgtgagcacgctgagatgctcgacattgcacactgcagccacgatgagacagcaccacacacccatcaggatggggcagacgggacagcaatgtgagcacgctgagatgctcgacattgcacactgcagccacgacgagacagcaccacacacccatcaggatggggcagacgggacagcagtgtgagcacgctgatgcttgacatcgcacactgcagccacgatgagacagcaccacacacccatcaggatggggcagacgggacagcagtgtgagcacgctgatgctcgacatcgcacactgcagccacgatgagacagcaccacacacccatcatgatggggcagactggacagcagtgtgagcacactgatgctcgacatcgcacactgcagccacgatgagacagcaccacacacccatcacgatggggcagacgggacagcagtgtgagcacgctgatgctcgacatcgaatactgcagccacgatgagacagcaccacacacccatcacgatggggcagacgggacagcagtgtgagcacgctgatgctcgacatcgcacactgcagccacgacgagacagcaccacacacccatcaggatggggcagacgggacagcagtgtgagcacactgatgctcgacattgcacactgcagccacgaagagacagcaccacacacccatcacgatggggcagacgggacagcagtgtgagcacactgatgctcgacatcgaatactgcagccacgacgagacagcaccacacacccatcaggatggggcagacgggacagcagtgtgagcacactgatgctcgacatcgcacactgcagccacgacgagacagcaccacacacccatcacgatggggcagacgggacagcagtgtgagcacgctgatgctcgacatcgcacactgcagccatgacgagacagcaccacacacccatcatgatggggcagactggacagcagtgtgagcacactgatgcttgacatcgcacactgcagccacgacgagacagcaccacacacccatcaggatggggcagacgggacagcagtgtgagcacgctgatgctcgacatcgcacactgcagccacgacgagacagcaccacacacccatcaggatggggcagacgggacagcagtgtgagcacgctgatgctcgacattgcacgctgcagccacgatgagacagcaccacacacccatcaggatggggcagacgggacagcagtgaaacaccaaatactgaccaggtggagaaaccgatcagctctgcattgctggtgagaacctaaaacggtgcagcaactcgggaaacatttcagcccttcttaaaaaactaaacgtgcaacctccataaaacccagtaatttcacttctggccctttatccgagagaaatgaaaacttacatcgacacaaaaacctacacaagaatgtttataagagctttattcataacagctgaaaactggaaaggacccagatgtctttcagtggttaaacacactgtggtacgtccatgtcataaaacacgactcagcaatgaaactatctatgaactactgatacagcaacaatctgcatggacctcagggggttatgctgaatgaaaaaagtcaacccgaaaggttatatactgtttgattccatttacataacattcttgaaatgacaaagttctggagatgaagaacagatcagtagctgccgggggctatggagggaggggcggtacacagggcagcacgtgaggccccagggattggggtatcttgaccgcatcctggcagatgtcttggctgtgacactgcactatcgttttgcagatgcttccactggggaaagctgggtagagggtacacgggctctctgcattactgatgacaactgcatgtgatttacatgaccccaaaataaaatatttaattaaaagaaactgagttgggcccagtgaactcaaccagtccctttcagctctaaaactatgttttctgggtcaggggaggaaacaggaggtacaggaacactagaggggagaaagcacggagagatgggaaaagcacggagagagagatgggraaagggcaatcaagaagactgagagaaaaggggggaagcagaatgacagaggaggtgtgaagagagagaagccctctggagcgctgaaatactgaatattctcccctgggagctactcagggtaagaatttctccagggactgctctttcaggcaagcacaattacacacatttctatgttatgttaagtaaaaatctagtaaatgggctgggcacggtggctcacacctgtaaccccagcactttgggaggccgaggcgggcagatcatgaggtcaggagatcgagaccatcctggccaatgtggtgaaaccccgtctctactaaaaatacaaaaattagctggacgtggtgaggggcgcctgtaatcccagctactcgggaggctgaggcaggagaatcactagaaccagggagtcagaggttgcagcaagccgagatcgcgccactgcactccagcctggcgacagggcaagactccgtctcgaaaaaaaaaaaaaattctagtaaatgaagcgagtgatcaggacaaaactagcctctcatcaataaatcaaccaatagcgcttatcaagtattcatatgtctgcctcttcttctagactacactaggggctggttaacgctcctatgtgcaacagaacctcaaacacatcgtaacacacctttggagaatccttacaagaacaccaacttaacagttctctctgaccacactacctcagcaaaaaaccaggaagaaaaaaatattcttcaacccttttcagggacagaaagcatcatttcaaaagtccaagaagggaaggtaagaatttcaaaagtgaaagttatcatgaaaggctataaaagctggagatgagtctgaaaaacaaatggaaaatgagtcacttcagggcctctcccagcctcaaagccaattaattattacattagtcagagtaattttaagccttccaatccactcaccctagccacaggcaacagtagcctctccaagtgttaagggttttttttcccaagcctgcaggcggatgagctttttacatggcagccccttaggattggatgtggacctgccctgtctttcaccaagaagcaagcactgcgcagatcactgaatcataaaaaccacctgctcttaccagcctcctcttcctctacagcaaaacttctgacctgagacatggaagcagataaaaagccactacacaaaatgtatcgctacaactagagggcagttttgcctttcttccattcaattattcagtttctcatgttcctaagtgccagcccagaaccatggaatgtgaagaaacacaaaactcactcctctgcatcagtgaattgattgtgtggtggggatgtaagtctgcatatgaccggcaggtccccaaagtggtgccaagtcaatctaaactagagagaatttttctggccaggccaagcagagatttcatggatgaagtctcccaaagactgatttcctaaacattaaacatcactggttttccaaaactggttttcttttttttttttttttaaccctgttgctcgggctggagggcaagtggtgccatctccactcactgcagcctcgacctcccaggctccactgatcttcccacctcagcctcctgagtagctgggactacaggtgtgcaccgtcacgacttgctaatttttgtatttttttgtagagacggggttttgctgtgttgctcaggctggtcactcgatctgcccacctgggcctcgcagagtgctggggttacaggtatgagccaccacgcccagcccactggtttcctttacacccgttttgttccccagcagtccttatgagggcacctgaaataaggaacctcctccccgacttgagagcagcaaagccttcagagggaactaagttattaaaacccaccccacacaaaatgcttctaaacgccttggctgacttaatccttgcagtgtgctgaggttaagtatgattatccatctcctgtgaacaggaagactgaggctcagagcttaagtgatttgcccacggttcactgcaggggataaaactcggctgtccctggcaggtcccaaagtcacggccttcaggctcccacaccatgctgcctccctcaccggggctccacactctcagcctggaaaacacgaattttaagaaaaccatgacttacgaaaagcagccaatcccagcattggaaccaacagggcataattccacctgcttccatcaccaccatccgccctggaattaggccggatattccaatttgggggatcatttaggttattcatggagatataccttgaagtaaagaataaaaacgttaactacttttattcaagaaatttttcttcagttttaactatgtgcttgctgcacagcactgaggccctacgggattcaaagaagaaaaaaactagaccagagccgggcatggtggcgggcacctgtagtcccagctactcgggaggctgaggcaggagaatcgcttgaacctgggaggtggaggttgcagtgagtcgaggtcgcgccactgcactccagcctggtgacagaacgagactccgtcccccccaaaaaaaaagaaaaagaaaaaggaaaaaaaaaacaagaacttaagatgaaagcgactcacaatctggttggggaaagtggagaaaacagacatgtcttaagcatctgaagtgcaggtagaatcaggtaagttctctggtacaaatatgtttaaatgtatggctgctgcgatggttaattttgtttgtcaacttgacggcatcatgaggtgctcagatacatggttaagcattatttctgggcgtgtctgtaagggtgtttttggatgagattagcaattgaacctttaaaccaattcctcacgtctcccttctatttgttgtgtctctggagaaccctcatacagttgtatcaaagatacagaatcaactcgataaaagtgggctcacaccggacactttcatatgagctagggtttgaagagtgagcagcattttgacaggcagagaaagaaggaaagggtcttctgatcagaaggaagactgtgaggaaggcagggaggggtgatgtggggaaggtgcaaacagtgctagaagcttctgaggcctcctcgtggtggtgatgaatgcagagattacagagttctctgcttcgggctcagcatgcaccctccatagctaggctgggggctaacgttagtaagaatttactgatttactgagtacctacacgaagtttcacattttcacaaagtagagtcactttaagtttgtttacatgtgacctccacaaacacacacgattacaaaatagtttagttaatcaagggatgtataataaacaagaggtcggaggccccgggccgctcccgcccacctccgcggacgagcgcccccctccgaccccattccctgcggtctgggcgttcaggcccttcggtctgggcgatcccggagaaccacccacggggctttaaaaatgttggtgcccaccacctccccggaacagggcccgctctacctcggtcggggagcgcgggacctcagcgttcccttaacgccaccgtccgcgggtccgctttgcgcaggcgcggcgcccccactcagtacccgctccgggcgtggcatggtgcgcaggcgcgatgtcccccactgcagccccgctcgactccggcgtggtgcgcaggcgcggtatcccccctcccccgccagctcgaccccggtgtggtgcgcaggcgcagtctgcgcagggactggcgggactgcgcggcggcracagcagacrtgtcgggggtccggggcctgtcgcggctgctgagcgctcggcgcctggcgctggccaaggcggtgagtccgtgccgcggaccggggcggggcaggcgggggccgaggcggcggtaggagcgggacgrtccccagcgggtccgagcggagcgggcgccgggtccctgcgccctctgtcccgggatcgggaaggggctgagagagccctgggccggtgcgaggggaagccgcggggcggactcggggacccggggagctcggtccttagtagatagtccgcgtccgggtgaaggtcacaaccccgcgggcttgctgggcgtcccctccgccgccttggtcygggcctggggtcctgggaccccgcgggctgaggtagcccctcgcctcagtgcctggcaggtggactcggggaggagtcgtgtctgcccaaggtcacccgggcggatagcggccggtggccgccctggctgggctgggcctctgccgccctctgtgcgggttgtcctgaggagcagcccgcagcccgtgggtggggccggcggggcgggtgagaccgcccgggtgggtgcgaggagtggccgggctcggcccggtgggcgtccggtgggaagcgtggcgcgcccgagcttaggcttgcagttcgcctttccagaaagcgcaaatctgtccatgtccacttcgagaccttgtaagttaagggcttctactttgggtcgygtttggtggtccttatgccaccaaaaatgtgccagtgtttaaaagcagctgtgccagtttttaaaactcaggcggagagctcagcgcactgaccgggcgaggacgccgggacctgtgcttgcctgtgcgctgagtgcctctagggccgggctcggcttagtccaggatggtggtcagggttatacttccctgagcccttgctctctgagtgtctgartgtgccctctacgattgcatcttaagaatcggccttctagggtttyatttaatcaagctaaattggataggtttagttgtttggttcttttaaatgaacttacccacccacctccttaattacaaagtaattttaaattgcagaataaaaatctcaataggaaccaaggcattcagcaataktgatttgaattatgcctgtaattgtgcaattytctcctttttgaaatacttattaaaaatctcgttgagttaaatgtgaggattagtcatacagccatcctgccaacatcagaaagcgtgtaaaccgttctagtgtgttgctgtggttggtactgactgagcagagacccctgccgcatcttgggcttttaagagctgctaggagggcgtccacaagcaggaaggaaagcccatggtcagtggggctttttaggggaartggtagcttgtgattggagaaaagctagagctagtgcctttgtcctcaacccagatggtgcccggtgttccttctgcagactaagaccctgccagcggcggaggcacctcagacgggatggcaagatagcaaaattgaaccaaaatttagtcttgggttttgtaaaagtctttttatcttgatgaagttagcttttcctacagaaattctgcctgcaagcagcatatttatcggcatttcagataggctttttttcctgaagaattggagtttacgaaggaacagcataatcaaaaaattagcagaaaaaagaaagaaattcgtgatagccaactgagaaatgtgtttggaaaatagatgctgaggataatttcagtaaagtccagagagaattttttaacctcattttggccagttctgtggtgttttgatcattctgtatttacaactgctttcaagtgacgaacttatcagacttattttgcttttggtttctttttatggcccagtgcactgacacagcttgcaaactgttcgaaagcagtttaatcagaggaaaaagaaaaccaagaaacttcaatagttactggttaactgcttacttcaggtgaagtttttcaaatcccttaacatgaacatccaatatattgttctaggacaaattgatttcttttctttgaatggattgttctgaatatgtttaatggtgttctagaaatacattatttaggccattatagtagtaaacctttgctttgcttcttgggataattgtaacaacaatggcattccattctgcattcctcatgatgtttttcctgatttatttgaaaaattgtgacttgttttttgatatgaaacctggatattaatattagttgggagtctcagagatttttcccaagggtctttagataggggggcaagtccaggatccagagccaggccggccgacttgaatcctctctgagctccgtctttccgtggggttagtgaggattctgtgggtaatgtttgaaacctttggtgatgctcttgagaaccagggctcacagcctatgcacagtaaccatgtgtgaactgaatttttttttttttttgagacagagtctcactctgtcacccaggctggagtgcagtggcgcaatctcggctcactgcaagctctgcctcccgagttcacgccattctcctgcctcagcctcctgagtagctgggactacaggcacctgccatcatgcccggctaatttttttgtgtttttagtagagacggggtttcaccatgttagccagaatggtctccatctcctgacctcgtgatccgcccgcctcggtctcccaaagggctgggattacaggtgtgagccaccacgcccggccgaactgtattttaagtatccctgtttttaaaataataaacactaaaattctagtgagaataattacacgcagttgtaaaagaatcaatgagtataccctccctcacccagttcattttccatgaaagcaattcctgtttctgatactgactcctggcatttgtaatacctctgtttctttagcggatatgcaggtgcatttttatcagttttagacttcttgcctagagaggggatttagttcacttaaactaccctgcttccgcttcttcctgatacagtcgtgcgtttttaggttcttcgttggctgcttttgtgattgtgtaggttgtacatgcagattagtttcttgctcgtgatttataggtgcgttgtattagatgaggaccccttactttgctagatttcggatatgaatgtctctgcacttcttacttttcccctccacctcctaattcagtcatctgaaattctgtattgttaagcaaggtctaagtattccttttagttatatgttccccatkttttttcttgaggaaatgtttgatagtttctcctaaaaaaattaacaattggcacaaaagactagttttgtgtcaaaactagttttgagttttatctaaagactgaaattgrcttaaagttgggctttccaaattcaaawatctgccccagattagatttagattgagagggttagtgtccttttcgccagggggatggcgtgataatttgttcaagattgtgttatagtagctgccccttttaagccagctctgtgtgtgtgtggtggggrgtgggcagtgggtcttccacatcaacatcctagaaagaacgaataaacattgagtgatctcactgtttctacttacatttggtataatatactgttcttactggtgctattactatgttaatrgggcactttacaacattttcaagaacatttgtattaaaattatttcaaagacttctttcttaaaatatgattttaccatgcaaaaattttactaaggtagaagaatatttgttctttctcattcattttctgaaaaaagaaaaaagctgaattagcttataccaataaaaacagagactagaaattggagaaatgaagaataattttttatcccacataataagtaatttctgaattgcaagtatttctaaatacttgaagacattcctcacatcccctcttctgattgcatttatttcctaaagcttttttttcttttcttttttttttttttggagacgttgtctctctctgttgccgaggccggagtgcagtggcacagtctaggctcactgcagcctctgccttctgggttcaagcgattctcctgcctcagcctcccaagtagctgggattacaggtgcccgccacgacgcccagctaattgttagtagagatggggttttgccatgttggccagactggtcttgaactcctgacttcaggtgatccacccaccttggcctccccaaatgctgggattacaggcatgagccaccgtgcccagcccctaaaactattcttgatgatatttctgagactattcagtggtcttctcaaatgtagccagcagaatggaaaacgtatcccctaaatggctggccaaccttagcatatggacagtgtcacctctctcacacagagccactaaaaactaaacaccaaaaccagttttcttgggtaaagttttctaagatggaaaatttaagcagcaagatgtgtcaagttgtagatgttggccaggaaaaagccagcagcagccaggcaggggagagtgtgcatccgacatcctcctgtgtgatgaagggatgacacctcgtccctctaggctgtcagcttttactgttccaggatacagatctcctgattcaatgttgagtgccttttgaactgaccacaagccctcctggacgattggaactgtaatgtggaaagggctatgatggagccagytaaaatgcttcattacttgcaaaataccacatacagtaatacaatatacacgtctttccccttctccactaagtagcatacattaagacttcacagaggaagtgtgcctttttcatttcgtatctgagtcagtgagtatcctgtttggaaacaagcttcatcctggttttctagagtgccaagtcagggtggaaacgaggacctgggggctcagtcyttccttgccccttgggctgccttcagggttaagtagagggtcccagctgagctctctggatgcacaggagcacctgggtacataagaaggtgaacagtttgcaaggggaaattactatcccccacagcatttgttccttcaggacactaaccctctggatctgtgtcttctgtgtctccagtggccaacagtgttgcaaacaggaacccgaggttttcacttcactgttgatgggaacaagagggcatctgctaaagtttcagattccgtaagttcatgctttttgttccattataaatgatttttttggcttagggggtaaggatctataccagtttgttttcatatgagtcatagacataagggaaaaatttctcataggtatccaatgcatgctgaaattattttcagtgtaataatacttaattgcaagtacaaatataaacatagatgtttacatttttacttgtatctsttatgtatctataaactagatttaaatttagatcaagtaaagcaataaattaaaataaaatgaacagtgtctgctgtgatagatgataaaattcctactgaaaataggacggtggggccagtgaacagtatctgctgtgatagatgataaaatcctactgaaaataggatggtggggcccctcgggtgtgggttgctttgtatttagtgagcctatctctgttgaaaaactgaaacttgctgagaagttgttttcttataagcccacaatagcgactgaatactccttggcaccttctcaggcataagcataggcacggccctgaagtagagttgtggtcctcagtctgaccccatgggatagaccctctaccattcgtagaatctgattgtcagtcccttctccaggtgcgaatgtgcccacctctccccgaactgttcagggctcagccccaggacaggatggaggccctgtgtgcccagcagttgctccttttatctttgtcaagctctttcactgtcacaagattcttcatgtttggcatagtggaacatgtgattgacaggtgaatttttcttttccagatttctgctcagtatccagtagtggatcatgaatttgatgcagtggtggtaggcgctggaggggcaggcttgcgagctgcatttggcctttctgaggcagggtttaatacagcatgtgttaccaagctgtttcctaccaggtcacacactgttgcagcacaggtaagagaaaggtgccccactgtgctcccactccgtgcaggtcccgcgcagcctcgcactttctacctgggcagccccctgcctcctccccctgctccagccacatggcctcttgctgtgccttactcagctcaccctctcaggggtctctccctggagcctcttccctggggactttgaagggcgggagacttgttgtcactcctaattcagactccagtcacacttgggttttctctgaccatcttgcctactaccttccccacctacccccgccaccccaacaccttaagaaaaggagatcacctaaagaggaggaatcagaatttaggttggggaagaaaagggcaagggtttcatttgtccctgtgcttctgtcttctgggactctctgaggggtaagacagtggtgggcacacacagccaaaggaagctggggtacaggggagtgcgactctgagtgtggagtttattacttggcaggaagcacttctagtctttaacacatgcccgtaaatgccattgggaagatttgttaataaaattatctggaaagatttgttgagtaccttttctgtgccagataggttaggttataagcatattacaggtagcctttcactcactgctmcagtcagcccttcctggagttccctgtgtctccaccacgcagatgaggagactgaggctaaggatggaatcactgggcgagtcggggaggggttgtgatctggaatctgtcgggtctcgctgctcctctgctgaggtcagccctcactgggagtcactgtgtgagtagttggctttctctgaatccccccagcgggtggatttgggcctggaagacaaagttggcgctcctgtttgtggcttgtaaggagtggttggtgtttccagggaggaatcaatgctgctctggggaacatggaggaggacaactggaggtggcatttctacgacaccgtgaagggctccgactggctgggggaccaggatgccatccactacatgacggagcaggcccccgccgccgtggtcgaggtgatgggcgggaggctctgggtgttctcgtggtctgtttctagtacaaaagaatcctggaaaaaaatgtaagcaattgaggcggatgtgscagccaaaagaatggtgatgagcaaagttcacaagaagagtctttttccgttatgaactatgcattatatgtaacaagaaaacttctctttgatgaagtgttgacattttcataaaataggttactttgggtttgcagatttgtgttaaacttgtttagtgtagattagctgygaatatcttgactcctttaaggtgttaaggtttttgtttgtttttatctttcacagctagaaaattatggcatgccgtttagcagaactgaagatgggaagatttatcagcgtgcatttggtggacagagcctcaagtttggaaagggygggcaggcccatcggtgctgctgtgtggctgatcggactggccactcgctattgcacaccttatatggamgggtaaggccgcccccgtccacctgagacaggacacgtagtgctggggcttatggtgacagyggggaatgggttagcgtgcccagtgagtcagccagagattaygtaaaaagcaacagasaacagcagcgtggggcgcatgcagcgactgtggatgtgacaggaccagacgtgtgccttgaggagctgtccctaaggcagtgtgtgacttcttgcatctatgtcagaaagttgaatcgataatcttacataccaggttttaacttgggatatgtgacactcaacatacaagaacagagcaagcaggccaggcacagtggctcaggtctgtaatcccagcactttaggaggccaaggcaggaggatcacttgagaccagaagtttgagaccagcctggacaacatagcaagaccctgtctctacaaaaagtttaaaaattagctgggcatggtggtacatgcttgtaatcccagttactcaggaggctgaggctcctggatcacttgagaccaggaggttgaggctacagtgagccatgttcgtaccactgcactccagcctgggcaacaggagaccctgtctcaaaaaaagaraaagaacaggctgggtgcggtggctcacgcctgtaatcccagcactttgtgaggcctaggcgggcagatcacaaggtcaggagtttgaggccatcttgcctaacactgtgaaaccccgtctctactaaaaatacaaaaaaattagccaggcatggtggcaggcacctgtagtcccagctgcttgggaggctgaggcaggagaatggcgtgaacccaggaggcggaacttgcagtgagccgagatcgcacccctgcactccagcctgggcaacagaatgagactccatctcaaaaaaaaaaaaaaaaaaaagaacaagtattttaagtctcttttaccacctctgagttcctgaatggattggttttgtttgttttgttttgttttgtttttgagacggagtctcactctgtcacccaggctggagtgcagtagcacaatctcagctcactgctacttccacctcctggattcaagtgattctcctgcctcagcctcccgagtagctgggactacaggcgcacgccaccatgcctggctaattttttgtattttagtagagacagggtttcccatgttgcccaggctggtcccgaactcctgagctcaggcagtccacctgccttggcctccgaaagtgctgggattgcaggcgtgagccaccgcacccggccatggattgttttaatattaactgttaacactgaagaaagacttgaggtgacaatagttactgggtaatcagagtcaactttggcatggccaaataatattctgaacggtattgattcagagtaatcaatattctgaactttgttgttttctgatgcatggggacggatcgttaatttgcaggttgttagaacaccagtgacttctctgtggctgagtgcatcgacaagtgtgtggtgggaggagaccgcggctccatctggagcaggagctgtcatgtggggagctggcccaggcttacaagagcgacttgtgctggctgagggaacggcaggtccaggcgggcagcgctgtccggcgcctacctttctgcggtgccggaatctgctcgtctgcaaccgtccgctttggtagctgccagccacatggggctgttgctaatgtggcaggtgtagctgaagagctgaatgttttgacttattttaattaattaagtggttatgtgttgccagtagctcccatctgggctgtgactgcatggtctgcggacctcactctggcaccagactccgagtggagctgcatgcggccaccggacagtgtggagtgcctcttcgggttgtgtagaagtaggaaatgtgtcaccaaaataggagctgttgctgctgcgttctctagcacacctgccttgtctgtactgctcggcrtggaatgcctctcgggctctgacagtgtcactgacactgttgctgatctccttggatttacctggtccatttggatcaagttctttcacctrttcacatgagcagataccaccttaaaaccttaaagtttggcttaacacttcttgccctttttttttcctttcttttagtctctgcgatatgataccagctattttgtggagtattttgccttggatctcctgatggagaayggggagtgccgtggtgtcatcgcactgtgcatasaggacgggtccatccatcgcataagagcaaagaacactgttgttgccacagggtaggaatctcatttctactttattttgtttataaaaatgaataaatttcatttagagtttctttattttaatgaaaatagaggcattgtagaataacggtttagacacaggccttgatataaccatgtgagggtgatggcctttcccagccgtggttcctcacctgtaaagggtgaggacagyagcacctgcctcagggtgagaaagcatggtcctcagtagatggtagtggttgccctcaggttcacagcttacctctcccaatttagatgagggaactgtggcccaaagagtcaacatggggttttctggcaaaatctctcttgttttagtgggtactgtattgatactgattcctcgggtgggtaagtccttcttctccacatgatgaaaataagtaactttaattttatacactgtcagttactttaaccattttaaaagttaaaaagtgtcagtacagccaaacaaaaaatcagcaaaactacaggttgggaagaaatattttccaaaccatatgtgtaataatatcttactatctaaaatagcaaaaaaamaaccctactaaaaacaacctactaaaccctactaaaaaacaaccctactaaaaatgggcaaaggacttgaatagatatttttctagagaagacatacaaatggccaattgatgtatgaaaaaatgctcaacgtcactaagcaccagagaaatgcaaattaaaaccccaatgagatatcatctcatctcgctccagttagaatgactgttaccaagaggacaaaagagcaagtgttggtgaggatgtggagaaaagggaaccctgtgtgctgttggtgggaatgtaaattagtacaactattacggaaaactctggaggttcctcaaaattcataggactactatgtgctccagcaaccccatttctgggtgtatatccaaagggcatgaaatcagaagctcaaagagacacctggaccctatgttcattgcagcattattcacaatacccgagatatggaaacaacctaaatatgtgttggtgtttaatgacaatgtggtgtgtatacacaactgaatattattcggctatgaaaatgaaggaaatcctgtcatgtgtgacaacgtggatgaacccaaagtcattatgttaagtgaaacgagccaggcacagaaagacagatactgcatgtcactcatgtggaatctaaaacagtcacaactcacagaaacagagtaggacagtggttgccaggggctgggggaatgcagactgtggcgatgctgattaaaggtgtaacttcccgtyacaaggtgaagttctgaaggtctratawacarcatggtggctatagttaacattatacagcatggtggccagagttaacattatacagcatggtggctatagttaacattatacagcatgrtggttagagttaacattatacagcatggtggctagagttaacattatacagcatggtggctagagttaacattatacagcatgctggctatcgttaacattatacagcatggtggccagagttaacattatacagcatggtggccagagttaacattatacagcacggtggctagagttaatatacagcatggtggctatcgttaatattatacagcatggtggctagagttaacattatacagcatggtggctagagttaatattatacagcatggtggctatcgttaatattataacttgaaatttgcgaagatagtagacgttaggcgtctgtatctccaaaaaaaggataattgtatgaggtgatagatgtgtattaacttgattgtgtcatcatttcacaaaataaatcatcacgctgtacaccataaatatatagttttttttttaaattcatcaatcatacctcagtaaatctgggggagaaaaaaatccataaaaattttaaaattttcattataaaagtagtatatgcttattggggaaaccttttgaacagcacaaagctaaaatacaaatagggccaggtgtgcagtggctcacgcctgtaatcccggcactttgggaggccaaagtgggaggatcacttgaggtcaggagttcgagaccagcctggccaacatggtgaaaccccatctctactaaaaatacaaaaattaactgggcgtggtggtgcacactgtaatcccagctactcgggaggctgaggcggaagaatcacttgaacctgggagccggaggttgctgtgagccgagatcgcaccactctactccagcctggtcaacagagttagatcctatctcaaaataaataaataaaatacaaatggaagtcctttctttgatcccaggcttctatcctacctgtgcagggtagcagcaccagtggcgcggcccctagtgatatgtgtggggtgtgcgtgagtagggggttgtgtgtgcacagcactgagaagacggtgctgggggctgccgtgtccattctgtgatctcaccagataggaggtccagatgtgggccgctgtgtgcagtcactgctctctrttgtttccagaggctacgggcgcacctacttcagctgcacgtctgcccacaccagcacyggcgacggcacggccatgatcaccagggcaggccttccttgccaggacctagagtttgttcagttccacccyacaggtagggcaggacgccttgcccggcaggygtttggcttgtgtgtgtcttgtaagcatgtgatgcctactcattgctcttccatagttttatgtaataacatggttttgaagatcagcttcctcagctctcaggtcctaacttcaaygtcatttacytaaggagacttttccsacactccccttcccytaaggcagtttgggccaccgtcttatgtatttctcaagagcgctaaaccctgccttggtgatacttaagccagcagtaaagcagggattgaggccgagcacagtggctcactcctgtagtcccagcactttaggaggccaaggcgggcggatcacctgaggtcaggagttcgagaccagcctgaccaacatggtgacacctcgtctctactaaaaatacaaaaatcagctgggcgtgatggcgtgtacctgtaatcccaggtacttgggaggctgaggtgggaggaatgcttgaacctgggaggcagaggttgcagtgagccgagatcgcgccactgcactccagcctgggcaacagagtaagactccgtctcaaaaaaaaaaaaaaaaaaagtaaagcagggattgttcagtgtccctcttcgcaacgaggtcgtcagctcytcgggcaggcaggtcttctcgttagctgtggtgctccatgcccagcacatggtagggtctccaccggggtttactgagtgaacattctgagagctgggagaatgccrtggaaccgagaagcagcacaggcagacttcagctttgtaggagaacacggagcttctgtgacaatgggatgtaaagttaggacgcagccgtgacagaaccccatgtgacattgggcgctgggctcagcccacgtgaccactgagagagcttgtcgtggggaagatgagctcgtcttggggacgtctgacggttgaggttacgaatgtgcaattcggagacattaactcagaaatgacagttgaagtcttgagtttggaggaggttcttcagaatgagtcagagacagacacacacctgcctcttgtttgaggtgacttgtcctatacttttctgggttgcttttctgacctgtggacgatggagacctctgaagtggtgccaaagaaccagacctgtgtcttytctttctctgtcagtgtcagctttctgatccctggaagggatgaaaataagaaatgaatttgttgtagtgttttttttttatttgtttcgagatggggtcttgctctgttgctcaggctggagtgcagtggagcaatcttgactcactgcagcctttgtctcccaggctcaaacgatccttccacctcagcctcccaaacagctgggactacaggcatgtgttaccatgcccagctaattttcgagggttttttcgtttttggtagagacgggatgtcaccgttttgcccaggctggtctcaaactccagggcttaggccatcctcctgcctcggcccctcagggtcctgggattatagccatgagccactgcacccggcctgttgtattttttattactgtttttaatgaataaaatgtcactgagcccctgaattccctctgtaatttgcttagagctccactgctcatgctttgtcttcagtatgtgagaagtaaccacagaaaaaagagcattgaaacttagaaaatcaaaagacagacaagaatcacattcgttttttaaaagcaagattgccctttttgtatactaataaaaattgtagctttcgaaatacatttagtttagggtttttgatctcctttgttaaaattcgagagcttggcatgccctgtttctcatcgcactgaggagtcacagagccgctgtttggagcacagaccgccggactacccaggtttgggtttgagctctgtcctcagctgcatgactggatgttaccaagtgttaatttgcttgtcactgagaaagggggtcgtactacccagagttgttgtaagacttaaacgagttaatatgtggaaagcagctagaactgcccatagcaagtgcagtgtaaatattatctaaaataatcattattactgtccttgtcactgtttggataatttagatatgaatacttcaagctagtattcttaactagtcaccacagtatcatagtgcaaaagaatgttcaaaaattaaaacaaaatttgaggcatccaacgtacactgggctgtaatcagagtattggccagaggtctgtgggccggcctttctcctctctggggacrccgctctgccccagcctctgctgcagctgtcagccttgtcagtgctttttgttatccagactttctactgtatcttaactgtcttgctgtgcagttttgcacataatgccttctgcttatctttttcctctttcccccaaaaaatgtcttgaaaaaaataatgcatttgaaatagagatcyagcaattgttaggtaataaatatgtgtggttttttgcaggcatatatggtgctggttgtctcattacggaaggatgtcgtggagagggaggcattctcattaacagtcaaggcgaaaggtttatggagcgatacgccccyrtcgcgaaggacctggcgtctagagatgtggtgtctcggtccatgactctggagatccgagaaggaaggtgcgtgtgatttaccaccagcactgtctgagcgggcacacgggccggggttgcttctgtgagtttcagcaccrctcgmcctcaccttcgtgtgcaggcrcatgtgcacagccacctctcttagctgctggcaggcrtctgttagtctgcgatattttcctaaagacctacattttgaaaattttagccagtttctttctcaaatctgtggaacagagtttctcttagtgtgtgtgagtatgtgacggagtatggragagagagacacacacccaacctgaagtcggcatgtgagccttgggtgttgtgtctgatacccacagatgttttttggcagctttcaaagtgtgtgggttatttggctttcagtaaaacagtttgcagctctttcattgcctgaccctgttctttaatgtaatgacatttgctaaatatctgctggtatggcctttagaggttttacatttttatattaaaaaaacagagaagtcaggtggggcgcagtggctcacgcctgtaatcccagcactttgggaggctgaagcgggcagatcaggaggtcaggagatcgagaccatcctggctaacacggtgaaaccccgtctctactaaaaatacaaaaaattagccgggcgtgatggcaggtgcctgtagtcccagctactcgggaggctgaggcaggagaatggcgtgaacctgggaggcggagcttgcagtgagctgagatcacaccactgcactccagcctgggcgacagagcaacactctgtctcaaaaaaaaaaaaaaaaaaaaaaaaacagagaagtcaaatggttttttggaatatggtggccctccgtacccatyggttccacatgtgtggtttcagccaactatgtattgaaaataaaattgcatccttacaaatatgcagactttttttccttgtcattgttcccttaacaatacagtgtaacagctatttacgtagcatttacatkgtattaggtactatgagtcatcctggagttgctgtaaaacttaaacgtaaaacttgaaatgaggatgatttaaagtatagaggaggatgtgcataggttatatgcaaatactctcccattttatattagggacttgagcatccacggattttggtatccgtgggggtcctggacccaacctgccacggatacgcagggacgactgtatttggcatagaggcctttctaatgcacttaccaaggacacctgcagcaggctgtgatccctgagacgagcgtgagtttagtgagggcagagtwtttgttctggttctcagctgtgtcccagcacctrggattgtccctggcayacagtagctgcttagaaaagatttgatgrgagggtgaccatacatgaggggaaattttcctcagtatcaaaacatgttgmaactcacacacttccaagatgacgtattctcaggtctcctgccgttgccgttctctgccgtatgtgatggtgttctgtcttaccagaggctgtggccctgagaaagatcacgtctacctgcagctgcaccacctacctccagagcagctggccacgcgcctgcctggcatttcagagacagccatgatcttcgctggygtggacgtcacgaaggagccgatccctgtcctccccacygtgcattataacatgggcggcattcccaccaactacaaggggcaggtgatggtgctggctcctcccccacagctggaaagaaggctgggacgayggggcccacctygcagttgtctctttagatcttacaggaaaagatagatgtttccttcaagaaagtactgtattgttttctagattgcactttaaatttctattaccggaggatggagggggcttaataatttattcctccttagtaaattgtcagagatacatcatttgcagctttttccattttgtaattactttcctatatgatcttgtgttatttctaatgatcttacacatcaagggatctttataattcattcctttgagtggtttgtggttcacacagagcttgtcagtcacttaggctccttgttgggcgaggtgggtggaagctgttgctctccctgcgtagacgaagaggtgaacggggtagaacagtctggaacatcagtctcccctgctgatgttcctccacctgccgtgctcctgggtctgagccggagcacaggtggtgagggccccgggaacatgggacacgggggacagtcgcagatgctgacattggaggtcctctgacctgcttgtaacagcaggtgctcaggggcagaggggaaactgggggataccttcggaagcttccctctgaagaagagtagctatggtccttacttccctcttagatacggtctttacttccctctctttttttttcttggagatgcagtctcactctgttgcttcggctggagagcagtggtgcgatctcagctcactgcaacctctgcctcccaggttcaagtgatttttccgcctcagcctccctagtagctgggattacaggcacccgccattatgccccgctaatttttgtatttttagtagagatggggtttcaccgtgttagccagacaggtcttgaacccctgacctcaggtgatcacccacctcagcctcccaaagtgctgagattacaggcgtgagccaccacgcctggcctacttccctctctctgacctgcagcacagacaccctgttggggaaggtgggctggtggaggcatgggcaccttgacatttcacctgaaatcttcctttccacaggtcctgaggcacgtgaatggccaggatcagattgtgcccggcctgtacgcctgtggggaggccgcctgtgcctcggtacatggtgccaacygcctcggggcaaactcgctcttggacctggttgtctttggtcgggcatgtgccctgagcatcgaagagtcatgcaggcctggtaagtgttttcttcaggagccagactatttgagaaggcgcaggacgttagaaagtcttttttcttttttttgagaaagggtcagcccaggctggagtgcagtggcacagtcatagcagcctcaacctcccgggctcaagcagtcttcaacacctcaaccttcagagtcccaagtagctgggactacagatgtgcaccaccacacctggctaattttwaaaaaaatttattttgtagagacagggtctcacaatattgcccaggctggtcttgaactcctagactcaaacagtcctgcctcagcttcccaaagtatcgggattacaggcatgagccactgcacccagccaggttacaaagccttgatttcttactggaaatttgcttagtgatcatatagaggtagtctgggtttttcccccagaagtgattaaactgagaaatccagaaattatatggtggtaatgttgagactagatagaggctggttggggatcttaacagttaaggtgacatttttggggttacatttttttttaattattttgcagtcattatgttctgtttagaaaaagcactattagaaagttgttatttttaggggaatcattacatattacttgcctgataaaaatcacttatttgcaatgaaatattttaagtagttggcatgaatgaatatgtaacttcttggtacttagaaaagtaatttaggccattctagaaacaaagtacagctagcctctattagaggagaagggatgacttacagtgaacaggattcccaccctttacggacagattggatttcacttgctggttttcttttcatgatagcatcaaataatgtgcagtaaaggaaataccaygtgtgggagtgtgagtcttacgtgcactaagaacggggcagttagcatctctcccacctccagacatcctcacggtggttatccagcctcgtgtgctcagaacagtgtgaggtggatgaggcactggtggatgtttgcgtggcaaggatggtgggaccccaggcccatgttcttcccgttacctttctctggtgttaactgttagcatcatttctgctgtttttatacaacaggtgctttttgtatggattcaagtgaaataaaaactagcacggcygtaacttataaacgtgcccccttttgtatctgtagttagaaaggtgcagatagtattaaaagggtagcttacttcagacactctgtctctggatctgaccacygctcgggaggccagcacacgcagagctggcgtctcatccccagccrttggtgatcatcggcgaaggcggagttcaggtccatcgttcctgacgccgcaggtagtgcttgtctcactccatagccctgcactttgtcgcagtgaggactgataccacttctctcagagcaatgtagaaattttgagctgctctttctttgaaaatgcaaaaaagaacattttgtaagaataccctatactttacatctgagaaaccgcccacgcatgcagcatctcacgcagaatgctgtggagtcagactcaaaaggctgcatgcctgtggttctgttgatacgacattctggaaaaggcacatctagggaagacaagggattggtggttgccagaggctgcttcctgattgtgctgagacttacagacacaactctgtgtgtgtcaaaatttgaaaaaccctacactaaaaatgatgagtttattttactgtatctttatgctttaattttcaaaaatgaaaaggaaagaaaaaatgcttgtagcatcactattctcccccaaaaccccctgcaaaaaaaaatacatatatatacacatatatatgtwttttttttttttaagagatagtctccctctgtcgcccaggctgtagtgcagtggtacgatcaggtgcacaccaccacacctggctaatttttaaaaatgttttgtagggacagggtctccctgtgttgcccaggatgggcttgaactcctggcctcaagtgttcctcctgtctcagcctcccgaagtggttacatgcgcctatacatgtgttaaaattggtagaactgaggctgggtgcagtggctcacgcctataatcccaccgctttgggaggccgaggcaggcagattgcttgagctcaggagttcgagaccagcttgggcaacgtggtgaaaccccgtctctaccaaaaatacaaaaattagctgggcatggtggctcacacctatgtagtcccagctacttgggaggctgaggttggaggattgctggagcctggaaggcagaggttgcagtgagccaagatcacaccactgtactccagcctgggcaagagagggaggagacactgtctcaaaaaaaagaaaaagtaaattgtagaactgtccacctaaagaaaaaagtcaattttactgaatgatcaatttttaaagcattattatcaaaaggaagagaaacaccagcgagcctagaagcatttgagcagaccctcaagagacccatagcctggtcctgtggagaggtggtgggcggggtggggcctgtttgactcctgcatttcatacatcctgcctcctgcatgtgttacctgttgaagaaaatatatataacgttataaaaaaaacttaaaaacttttttcaagacatcgtagaaacacaagagttgcaaatcttggctgtgcgcagtggctcacacgtgatcccagcactttgggaagccaaggcaggtggctcacctgaggtcaggagttctagactggccaacatggtgaaacccatttctactgaaaatacaaaaaattagccaggtatggtggcatattcctgtagtcccagctactctggaggctgaggcaggaggcttgcttgaacccggagatggaggttgcagtgagccgagatggtgccactgactgcactccaacctgggctacagaacaaaattccatctcaaaaaaaaaaaaattgctaatcttgaagtatagttgagagcacataagagtccaaatcaacaggtgactttcaagcacacagcagccaccttccccccgctgatgtgaagggtggccggccccttgggaccaccatctggaaggtgtctcttttttcccttagtggagtgacatttatatacacttaatatatataaatttgtatacatttaattttttttttttttaagacagggtctcgctctgttgcccaggctggagtgcagtggcgcgatctcggctcactgcaacctccacctttagggttcaagcagttctcatgcctcagcctcccgagtagctgggattatagacgcgtgccaccatacccagataatttttgtgtttttagtgaaacgaggttttgccatgttggccaggctgctcttgaattcctgacctcaagtgatccacctaccttggcctcgtaaagtgctgggattacaggcgtgagccaccgcacccggcctacatttaattttttaattttagagatgatttctagtttattcactctaagatcacttaatggatatctactgtgtgccaacaattttgcctttatgttctttaaaattggccccaactcaacagatggcctcagctgtagggtgggctggcagtgtgttagctcaggagacttacagagtttccaagctccttgagtggctgtgctacatgtttgtgtgtcattctaaatccatttggttttttaaaacggttttcaaaagttaaattctagcttttttttgttttaggagataaagtccctccaattaaaccaaacgctggggaagaatctgtcatgaatsttgacaaattgagatttgctgatggaagcataagaacatcggaactgcgactcagcatgcagaaggtaagagcctggactcgctctggagtgagcaggagggctgcatacctggccctgcactggttttgttttttwaaaactagatctagggggatgcaggtgcagttttgtgtggatgtactgggaggtggtggagtctgggcttttcatgtaccygtcacmcaagtcgtgtgtgttgtacccagtaggtaattgttcaaccccacccctcccgctttttggagctcccagtctctgctactccactccatgtgtccatgtgtactcaccattcagcttccacttccaagtgagaatgtgtgacacttgaccttctgagtcacttcacttaggatagtgacctcctgttccatccgtgtggctgcagaagacatgattgcgttctttttttatggccgagtagtatttcatggtatatatgtaccacattttcttcatctggtcatccgttgatgggcacttaggttgattccatgactttgctgttgtgactagtgctgcgataaatacataaggctgcaccagtatctggaggtaaacagcggtaggacgtactcctcaccgtatcaagaatatgaaagagaccaggaggcctgaactatacagaagtgcacttcttttccacatagaaggtcggcagactagggcagaattagtgactgcttggcatccaggacagccttctgtggttcactcgtgtgtgcttgggtgtgacctccgtgacctgaccattgctggctgtcatggatgagtcacagcgtggaggagagggaactgcaggaccgctggagaagctcagtccccagcagggcagctttctcttagaggtttcctggagttcaacacaacactggtgcttacatctcaggcccggatatcgatcatgtcatcatgcctggcttccagcagctcggaaatgtctttaagctrgacttgttgctgcctctaaatatactcggaagagagggagagtgggcggcmggtggaaactgatctgtgycctgtgctgctgggagtcggtccagtaggaccatctgtgatgatggaaatgttccgagtgtttgccatccagtatggcagccattagccatggggccgtggagaacctgatacatggtcagtctaagaaactgaattcctctaataacaaggattcttgtccatgaatgagatctcttgcctactatttgcaagaatttctgtgtattttctaaaaagtccattgctttagtcctattctgaaataggtgtctaacacctatgtggtgttagacacaggagaacaggttccctgctgacattttcagaggcctgtgcccttcagtcttcaagtgaagctgggcttcagggaggytttgtggaatggtgagaagaacagtgtgactaaggcacagaaggctgagtgatgccctgcagtactattgtagggttggaggccagctgggaaagaaagaaccattgcattagagaatgggaacatgccttcggatatagaaatggcaaatccatgagatagtttaaagtgagaatactrgaagcattcccaccaaacatggtgtgtcttggtgcctgctgtatcccaggctccacgagatgctggagtcagcactgaacaaacagagtttcctctgctcgtggaaatgcgttccgttggggaagggatttttctgctgagtctggctattcatagtaagaagcaaaaaaaagaaatgaggtaaatttttgggaacaggcccccaaatgtggcccaaaactgaccataaacaaaatctctgcagcactgtgacatgctcttgatggccatgacgcccacgctagaaggctgttggtttaccagaatgagggcaagggacacctggcccacccagggtggaaaaccgcttaaggcattcttaaaccacaaacaatagcatgagcgatctgtgccttaaggacatgttcctgctgcagataactagccagagcccatacctttgtttcccgtaaggaatacttttagtaaatcttatgactggcttgctctcaataaatatgtgggtaaatctctgttcaaggctctcaactctgaaggctgtgagacccctgatttcccactccacacactatatttctgtgtgtgtgtctttaattcctctagcgccgctgggttagggtctccatgaccgagctggtctcggcaaatggcgcccatatatgggggctcgaatctaggtcgaagggtcaccggagcgatggagaacatggaactaagctggaggacacctgagtactcttacgcagtccctgtggtgagtaagacgggtagctcagaagcatcagggtaacaatgggacacgtgtgggctctggttcgttccaccttggaaccttttcatgctaataataagggggaaggagagtataacgaagtaacagaagaaattacagagcaggtttgtttgccaactaaagctaaagcggcaaaggagggagaggttcatccctacccttctgcaccccctccttattttgaagaaaaagagtggcctgaccctccagatctttcttttccagaggacagtgggcgaaaagtagttgctccagtgactgtccgagcagcaccttgagcgacccctctcagttctattcaggcaggaattcagcaagctagwtgagagggtgatttagaggcttggcagttccctgttagaatacacccygcagatcaacagggaaatattacagctacatttgagccttttccctttaaattacttaaggagtttaaacacgctatcaatcagtatggaccaggttctccttttgtaacaggactgttaaagaatgttgttgtttccagtcggatgattcctactgacttggacgctcttacttgagcttgtctaactcctgctcagttcttacaatttaaaacttggtgggcagttgtagcttccattcagcctacttgcagcgcccaggcccaacctcaaattaatataactgcagaccagcttttgggggtcggcagctgggctggtttagatgcacaagtggtcgtgcaggatgatgccgtagaacagcttasaggagtgtgcattagagcttgggaaaaaatcacttcaggtagagaacaatacccttcctttagtgcagtaaaacagggaccaaaagaaccgtacgctgattttatagctcggttacaggagtctcttaaaaaggtgatcgcagattcggctgctcaggatatagtgctgcagttatcagctttcgacaatgctaatcccgattgccaggctgctctgtgacctatcagagggaaagcacacttagttgattatatcaaggcctgtgatggtatcagaggtactctgcataaagcgactttgttggcacaagctatggcaggactgaaagtgagtaaaggaaatactccgtttcctggaggttgttttaactgtgggaagcatggtcatactaaaaaagaatgtagaaaaaaatcagtgagtgagggtgccagatgggggaagaaagaaaactgctaagcctgaaatatgtccaaaatgtaaaaaaggaaaactttgggctaatcagtgtcactctaagtttgataaagatgggaaccccattttgggaaatgccatgaggggcccgtcctgggtcccgttccaaaccggggcatttccggctcaggccactccctcacccctgtacaatgtctgttccccgccacagccggtagtgccacagtagatttatgctgcacagtagctgtgagtcttctgcttggggaacccccaccaaaggtcccagcaggagtctgtggacccttgcaagcagggacgataggattactcctaggcaggtctagtttaagtttaaaagggtacaaatacatagaggagtcattgattcagattacaatgaggaaattcaaattgttacatctacttctgttccctggaaagcagagccaggagagtgcatagcacagctcctgattgtgccatatgtggaaatggggaaaagtgaaattaaatgaacaaaaggatatggaagcacagataaacaaggcaaagcagcctattgggtgaatcaaattactgataaacgtcctacctgtgaaataactattcagggaaagaaatttaaaggtttggtagatgcaggagcggacatttcaatcatttctctacagcactggccgtctgtgtggccaattcaacctgctcaatttaacatagttggagttggtaaagcccctgaagtatatcaaagtagttatatttccattgtgaagggcccaatggacaacctgggactattcaatgataacttctgtacctataaatttatggggaagagatttattacaacgatggggagcacaagttctaattccagagcaattatatagccctcaaagtcaacatatgcatgaaatggggtatgtccctggtatgggactaggaaaaaatttgcagggtttgaaagaagtgcttcaagtggaaagacagaagttcctgccaaggtttaggatattatttttgatggcggccattgttaagcttccagaacctatacctttaaaatggttaacatataagccaatttggatagaacaatggccactgagtaaagagaaactggaggctttagaggacttagttaatgaacaattagaaaagggacacatagctccaacattttccccttgtaattctttggttttcttaattaagaaaaaatcaggtaaatggagaatgttaactgacttaagagccattaattcagttatacaacctacggggacattacagccaggattgccttctcctgctatgattccaaaaaattggcctttaatagtcatagatttaaaagactgtttctttactatccccttagctgagcaagactgtgaacggtttgcatttacaattcgtgcagtaaacaacctgcagcctgctaagcgttttcattggaaaktgttgcgacaaggcatgttaaacagtccaacgatttgccagacttgtgtagggcaagcaattgaacctactcataaaacattttcacagtgttacattattcattatatggatgatatactttgtgctgcccctactcgagaaatattactccaatgttatgatcatttgcaaaattcaatttctggtgctggtttaattatagctcctaacaaaatccagattactactctttactcctacttgggaaccttagtaaatgacattaccattgtgctacagaaagtagccatacgtagggatcaattgaaaacattaaatgagactttcaaaaattactggggacattaactggatacaccctgctctaggcattcctacctatgccatgagtaatctattttctatccttagaggagatcctagtctcactagccctcggcttcctacctatgccatgagtaatctattttctatccttagaggagatcctagtctcactagccctcggctatgccatgagtaatctattttctatccttagaggagatcctggtctcactagccctcagcaattaacaaaagaaactaagggagygcctcagctgatcgaaaagcaagtccataaagcccaaataaatagaacagatccagagaagactcgagctgcagctgatcgaaaagcaaggccataaagcccaaataaatggaacagatccagaaaagactcaagctgcagccgatcgaaaagcaaggccataaagcccaaataaatagaatcaatgcagagaagactcaagctgcagctgatcgaaaagcaaggccataaagcccaagtaaatagaatcgatccagagaagactcgagctgcagctgatcgaaaagcaaggccrtaaagcccaagtaaatagaatcgatccagagaagacttgagctgcagctgatcgaaacgcaaggccgtaaagcccaaatcaatagaatcgatccagagaagactcgagctgcggctgatcaaaaagcaaggccgtaaagctcaaatcaatagaatagatccagagaagacttgagctgcagctgatcgaaaagcaaggccataaagcccaagtaaatagaatagttccagagaaggctctagatttgctaatttttccaactccacattcacctactggtgttattgttcaagagcaagattttgtagaatggctttttcttccacatactaattcatggactctagagaaggctctagatttgctaatttttccaactccacattcagctactggtgttattgttcaagagcaagatcttgtagaatggctttttcttccacatactaattcatggactctaactccttatttggatcaaattgctactatgataggaaatgggagaacttggattgttaaattacatggatatgatcctgaaaaaattgtccctctcacgaaggcacaaatacagcaagattttttaaatagtcttacttggcaaacccatttagctgactttgtgggtattcttgatattttcctaaaatgaaactgtttcaatttttgaaattarctaattggattctccctaaaataactaaatttaaaccaaatgaagatgcagagaatgtttttacagatgggtctagtaatggtaaagcttcttactctggctcgaaaggtaaagttttctagacaccctatgcttcagctcaaaaagtggagcttgtagctgtaattgaggtattgactgcttttaatatgcttattaatgtgatttctggttcttcatacatgrttcattccacacaattaattgaaaatgctgagttacgatttcatacagatgaacaactgatgactttatttatgcaattgcaaacagcagttaggagtagaatgcaccctttttacatcactcacattagggctcatacacctcttccaggacctttgactgcagggaatcaaatggctgatcgcctagttgctactgcaatatctaatgctagacactttcacaatttaacccgtgttaatgcctctggtctcaaacgcagatacagcagtacccggaaagaarctaaagctattatccagcgatgcccaacttgccaaatggtacattcctcatcttttacaggaggagttaatcctcgaagattggaacctaattctctttgggaaatggatgtcacacatgttccctcgtttgggagactagcttatgtacatgcatgtgtggacaccttttcactttgggctgcatgccaatcaggagagtcttctgcctacgttaaacgtcaccttttgcagtgttttgtggtaattggcattctagcttctattaaaacagataacgccccaggctatactagccaagctctagctacatttttctctatacggaatattaaacacattactggtatcccttataattctcaaggacaagccatagtggaaagaatgaatctttccctgaaacagcagctgcaaaagyaaaagggggaaaacagggactacgggacaccccatatgcaattgaatcgcattatttaaattttttgagcctgcctaaaggccagatcttatcagcagctgaacagcatctacagaaaccagctgcaaagacagaagcagaacaactggtttggtggagagacctgataataaaaagttgggaaataggtaaaataataacttggggtagaggttatgcttatgtttctccaggacggaaccatcaagacacctgaaaccttatgagctgacactgaggaagagattctgggaggatcccgaggacccctcggttgcagccatgtcaagactgatgctgaggaggaccccaactgtcatgagcaacacccgtygaacacagccacccacctgaggtcagatcaagaagctgtcacagatggcagaagaaaacctgaggaaagcrggacaacmagtcacaatgagtaatttaatggtagctgtgatagcagtgatcaccattgccatgagtattccttcaacaagggctgacacagagaacaattatacttattgggcatatktatcaatcttggctggcaagaatgcctggatgtaatcactctatgatgcagttacacatgctttctgatctcagtatttaccatgataaatctgcttctataattgaggcataccgccctcaaaaacctatctgtaaacaggattggacccagtcagagaaaatgaacgtacatgtttgggaagattgcattgcagaacaggcaggggtgctggcaacgattcctatggaatcattattgattgatcycctaaggggatgtttagcttgaattgcacctctctgtctgcgtgccacggccacactatgttcagctggtctgaacaaaattgtcagatggtagaaatgataagaaatacggcaagggttcctattatctggaaccatggyggtgtagtggcacctcamcctcaaatggtatggccctttgtaggagctaaacataaggatttgtggaaactgttaatagctcttaataagatcaaaatttgggaaagaataaaaaagcatctagaaggacaccgtacaaacttgtctttggatattgcaaaattgaaagaacagatatttgaagcatcccagcacacctgaccttaatgccaggaactggagtgcttgaaggagctgcagacagattagcagctggtaatccattaaaatggataaaaacacttggaagctctgtgatttcaatgaagattgtgcttttaatctgtgttatttgtatagtctgcagatgtggatcctgactctgcaagaagtagctcaccgtaacaaagctgcctttgcttttatcactttgcaaaacaaataaaggggacacgttgggaacaggccccccaatgtggccataaactgtccccaaaactggccataaacaaaatctctgcagcactctgacatgctcttgatggccatgatgcccacgctggaaggttgtcggtttactggaatgagggcaasggacacctggcccacccagggtggaaaaccgtttaaggcattcttaaaccacaaacaatagcatgagcgatctgtgccttaargacattttcctgctgcagataactagccagagcccatccttttgtttcccgtaaggaatacttttagtaaatcttatcactggcttgctgtcaataaatatgtgggtaaatctctgttcraggctctcagctctgaaggctgtaagacccctgatttcccacttcacatgctgtatttctgtgtgtgtgtctttaattcctccagcaccgctgggttagggtctccacaaccgagctggtctcagcagtaaatattgaaaaggaatagatacaattktcattatttacagatagaatttccaaacaattcccagggaataaaytgaaaaactaacagaaacaaaacaagaatgtagtaaggtgtctggataagagatttgtatctaaaaatcagtagctttacaatgtgccagcagtagtctgctcagacatcagtaaatatctcattcacatttcaaaaaaaattgaaaatgccctgaaataatgtaaccagaaatacgaaaaaaaggataygaaaacatgtggctgctaatggacatgaaagaatgtaatactagattctgagatgcaatgtttttcatttgttcttcctgaaaaaccattaggttgatgtgcattacagtgttacgattatgtatgagtctaaggaaaatcagatgaaatgtccaaattaaaccatgaaggtgcattggtagaggaagagaaaattagggtcagtggagcaaagcacagttagagggagaagcaaggaggaggagggatcactgaggtggtgcctgtcccacaggaagcaaaagctgacgcctagttcccagcatacctacagtaaacttcaggtccactgcatagcacgtctctcatcacagtaaaactatgaaggaactcagtgtacaaggagcttctacaagataggcagaagacagtagccagatgggccaagggccccagccacccacgcccctccctctccttgaagacgtgcagctccaacaccaccatcaccagggctctgctcagctcctcctagtgtgtatcaccacagggctgctggcttgtgtcacgttcaccaccagaccccgcgtcaggagtcccgccaggggtgtggagaggcagcgctgcctggttggccgtggagctgtatggaacatggtgcctcacaggcagtctgcttggagtcctggaccctggctgtatcctgctggaaaggatgtgtgtgggtctaagatgtgtatgtaatagaaacatttatttattcagaagctttagtcaaaacttcatttttaagtttggagtaataaactcatagtctgaatttcctaatttttctgtttaatttatgtaacttttaagtgaaatgcaaaacaacaggtctaaaagttaagcagttcttggtatggctgcttctatggattaaaagtttacaaataatattttgtgccacagtcaatgcaaaatcatgctgccgtgttccgtgtgggaagcgtgttgcaagaaggttgtgggaaaatcagcaagctctatggagacctaaagcacctgaagacgttcgaccggggtgagcagacagtgggctctgtgcacactgttgggcccttccttctgcagggtgggctggtgtctgtcccgtcagtgctgacttagttccgtgcttgctgtctggatgggtcctggcccacagctataaagccacaaccagtgactccatggactagcaggcccaggctgacagctcggagggcccatgtgactgggtcccrcctgcccctgatggaactttttgtgtccccaggaatggtctggaacacggacctggtggagaccctggagctgcagaacctgrtgctrtgtgcgctgcagaccrtcwayggagcagaggcrcggaaggagtcacggggcgcgcatgccagggaagactacaaggtgggccttctcaccacgcccacctgcacctgccttttcctgccacctggtgggactcagccccacccctgcattttctctgcattttctttcgttgccccaaaagtaaatccaaaaaatgcctttttcccccctggtaactttgatccctgggttctcgccatcttctggatcactgtgaccttttccttgctttgggtcggcatccrctgatgccagcagtggcatctccaagccaatgtgctttgctgttagaaggccaaggttagaagtgcagctagagtggcaagaccaggaaataaatgccagtttaktaaataacgagtaagccatcatttcaagcctgccctgtggaggaaatgccagtttattaaataacgagtaagccaccrtttcaaacytgccctgtggaggaaatgccagtttattaaataacragtaagycaccgtttcaaacctgccctgtggaggaaatgccagtttattaaataacgagtaagccaccgtttcaagcctgccctgtggaggaaatgccagtttattaaataacgagtaagccaccgtttcagacctgccctgtggtggaaatgccagtttattaaataacgagtaagccactgtttcaaacctgccctgtggaggaaatgccagtttattaacgagtaagtcactgtttcaaacctgtcctgtggaggaaatgccagtttattaacgaataagccaccgtttcaaacctgccctgtgaaggaaatgccagtttattaaataaggagtaagccaccgtttcaagcctgccctgtggaggaaatgcccgtttattaaataacgagtaagccaccgtttcaagcctgccctgtggaggaaatgcccgtttattaaataaggagtaagccaccatttcaagcctgccctgtggaggaaatgccagtttattaaataacgagtaagccaccgtttcaagcctgccctgtggaggaaatgccagtttattaaataacgagtaagccaccatttcaaacctgccctgtggaggaaatgccagtttattaacgagtaagtcaccgtttcaaacctgccctgtggaggaaatgccagtttattaacgagtaagtcaccgttttaagcctgtcctgtggaggaaatgccagtttattaacgagtaagccaccgtttcaaacctgccctgtggaggaagtgccagtttattaaataatgagtaagtcaccgtttcaagcctgccctgtggaggaaatgccagtttattaaataacgagtaagtcaccgtttcatacctgccctgtggaggaaatgccagtttattaacgagtaagccaccgtttcagacctgccctgtggaggaaaatgccagtttattaacaagtaagtcactgtttcagacctgccctgtggatgaaatgccagtttattaatgagtaagtcaccatttcagacctgcgctgtggaggaaatgccagtttattaaataaggagtaagccaccatttcagacctgtcctgtggtttggaaaaggtattatagagcctgccctgtggtcacttgttcttcagatgaactgatttttgtgcasagcgcacgtgttggattctgcctggtaagagtttttcmcatatgatagcaaaaaacgacggaaagggaagcttgggrtgcaaatgcaagttcaggataaaccacatcagcaaaaggacaaaggctccacaaggcaggcgcacaggctggttcaggacmgtgtgtaggcggctggtggcagcctttccagtcagctgaacatggtgaatgggaaaatcatttttattcaccatgaaattttactgatttaccctccactagaatatgctgatggctgtgatcactgctcagaacttgctcttgtctccttgtatgtattaagagtttcctgcaaagtatatgaatccgtgtttgccagaatacagaataatagtaaatttattatttttatttttatttttttgagaaggaatctcactgtcccccaggctggagtgcagtggcgtgatctcagctcactgcaacctctgcctcccgggttcaagtgattctcctgcctcagcctcccaagcagctgggattacagacacactgccaccatgcctaattttgtattttcagtagagatggggtttcaccatattggccgggctggtctcgaactcctgacctcaagtgaaccacccacctcggcctcccaaagtgctagggttacaggcatgagccactgtgcctggccagtgcataaatttagttggtcacagtcagttttaattagaatagaagccaggtgcagtgcctcacacctgtaatcccagcatttgggaggctgaggcaggccaatgacttgagccccagagttgtagaccagcctgggcaacatggcgaaacgtgtctctacaaaaacataaaaaatgagccaggtgtggtggtagcacaggaggctgaggcaggaggattgattgagcctgggaagtcaaggctccggcaagctgtgatcacaccactgcactccagcccaggtgacatagccagaccctgtctcaaaaaaaaaatttttttttaataaaaacaggctgaaagaaaagattgaggtagtctcccagcacatggagcaaaaagacaaagtatttgataaactcttaggtacataaaggatgcttaagggaacatgcggacatggattactgtggactcactgctggctgcacaccccctggccagccatgcggcctccgtgggttctgaacatgttgatggtgccaacctcctgggctgaagtggaaatggaatgagttctagggcatctgtctcttagatcatgttaatgtytgctgtgttttttctgtattgctctgttagagtaataagaaacgtgatggtgtttctggcctcaggtgcggattgatgagtacgattactccaagcccatccaggggcaacagaagaagccctttgaggagcactggaggaagcacaccctgtcctatgtggacgttggcactgggaaggtcagtgtggagctygttctcaccacagcccagcacccacacggccccgcccaggcctgcgggctggccttgctgatggtgaacggggaagagcaggccagatttaaatcaactcccgacagattcgaggcaccgctgaaaaaggcactccgacagcagtcgggcttcgggctggaaacagaatccagttcctgcaggtggttcagaggagccttaaggaagggttgctccgtggtgtgsgccagatggacgtcactgggcaggagcaagtgtccaaggcctggtggtaggggaggagatgatgattgtggacctagcgagaaagcatctgtggggtggggacacacagccattaccagaaaccagtcccacgttaagggagcccagaagagacacctcccctctcctcccacgggctgggccaactggaagcgtctgcaggggagctgaggggatgtggtgcagcctttagcatcccctgggcactgagcaagcagagaagggcagaaatggaggtggggttggggtgagcagtgtcctgggaacagccagccgagggtgtggtagggggtcgcagcctttttccacacacggtgagcagcgtcctgggaacagccagccgagggtgtggtaggggggtcgcagccttgttccacacaagcacagttcacctgtgtggcatttccgctgggcattaagattcagaaataatgaagatagaaagcttttacccttaaacttttcatagcttgtaagagtcgtataatcacttagctgtgtctgtggaagttacctttggactctcactatcatctagtgtgtctgtgattcaggcagtaggtcattttcaggacttctcatgaaggccatttcttgatagtgtatagaaatcacacttcactcgcttagcacaagtctatttttaatgtttccgggttcgggttttttggtttttttttgtttttctgagatagagtctcatctctgttgcccaggctgatatgtgttggcttgatctcgtctcactgcagcctcaacctcccccaggctcaggtgatcctcccacctcagcttcctgggcacatggcaccatgcctggctaatttttatatgttttgtagagatggggtttctccacgttgcccaggctagtcttgaactcctgcgctcaagtgatccacctgtcttggcctcccaacaggcatgaaccaacacccccagccagttttagtgatttttcaagaaatacatactcattttagaaagtacaaagagattgaaataagagctcactaaccagagacgacccattatggtttaaatttctttgtatatgtgcctaccttttcctgtgtgtgcatatttaatacacagcttgagtattccttctctgaaatccttgggaccagaagcgttgtggatttcaggcttgttcagactttggaatatttgcattatacttactgtctgagcatccytaatsggaacatctgactccayagcacatttcttttgaatgtcatgctggtgctcagaaagtttcagattttagagaatttcagatttttggattagggatgttcaacctatataaatatttactttgaagtagaaaaactggaagtagatggtttaaacataaagtgtcttggtatagacaagggttctcccactttacatgatgggagcatttttgtaaagcactgagaatcttaaagttcacatgccataaatctacttttatagttaaaatttttcaaaaggaacacaagagatggctttttgtacatttttgtgcttaacttaccactgactcttcttttcaaggtcactctggaatatagacccgtratcgacaaaactttgaaygaggctgactgtgccacyrtcccgccagccattcrctcctactgatgagacaagatgyggtgatgacagaatcagcttttgtaattatgtataatagctcatgcatgtgtccatgtcataactgtcttcatacgcttctgcactcyggggaagaaggagtacattgaagggrgattggcacyyagtggctgggagcttgccaggaacccagtggccrgggagcgtggcacttacctttgtcccttgcttcattcttgtgagatgataaaactgggcacagctcttaaataaaatataaatgaacaaactttcttttatttccaaatccatttgaaatattttactgttgtgactttagtcatatttgttgacctaaaaatcaaatgtaatctttgtattgtgttacatcaaaatccagatattttgtatagtttcttttttctttttctttttttttttttttttgagacaggatcggtgcagtagtacaatcacagctcactgcagcctcaaactcctgggcagctcaggtgatcttcctgactcagccttctgagtagttggggctacaggtgtgcaccaccatgcccagctcatttattttgtaattgtagggacagggtctcactgtgttgcctaggctggtctcaagtgatcctccctccttggcctcccaaggtgctggaattataggtgtgaacaaaccaccatgcctggccttgtagtttatttctaagttcaaattaatgttggtgcctgagaacgaatggagaaaactaacatttcctcctttttcttggcagacggtttactaggtgagtgtgtccttgattattcaaatcaggggtccccaatccccaggccacagattgttaccagtccatggcctgttaggaaccaggccgcacagtaggaggtgagcagtgggccggtgagctactgtgtgagctccaccccctgccagagcattactgtgaactccgccacctgtcagagcattactgtgtgagctccgccccctgccagagcattactctgtgaacaccacctgtcagagcattaccgtgtgagctccgcctgctgccagagcattactctgtgagctccgcctcctgtcagagcgttaccgtgagctccgccccctgttrgagcattactgkgtgagctccrcgccctgccagagcattacygtgtgagctccgcccctgccagagcattaccktgtgagctccaccccctgccagagcattactgggtgagctccaccccctgccagagcattactgkgtgagctccaccccctgccagagmattactgtgagctccgcctcccgacagcattaccgtgtgagctccgcgccctgccagagcattactgtgtgagctccgcccctgccagagcattaccttgtgagctccaccccctgccagagcattactgggtgagctccacsccctgccagagcattacygtgtgagctccgcctcctgccatagcattactgtgagctccrcctcccgacagcattaccgtgtgagctccgcccccgttagagcattactgtgtgagctccaccccctgccagagcattactgggtgagctccgcccctgccagagcattaccttgtgagctccaccccctgccagagcattactgggtgagctccaccccctgccagagcattactgtgtgagctccgcctcctgccatagcattactgtgagctccgcctcccgacagcattaccgtgtgagctccgcccccgttagagcattactgtgtgagctccaccccctgccagagcattactgggtgagctccaccccctgccagagcattaccgtgagactccgccccctgtcagagcattactgtgagctccgccccatgttagagcattactatgtgagctccgccccctgccagagcattactgtgagctccgcccccctgtcagagcattagtgtgtgagctcctcctcctgtcagagccttaccgtgagctccgccccctgccagagcattaccgtttgagctccgcctcctgtcagagcattactgtgagctccatctcttgtcagagcattaccgtgtgagctccrccccctgycagagcattaccgtgtgagctccgccccctgycagagyattastgtgagctccttctcctctcagagccttgccgtgagctccgccccccgccagagcattaccgtgtgagctccgcctcccgtcagagcattaccgtgtgagctccgcctcccgtccgagcattaccgtgtgagctccgcctcccgtcacagcattaccgtgtgagctccgcctcccgtcagagcattaccgtgtgagctccgcctcccgtccgagcattaccgtgtgagctccgcctcccgtcacagcattaccgtgtgagctccgcctcccgccagagcattaccgtgtgagctccgcctcccgtcagagcattaccgtgtgagctccgcctcctctcagagcattaccgtgtgagctccgcctcccgccagagcattaccgtgtgagctccgcctcccgtccgagcattaccgtgtgagctccgcctcccgacagagcattaccgtgtgagctccgcctcctgccagagcattaccgtgtgagctccgcctcctgtcacagcattaccgtgtgagctccgcctcccgccagagcattaccgtgtgagctccgcctcccgtcacagcattaccgtgtgagctccgcctcccgccagagcattaccgtgtgagctccgcctcccgtccgagcattaccgtgtgagctccgcctcccgccagagcattaccgtgtgagctccgccccccgccacagcattaccgtgtgagctccgcctcccgtccgagcattaccgtgtgagctccgcctcccgtccgagcattaccgtgtgagctccgcctcccgccagagcattaccgtgtgagctccgcctcccgtccgagcattaccgtgtgagctccgcctcccgtcacagcattaccgtgtgagctccgcctcccgtcasagcattaccgtgtgagctccgcctcccgycasagcattaccgtgtgagctccgcctcccgccagagcattaccgtgtgagctccgcctcccgscagagcattaccgtgtgagctccgcctccccacagagcattaccgtgtgagctccgcctcccgkcagagcattaccgtgtgagctccgcctcccgkcagagcattaccgtgtgagctccgcctcccgtcagagcattaccgtgtgagctccgcctcccgtcagagcattaccgtgtgagctccgcctcccgkcagagcattaccgtgtgagctccgcctccgtcagagcattaccgtgtgagctccgcctcccggcagagcattaccgtgtgagctccggctcccgtcacagcattaccgtgtgagctccgsctcccgccagagcattaccgtgtgagctccggctcccgtcagagcattaccgtgtgagctccggctcccgrcagagcattacygtgtgagctccgcctcccgacagagcattaccgtgtgagctccgcctcccgccagagcattaccgtgtgagctccgcctcccggtcacagcattaccgtgtgagctccgcctcccgtcacagcattaccgtgtgagctccgcctcccggtcacagcattaccgtgtgagctccgcctcccgtcacagcattaccgtgtgagctccgcctcccgtcagagcattaccgtgtgagctccgsctcccgtcmgagcattaccgtgtgagctccgcctcccgtcagagcattaccgtgtgagctccgcctcccggcagagcattaccgtgtgagctccgcctcccgacagagcattaccgtgtgagctccggctcccgtcacagcattaccgtgtgagctccgactcccgacagagcattaccgtgtgagctccgactcctgtcagagcattaccgtgtgagctccgcctcccgtcagagcattaccgtgtgagctccgcctcccgtccgagcattaccgtgtgagctccgcctcccgtcasagcattaccgtgtgagctccggctcccgtcacagcattaccgtgtgagctccgactcccgtcmgagcattaccgtgtgagctccgcctcccgscagagcattaccgtgtgagctccgcctcccgtcacagcattaccgtgtgagctccgcctccccacagagcattaccgtgtgagctccgcctcccgtcacagcattaccgtgtgagctccgcctcccggcagagcattaccgtgtgagctccgcctcccggcasagcattaccgtgtgagctccgccccccgccagagcattaccgtgtgagctccgccccccgacagagcattaccgtgtgagctccgccccccgtcagagcattaccgtgtgagctccgcctcccgtcagagcattaccgtgtgagctccgcctcccgtcacagcattaccgtgtgagctccgcctcccgtcacagcattaccgtgtgagctccgcctcccgtcacagcattacygtgtgagctccgcctcccgtcacagcattaccgtgtgagctccgcctcccgtcacagcattaccgtgtgagctccgcctcccggcagagcattaccgtgtgagctccgcctcccaacasagcattaccgtgtgagctccgcctcccggcagagcattaccgtgtgagctccgcctcccggcagagcattaccgtgtgagctccgcctcccgtcagagcattaccgtgtgagctccgcctccccgcagagcattaccgtgtgagctccgcctcccgacagagcattaccgtgtgagctccgcctcccgtcacagcattaccgtgtgagctccgcctcccgacagagcattaccgtgtgagctccgcctcccgtcagagcattaccgtgtgagctccgcctcccggcagagcattacygtgtgagctccgcctcctgtccaagcattactgkgtgagmtccgccycctgtcatatcattactgggcgagctccgcctcctgccagatcagtggtggcattagattctcataggagtggaaccctgttgtgaactgcacatgcgaaggatctaggttatgcgccgcttatgaaaatctaatgctgatgatctgagatggaaccgtttcrtctccaaaccatccccaccatccccacacttgtccgtggaaaaagtgtcttccatgaaaccagtccctggtgccaacaaggttagggaccaccagtttaaataaccaaatactaaaagaactggcatagaagtaaatgggctgctgctttatttttaggctgttctttttagagaacaatgacaattatttccaagtttgtcattagaaagtaatattaggttggtgcaaaagtaattgcagtttttgccattactttcaatggtaaaagccacgattacttttgcaccaacttaatatgataaatttgttccttaaagtgtatttttggtaagaaaaaccttttgtttttccttatattaattttttgttttttttcttggtagagacagagtcttgccatgctgcccaggctggagtgcagtgctgtgatctcggctcactgcaacctccacctccggggctccagcaatcctcccacctcagcctcccaaggagctgagactacaggtgtgagccaccatgcctggctaatttttatattttttacagagacagggtttcaccatcttgcccaggctggtctcaaactcctgggctcaagcagtcctcctgcctcagcctcccagagtattgggattataggtgtgagccactgccagaaaaacttttcctaagacaaggcaggttttacattatatttagattttttttttaatgatgtcttttttggcagtgcacagccagagaacaacacatcacacacaggaaacagttgtgctcatgtgatgggggcctcagcactaggaaggagcggactattggtgcacgcagcagcttgaataaatctgaaagtcactatgctgtgtaagagaagccaaattttaaaagtgcatactgtgtacagagggtgtcgagaatgcctcctacgtgacggaaagcagatccgtggttccctgcagactggcaggagcagattccaaaggcacaggaagaagcttgtgggtagagtgtgttcattatcttctgtgcattacaccataaaaaagctggtcataaaaatgcgaaccaaaaacaaaggtgaaactaggataaaatttctcamctgtgtgatkggtaaatgtgcaggtttgacatcatgctttgtttatgaagctgtgggatacaaggactctcatacgtcactgtggaatgcagaacattgcaacctcatggaagaggatttggcagcatctaacaaaagtatgtggcatttgccctttgactcagcaattctagactgcctcaaaaaaaactctggcaaaaaaatgaaaggactttactcacagagttcttttcacgcctaaatatgtttgcaaccaagttcttcactgtggcatttgtaaaactggaaacaatcaaaatgtccatcagtargggattrggaacattaattcgtacagtggggaactcagtaccagaaggagggatgaggaagacctattgataaggggcagagtacatatcatataatgcaaatatatatttgctttttcttaaaacagtacaaagataaaaaactaaagtggttgctgtggaggacaggggtcaatggtggaagtgagactgaaatagactctgaagtaatatctggactttgaaattataagtgttttacatattaccaaactaagttttaagatagtccctaaaattgaaagaatagtatctgaaatgaatgaatctaaattccttggattgtcttctgcaggtgccaaccctgagaccaaaatttggaaggtggccctgagcagcagctgaagggaagcgggaggtaagacaggaaagaggtgagggcacagggtgtctgggagccggatcccacgtgggcagctgggcccgtgctcattgtgggagctggtgcattccttcaccagcccacgctccacagggtcaggatggtcaattccgggcaccccggcctaatccaggacatgctcctgccaccagagaaagcccctaggcagcatcccgggtgctggtggtgtcagaatcaagtttgagtctgaggagtgacctggggctggctgggctaggcagcatcacagggttctgcagcccaactgcacatcaggctggtgacagtcacacagcctattacttcgtgtgtcatcagagcatcgccagaacgcagcacttcaagtatgcagatttagtgagccatagtttaaagacaaatagagccactgaaatcctaaatttcaatcaatcatctccttgttacttgtcttattggtattaagcctttgaaattatctggggtgggagttaaaactataactaattatgttaatgctaaaactaagatttttctggccaggtgcggtggctcacacctgtaatcccagcactttgggaggccgaggtggacagatcacctgaggccaggagtttaagaccagccttgccaacatggtgaaaccccatctctactaaaattcaaaaattagctgggcatggtggcaggtgcctgtaatcccagctattcaggaggctgaggcaggagaatctcttgaaccaggaggcggaggttgcagtgagcctagattgtgccactgcactctagcctgggcaacaggaacaaaactccatctcaaaaaataaaaaaagatttttctgagaaaaaggtgtaaaaccatatactaaatttgaaatagaaatataagcattaactctgttgttcctttcacatagacacatttcctagctctgccccaggagcagtaggcacatgaagcacctagacttggtctctaatacatgaaaaccatgaattcatagtgatggtttcaaagccaaaaccaaccaaccaaacacatgtaattggtcactcttggaggtacctagggcactaactcctaacactgggagtggacacttgagggaagatcagcgattatcccaccttctgtctacaaattgcaatcagggaaaccttgctgattaggaaaagttctttacagaagaattcctgcaaataagtgagtaaagaatgacagtttaagaattgtcccagcctggccaacatagtgaaaccccatctctaaaaatacaaaacattagccaggcatgatggtgggtgcatgtaatcccagttactcaggaggctgaggcaggagagttgcttgaacccgggaggcggaggttgcagtgagccaagagtgcgccattgcactccagcctgggcaacaagagcgagattctgtctcaaaaaaaaaaaaagagttgtcaaattgccaccccaatgctgtggttctctaacctgtgtaacaggatcacctggagggaccctacccgagaccttccgattcagtcctgggggaaccctaccccagatcttccgattcagtcctggggggaccctaccccagatcttccgattcagtcctgggggaaccccaccccagaccttccgattcagtcctggagggaccctaccccagatcttccgattcagtcctggttcggcctgagaatttgcatttctaacatgtccagggaccacagtttgaaaacctccacagctgacatgtaatgggatgacttggtccaataaatgaaggaaaagtaacaggtggcaacctcaggcagcttcatcccaaccagtaagaaagtaaatccttttgtaaactaagaggaagtattaatatgggcgtttgagcaaacatttaagtgttaggacaaagaattaaaaactagcacaggcacccctgaagcatgataggatggcaacagaagggctgatttagtttccaagaaataactgacaggcagtgttgtgtgtgtgtctactgcttaggaacccaaaacaaaccttcagaccattttcatgagtactgagaccaggaaaaccactgggcastgggtggtctggaaatgtaaatgtttatagtactccatggagtactatatgagtcatggaacgatgtttcatattgaaaatgttttataaatgtgggtttcaaggttttaaagtgaacccatgtgtgtgaggagaaaggacacaccaaagaagtaaaataattgggtcaatataaaaagaaagtagaatattgcccagagaggagatgtggataattcctaacayggatcaaaggtgagctgtgtctaagacagtcagacctgcaccgtcccgtgcagtagacaccgtggccgctgtgtctgagatattcagaccctcgccgtcccgtgcagtagacacggtggccgctgtctgtaagatattcagaccctcgccgtcccgtgcagtagacacggtggccgctgtgtctaaaatattcagtcccgtgcagtagacacggtggccgctgtgtctaagatattcagacctgcaccatcctgagcagtagccacagtggcaagtagcctctgcactggacagtgcagctacagaatgatgctatcactagaaagttccatcagccagcactgatgcagacctttgcaaatgcccctcacactgaatagcacctagctgatagattgtccactactcagtgaaaagcctgtgttaaaagcagtatttggtagaaaagcaaaaaaggggaaaaaattaaaagtggtaagtcattgtcttccttactgaattctagcagaagaatgttggaaggaagatgggagtcacgggagaaagtatcattgtcccaggacaggagggggtgccaggcatggttggctctgtccctggaattctatggcgggaatctggaaaaaggaaaagtgactggagaagaaaagattctgtgtgcaaatgtcatgatgcagccatcagtcatcctgagaaaataagcgaacaaagtggcttcagatggatgctgttggatacatgtacagatacaatgtacacttgcatatgcttgttcacacaaaggacaggatggttatctgttcatttaacaaatacttgttgagggcctatatgtgccaaagacatcagatgcataagagggtgcactatggaaagcctcaggaacacaagtgcccagaaacatttagaaaaattctaatgaaaacagaaaaggcattttcaaattagctgagagaaacgagaccaaaggaaagactgacccagtatttggatacattatgtgatgaaccttaatgcagggaggaaagtgttatctttcagttaatttctcaacttctggagagcttagaacagacctggctaggaggaaattgaatctgaggcagatgaggagatagtggtgccttgatgcttccagtgattgggtcagcagaaccaggggtgggagatgatctctctttttgttggcagatggtggtctctgctgtagctttgtcccctggtgacgggactcaggcagcaacccccatcattggcaatacccccacctctgagaatgtggagaggacttgtgaagacaatgttgtcccaagcagcacagcccaggtactgacaggattcagagctagaggtttcttagaggtcagggttgtagaagcagcagggactgcagctgcatagtttgtgtatgtaacaggctagtatctcttgttctagactcatccatttgtacattcatatgagtatgcacgcagggtgttttttctttctttttttttttttgagacggagtctcactctgttgcccaggctggagtgcctggtgcaatctcggctcactgcaagctccgcctcccgggttcacgccattctcctgcctcagcctcccaagtagctgggattacaggcacctgccaccacgtctggctaattttttgtatttttagtagagacgaggtttcaccatgttagccaggatggtcttgatccacccgcctcagcctcccaaagtgctggaattacagctgtgagccaccgcgcctggccagggtgttttttctttaaaccttaatttcatagtaattaacctccctttcaagagtcagccttgctgcccctgagatgatgcagaaaaagcacaaaaggatctgggcttgaatctcctcttactgcctgcttggctttaggcaagttaccttctctgaactctagttttctcttcagtaaaatgtggatatggtgccttggcatggggaggattaaacaaagccacatatttaaatattataagggtggattatatttaaatattaaaagggtggattctagctggttgcattcattaagtgtgtcctctcttgaatgaaggcattttctacccctagaactaaagggaaagcatgacggagcactcctgggtgccatgggtgatgatggctgtggtactccaggttggagactcggccaacagttggtagagcccaactaactgttgggagtggaggctgaggcctgctgcagtcactgagatgctcccccttttaaaaaattttaaaatagcccaagctagtcttgaagttctggcctcaagtgatcctcccacctcagcctcccaaagtactgggattatagacatgagccactgcgtctagcactgagctgtttcttgctgaggtttccctgtaagaacttccaaattgggtcacaaaatcatagttgttagtattttcagagttctggagaacaaaacaggagccagtgatgggagggagaataaagatggacttcagaaactacagctcaaagagctgtggaagattctagaaaggattcttcaacaagtgatatgaatactttgtcaatgaaaaggctgaaactctgtgaaatacttgaagagatttattctgagccaaatagagtggccacgcccatgacacagacctcaggaggtggctggggtgcaacttggttttatgcattttagagggtcgtgagacatcaatcaaatctattcaagatatacattggttcagtccagaaaggcaggacaactcaaagtgggggcttctgggttataggtagatttaaaaatgttctgattggcaattagttgagagttattaccaatagaaaggaatgtctgggttataagaggttgtggagaccaaagttttatcagcaga

SEQ ID NO: 93317 - DNA, 15786 bp, Homo sapiens
ctttgtgtgagcaataaagcttttaatcacctgggtgcaggtggactgagtccgaaaagagagtcagcgaagggagataagggtggggccgttttataggatttgggtaggtaaaggaaaattacagtcaaaggggggttgttctctggcaggcagagtgggggtcacaaggtgctcagtaggggagcttttgagccaggatgagccaggagaaggaatttcacaagacaatgtcatcagttaaggcaggaaccggccatctggatgtgtttgtgcaggtcacaggggatatgatggcttagcttcggctcagaggcctgacacctcttttattgcccatcttcttttattgccctctatcttcttccaccattcttacatgactgcagagtgtcctgctccagcacagccctgtgcaactttacttttttttttttcagcctcattgaagtataattggtatacaaaaaactgcacataattaatatatacaatttggtgagtttggaaataagtatacactcatgttaccattcccacaatcaagggaataaacatgttcatcacttccaagtttctgtgtatccctttgttttcattttatttttatttttatttatatattatttatttattttgagacagggtctcactctgtcgcccaggctggagtgcagtggtgcaatctcggctcacttcaacctctacctcccgggttcaagtgattctcccacctcaacttcccaagtagctggtactacaggtgcccacaagcacgcccagctaatttttgtatttagttgagaaggggttttgccatgttgaccaagctgttctggaactcctgacctcaggtgatccacctgcccaggcctttcaaagtgctgggattataggcctgagccaccgcacccagcctcgtttttttttttgttttgttttgttttttttgagacggagttttgctcgttgcccaggctggagtgcaatggtgcaatctcgactcactgcaacctctgcctcccgggttcaagcaattctccgcctcagcctccccagtagttgcgattacaggcatgtgccatcatgcctggctaattttatatttttagtagaaatggggtttctccacgttggtcaggctggtctcaaattcctgacctcaggtgatccgctgcccgcctcggcctcctaaagtgctgggattacaggcataagccaccgtgcctggcctgtttttatttttattttgttttgttttgtttttggttttcatgtagcaagaacatttaatgtgagatgtaccctctttacacatgtttaagtgcacagtgccttattgttactataggcacaatgttataccagagtagacttgaaaagctcatcttgctcattattgtagtcccagtacaaagcaggtgctcagtaaaaatgtattgaatgaatgatcgggtttggaggggaaatggtgagttcactttgggaaatgtgaactccctgaagcagatgtccaagaggtagcagaatggacaatcaaggagacatctgagagtcacaggtgattgaaatcagggaagagatgagatccccagagcaagggaaagagaaggctgaaaggcagagggtgagctgcttgattgatgaagccagaggtcaggtggagccgcactcctccttggctttctagaggctctttgcatctggtccttgggttccatgagataccctggtatccttgtgataaaatcctctttaggcttaatctagctcagggtggctcctgttaatttgccatggcaagtctcacgtgataaaccatccccattattcacccagtcacccatgatggtcccctgggtgtccattcagtcaatcattcgtcaaacattcacatagttgccaactaatgctgggtgagataggggtccatcctagattctccttcccttcaacatccacaccccctgccctggctcaggtttgccccttcctcctcgctgatctccccgcctccacagtcagccccaatatcctgcctgcccagggagagcaatgtttctaaagcgcgactctggtcatgttccttacatgcttaaaagccctctgtgccaaaactgactggaagaaatatctcaaaatatagagtaaaaatgcagagatgaaaatcatgagggaagagatacaaacacatctagaaaaaaaaaacaaaacaaacaaacaaaacatccctccataccctaaggacagaggccagcgtccttatcctggccctctgcaccctctgcaggctcgcacctgccactcctgcttggcttctgtagtgcagaacaacgtcgcaggtgcggctccgtggttaccctccctgtggctctgcacacatcgcccctctccttgggacacccttctcctggatacctactcttcaaggcttaacccgagggccacctcctccaggaagccctctgactcctctgggctctggtatcaccctgtgctgtcctctgtcactgtccttatcacactgtgctgcccttatatgtgcctggctcctcttctggccagtgagttccttgagggcagggaccatgtatgccaaggccagggactggggaggccccagcatgtttgctgagagtctgaggaactttctcagcgcagctaacagtgtagaccactgcagagcaggtgggtggctggccttggtgaccagtgtcaggggagatgtggtgggaaccggagggatggggtgggcatgggcccaaggagctggggatgctgagcaattccttttctagcccaagggagctgcgcttctgtcctccctctcatcctgctcggagcaattctgtcatcagtttctcatccaggcccttgctgaacataccctcctgggaatgtgaccccaaatctccccacaggaatcccaaacttcccatggctcccaaccttcctaggtatcccaaacttcatcaaagtttcctggaaactttttctcatgactcctaaaattccaccgttcatctcccaaatttcacctcaaaaccacttttcctgcccagcacccaggaggagagtggtgcactccttacctaggccttgtcctgggtggggaagctgctgctgatctccaccatggccaccaggagaggggaggacaagtttctttttgatattgttagtccccaccccttgaacctcccccacacagctgctcagaaacgtgacacgcccccatctatttctggatgtctcctcagggctcaggaacaccagcctctgcccagtctgacctgcccagtgttcttctaagggaggaaaccatacctcatattgtcttatgtccgatttctgcctccaaagtaaacactaaaaggcagaaatgaaatccacaagcagacagccagacagcccagcgccacaccctgggcctggcagttaaagattgacccctgacctaatcggttatttgtataaaaaagcactgtgaagatccctgtcctgttctgttcccttctaattaccggtgtatgcatcccccagtcacgtacccgctgcttgctcaatcgatcacgacgctctcacgcggacccccttagagttgtgagcccttaaaagggataggaattgctcactcagggagctcagctcttgagacaggagtcttgccgatgctcccagctgaataaaccccttccttctttaactcagcatctgaggggttttgtctgaggctcttcctgctacatttcccacaaaaaagggaatccctgaagccagagaggaggtggactgaagcactggggatccaggctgggacaactgcctcctcactggctgtggtcctgtactctggtcagccaaggaggaggaagagaggaggaagcttcagcaccccgacctcagagagcgtctccttagattttgtacctttcacacaaacactgagacttagctaaggtgccaggagagattcgaactaaggaggctgtattctgagtcccagttccagctctgacttaccagtgatcttgcaggacttcttaatgctatacttaggatccctgcccaatgactagtttttttttttagatggagtctcgctctgtcaccaggctggagtgcagtggcgcaatcttggctcactgtaacctctgcctctcgggttcaagcgattctcctgcctcagcctcctgaatagctgggactacaggcgcctgccaccacgcccagctaatttttgtatttttagtagagatggggtttcaccatgttggccaggatggtctcgatctcttgacctcgtgatccgcctgcctcggcctcccaaagtgctgggattacaggtgtgagccaccgcacccggcccccaatgactagatttgaatccatctcttggggccttattttgggttccaggtcctgggatgggagaagcaatcccccaaagccagagggtggagagggacaaagcagtgattccaatacatctggtctcgggtcatcccagcaggccaagctgtcctcaggtggtatcttttcaagcaactgcaaacactcaacttcctccagagagtggggcaggcaggatatataggcaaatgctgtttttcaccatgatgggaaacggtaggatgattccttattttagaatctgggagggctttgggatggctagactcatagaagggggcaaaagaacttgtcctggagctgtttttctttctttcttttttcttttttttttttttttgagatggagtttcgcccttttgcccaggctggagtgcagtggctccatctcagctcactgcaatctccaccttccggtttcaggcgattctcctgcctcagccacccaagtagctgggattacaggcccctgccaccacgcccggctaatctttgttggccaggctggtcccgaactcctgacctcgtgatcctcccacttcagcctcccaaagtgctgggattacaggcgggagccactgcgccctgccctggagctgtttttctaacaagcactcagaagcacctccctccccaccctcctccaagcctggacccaccgtatgtcttcccgtttggtctacagaaaggattctgggagatagcaggattctaggtggaggaaactttttatttggctgacactctgaggggatggggggacagggatggggaaaattaatgagccagaccaggatggattcctttgggtagctctaatctttcgtgcccacctcagccccagcaggcagcatttctcaaatcctagctttcagaaccctcagaaatcctagctttcagcgaccctccggccgctgggggaaggaggggtgacaaccccacctcctcctggctctggctgctaggaagctcttccctgagttaccaattcctccgctggccccttctcccatgacctcwgacggggcatccaaaactcagagccaggttatttatagataagcccagaggaggtgggggaaaggccagtgtttacaaacatgggtcacctgagtctgagcggccacgagagcggtctgggggaggggcgagactggaccctgtggatctgcgaccaagggctctgtctctggcccaaccccactgaaggcgaatggggagagggcccagagcaggcagggagtgggcgctgctcagatgctggagcacgtggcccagggtgtgggccaaatgcaaactgtatgcaaatcgcagtgctccgggggcgacctctcggccggcgggacccccgcggggcccctggcctggtgggccggggaccaggggccgaccgggtcagggcccgcctgagggagaggccgagtctcacaagtttcctccccatcactcacagccaaagagggtcccgcagaaagaccccgcaggccttgagaaagggaattgctcctcagtccctgccctggcgcgcccgctcccggccccgcgtgcggcgctgggaaaggggtgtcgggttaccagcgcgggggctacagttagcctcgagaacctttgctttcagccggactccggactcctccggggacagcgcagcgcccgccagagccctcggcgctccctcccgctggcggcytccgcagccttcragtgggtcctccgcccccggccctcccctctcaggcggagccaaactgcggccccgcctttacagtctcggaaaggtccccagactggaggctctgaggaaggggtgtggggagtcgggggcggagacttggggcrgggggcgggcaataaactcccaggccccgcccacgccccgccggggccctaatcctggacccgggatcccgcgcgcctggagacagggtccagatctgcctcgagcccctcgaaaccaggactccagcacctctggtcccgccctcacccggacccctggccctcacgtctcctccagggatggcgctggcggctttgatgatcgccctcggcagcctcggcctccacacctggcaggtaactccaggaaccatctcctagycccaagggggacattaagggacagaccctgaggaagtggacccggggctgactcctcacatccctctcccagggactcttccctaggattccactcttaactctcttcctctcaggaacctccatctctgcagggagccccaagttcccattctgtctcctagaacccccatctccatccctctctggatgcctccaacgttctcctccccacctctcatctcccagcgcaggcacagcccggcaaagcctccttgggttacctgtgtgctgcagtcctggcagcccgtcccaaccaaggcttggcctccccaccacccctaccccaaatgtgggtacagagcaggggaggactcaggcgtctcagagctcacagtgatttggtgtggtggctgagcacctacctgcaagggcttcctgctggatgagagggaaagagagcccgaggagaatggggctgggggttaggcagctggacactggctgtgtgtaatatttgcacatcacctgcctgccagatcttacagccrgaaaagygcttgatagtcatctagtcccacctcccaccgactgcaagaacctttctaatgacaggatgaccccttttaggttgtacagaagtaatgctctttatgctgtcttcataataactgtgaggttggaagtatcctcaagtccagaaaagttatgacacttgcccaaggcctcasagctaataggtggtaaagtcaagatttcagcctgcgcgcggtggctcactcctgtaatcccagcactttgggaggctgaggctggtggatcacttgaggtcaggagttcgagaccagcctgaccaacatggtgaaaccctgtctctactaaaaatacaaaaaattagctgggcgtggtattgcgcacctgtaatcctagctacttgggaggctgagagaggagaattgcttgaacccgggaggcagaggttgcagtgagccaagatcgtgccattgtactccggcctgggcaacagagcgagacttcgtctcaaagaaacaaacacaaaaacaaattagccaggcatggtggcatgcacaggtaatcccagttagttgggaggctgaggtgggagaatcactccaacctgggaggtggcgcttgcagtcagccgagatctcaccactgcgctccagcctgggcaacagagcaagactccatcaaaaaaaaaaaaaaaaagatttcagtccatgtctgactgactccagtgcctgtgttatttaagcctcttattgggcccttgccaaattgcatatacctgatatttagggatagaaatgagattctgtgtttctggatgggtttgcccccaggacccatgtccagtgctctgaacttatgctcttttcggtgtggcayctcttttgctccacaggcccaggctgttcccaccatcctgcccctgggcctggctccagacacctttgacgatacctatgtgggttgtgcagaggagatggaggagaaggcagcccccctgctaaaggaggaaatggcccaccatgccctgctgcgggaatcctgggaggcagcccaggagacctgggaggacaagcgtcgagggcttaccttgccccctggcttcaaagcccagaatggaatagccattatggtctacaccaactcatcgaacaccttgtactgggagttgaatcaggccrtgcggacgggcggaggctcccgggagctctacatgaggcactttcccttcaaggccctgcatttctacctgatccgggccctgcagctgctgcgaggcagtgggggctgcagcaggggacctgggraggtggtgttccgaggtgtgggcagccttcgctttgaacccaagaggctgggrgactctgtccgcttgggccagtttgcctccagctccctggataaggcagtggcccacagatttggtaatgccaccctcttctctctarcaacttgctttggggcccctatacaggccttctctgtctttcccaaggagcgcgaggtgctgattcccccccatgaagtctttttggttaccagattctctcaggatggagcccagagcttggtgactctctggagcyataatcagacctgtagccattttaactgcgcctatctgggtggtaagctgtgcatgggggaagcaggactggcagtgtgggtgaaataagccaggatgtccttacacaataatccccggggccttcgggagacccacttggttaaaggggaaatgagggctggaagtcagctggagttgctgtcctctgtgactcaggttttttggggtcctataagtgttttctagattcgtgaacattcttagatgattctatatgtcctcaaaaggrtccatctgctacatggtctaatagaccaaaagaacctggttaaggagattagcaagcagcagaaagagccaaggggactgcttcaggtctcaggggggccctgggctcgatggggctgacagggcacgtatgtgccattcccaagtgctaaggcagggagagatggaagagtgactgggtcttgggtgggaagagggatggaaaggcaatctggaaagagttcctggaggayggaggaggaagggaaatcagaagtttccctttaggtgaagggaaagatagattgagaagggaaatggccctgccagggcctggtgggccaggcagtttgggtgcgagtctgtccacrcggaggcctcaccctgctgtctgttgcaggggagaagaggcggggctgtgtgtctgcgccaggtgagttgcccttccatcctccttcagctgctttgactccccctcaccctgctgaccccttcctcctcttttcccttcagcaggggtgcagctagggtcacaatctgagggrgcctcctctctgcccccmtggaagactctgctcttggcccctggagagttccagctctcaggggttgggccctgaaagtccaacatctgccacttaggagccctgggaacgggtgaccttcatatgamgaagaggcacctccagcagccttgagaagcaagaacatggttccggacccagccctagcagccttctccccaaccaggatgttggcctggggaggccacagcagggctgagggaactctgctatgtgatggggacttcctgggacaagcaaggaaagtactgaggcagccacttgattgaacggtgttgcaatgtggagacatggagttttattgaggtagctaygtgattaaatggtattgcagtgtggagacatggaattttatgattggtttattccatgagactagaccttctgccccgctgtggccttgctgggctgagggactgactgagggactaaaaaaaaaacttggggccaggagcaggtggctcacgcctgtaatcccagcactttgggaggctgaggtgggtggatcacgaggtcaggagatcgagaccagtctggctaacacggtgaaaccccgtctttactaaaaatacaaaaaaattagccgagcgtggtggcgggcacctgtagtcccagctacttgggaggctgaggcaggagaatgatgtgaacccgggaggcggagcttgcaatgagccgagatcgcgccactgcactccagcctgggcgacagagcaagactccgtctcaaaaataacaataataataacttcttgttattattaacacggtctcctgtgcagacctgtgtaacactctaacttgcaaatccagaagctagaacagctagagggtcctcacgacaaccatgaaggcaggaaagcaggcaggtgattcctcagccccacttgtcaggtgaggaatgcaaagccaaggaaggaagcaactggtcagagggttcccattgaaccccggcctcccgcctccccggtctcctgcctcctggtccagaactctgtccataaaagatctgaggaaactcaaagtaggatcccaagcccaagatacttgggaacacagagcaagtcatttctctctgccctgctcccacaagggtccatttcaggggaaagaagagggaggacctcaaaacatcaagagacagagattctcacacagcctggaggcctctcacatccagagcagaaactttattgaagcaagaaaagcagcacaggctcctcccaaggggccccccaccctcaccctcctaggctaccacgctcagcaacagaagaagggactcttccactgtatcaggacctcctctcagtccccgaatcctccccctggggcaggtccccagccccctctgcttcctgctccctatgaactagcacatgagctggggagcaggggccagactctccggaagccagagtcctcacccctccagtgtcctgaagcccggttcctgatgattcctgggtcctcasaatcccaggccctgtcagctctggggtctcagggatgggaggccccaggttctggaagctgttgtgcacttgagtgatgtagtgactgaggacgctggcaccgtcgggaggccagggcgtccctccctctgccagagttcaccgcacaccggctacctcgctttgcagtcgagatatggtcttggtcagctctgtgagtctgttgcccagatctggaggaggtggagtaccaaggggcctttcagaggatgagcctgccctataccccttttaccctttacagtaccccaggggttgccctatccaggattcctgagggagaactggaagaagtgaggaacgggtttgtgggctaggggtcaggtgggtgggtgaagctggggcaggtgaatctgatcgggggtgggagggagtagctgaggagctggaaagaaggaaagtctgggggccagagaaagatgacaagccacggggaaagcttactggactgcgtagacatttgtgcgttcacctgcctgccctctcccgagtctacggccagccagctcaccccatccttcagggcccagttcagatcccaccccctttgtcccttctgctactctatccttctgccttctcatgagcctctcaaaatgacgtgctccttctcccttcaggcgcccatggcaattcgcgtctctcttagctgcacttcatgcccgctgtgatggtttctcttcctcaccagactgaaagcttcccgtgtgtccctgccctacagtgccccgtctctccctccaagacagggcctggaacaaaggaggccatagtgatgaatgttggtggaacgagtcaataagcgagtgaatgaaaaaggtgaatgagtgactgggtaagggagtgaatgggagaataactgaacacacctgaaggcaggaatgagcacttacatgaaatgagtgggacaaatgcccggatgggtcagagggtaatggagtgcaaggggcatgctgtgcaggttacccttccaagggcagggcaggatgggaccacatattatgcaggctgaatgaggacatgacgctgggtatggagcctttatcccagctgaacaaggaacaggaatggggagggcttggaggtgggtgacaaacctttccgccgggtctcctcgaattctcgccrggcagtctctrtgtagcgctgtaccagggccttgatgacgtgaaggcggtaggatccacgctctccctccccaggcacagcccctgccctgggattggcctggaatgggaagacaagagggtgagggagattctctacctccagccttcctctgatcactgcccatttccccccacccccaggcaaaaaagtctgtgtagacttttctgtccctgacccacctagcccctggcctccatctcacagtgcggacctggaaggtagaaggacaggggccagaagctgggaaagggctgacggtgagaggaccaggaaggggtgggcgagggctgggaggctgatggtgtggagggggagaaccccctacagacctggcagtacctgaattaggaaggcaccctcatgccaggccagactgggctggggagctccttggatgtccggcctcttggcttcctctcttaggccaytgtcagccatttaactgcccagtttgtgggacatttacctttggcttcttaacatgtttttttaaaaaatgttcaactacgtcttggaccagtttaggacaaaaaggtctgtctggagcttagtgggtatttctagcttgggaggagggtggtaaggacttctgtttaggctgcatgacacagggttggaaattcaggaaatggccagagcctggaagagggaaagggaagccacgtgagagagtaggattgggacaggctttctgggggaacatactggaaagatagataagcccggggtatgcagacaaatggatggtatagacaatacaagtgaagccttacgccagggcgaccagcaacaagccgaggaggtactcacaaaagtagggatcgggggatagtctggcttcttggttttgcagcaggaacagcaacagcaaakgaactggcaaattctcctgagagatttcagtggtgggaagaggtcggttagaggacagggaaatgggggcaggggctggggatttagggggtgggagtgggagctctgaggtcatcacctgagaaggtagaagacagccttcgaggagggcaggatgttgaagggcacaggcagtgtcaggccctctcagaagtagaacagatacagcttggagcgagcaaacgtccactccacgtcagcatcatcctgggagccaggcagcagggggtggtgcaaggaccccttgcatatggccctcctgcccactcaaactgtctctcttttctccgctcctcacatctttgattctccagtgtgcctataatcctagccagcctctttcttctccccagacttatctcccacctcccctatcacccgcatttctcctgcctgtcccccgtttcctctctccccaccattgtctttcatctttctgacatccagttcctgcccagcctattctccagcctgcagaccctaacccatccatttccttccctctccctctcatgttcccgtttacttctctacaacacactcctctgcccaaccctaagggggaatgagcactagacttggtgtctgaagatactaatagcatcactaagaccctcattttacagaggaaaacttgtccaaagccacaaacaagacaacagtggaggcagagcatggcgccacatgtcttgcctctttgcaccctattcctctccattcctttttcccttcttggccctggcctaaactggcctctgtttacatacctcaatcttctggaaggagttggtgatcatagcaatgagcatgttgagcagcacaatgaccatgatgatggtaaagatgccatagagggcccggcctgcaaactcgggcaccagaaactgaggcacgtccaccacgctgtgctcttccataccgaacatggtccagaacagaaactgaaacgtctcattgaaactggcatgccaggccaagtaaggaacaggaaatgaggggtgggagaaaagcctgagctcacccagacacactctttcccaccccccaggacctggccaagagtgcccacttccatgcagccctttggaccaccttggccagtgcagacacttgtgctgtttctgagctccggatcttattctttcagtcaaccggtatttactgagcgcacagtcgtgtcacaggtgctaaggatacatcagtggacaagacaagcacgttcctgtcttcatggccttatgttctggggtgcggggggcggggtgaaatggatactacttataccaacaatttaaatttgtagctgggtgtggtggctcacgcctataatcctagcactttgggaggccgcagtgggcagatcgcttgagcccaagagttggagaccaacctaggcaacatagtgagacgccgtctcaatttaatttacaaaatatttaaaattaaaaaattaaaattgtgacaagtgctgtgaaggagcagcccaggatgttatgacctagtctggggctggggaaagcttctttgagaagcattcaagctgagctctgaaggatgtgtgggattccacatgtcaaagggaaggagaagtgtgaaaaagggtattccccaaggcagacgagctctgggcatctgagaaactgagagaagtccggcacggctggtctcagaaggcagaggagagagatgcttgtgagaggtagttagggaccagccacctcatgcaagagcttgtaggagaaaaacaaaaatccttaccatggtctatgagcaataggaagctgtgaagagttctaagcagagggktgacgctgatttacattggaaaagatcatgttggctgctgtgagtagaatggaagggaagtaagtgagacagcagaggtgcagagaccaggtaagaaattgttgtcatgggccgggcatggtggctcacgcctgtaatcccagcaccttgggaggctgaggtgagccagtcacctaaggttgggcgttcaagaccagccaggccaacatgacgaaaccccatttctactaaaaaatgcaaaaattaaccaggtgtggtggtgggtgtctgtaatcccagctacttgggaggttgaggcaggagaatcgcttgaaccgggaaggtggaggttgcagtgagctgagatcacgccactgctctccagcttgggtgacagagccagactccatcttgaaagaaactgttctcatgggctaggtgagacaggttgggggtttggagcaccctggtagcagctccagtgctacctctttcaggcagtccttcccttccctacctccagcagaaagttcgccagtcacagacctgaccacattttccttcctcttgtatttatttgtgaatccgtctcattccctccgtctcagcaccagttcaggtatagattctcacagctttgcactggtctgtgggctctgtctctcttattattctgtcctccacagtgcatccagggtgctccttctaaatgtgaacctgacctaatctgttgtactttggcttgtcaacctttaaatgctcctaactaccctcagtccagacgtctaccatacaacctacgtaagaattttagcaaaattatttttgatgcactggtcatggtggctcacacctgtattctcagcactttcgaaggcagaagcaggaggatcacttgaggccaggagttagagaccttgtctctacataaaataaaaaaaattagccaggtgtggtggcacac

SEQ ID NO: 93318 - DNA, 12742 bp, Homo sapiens
aaagctacagtaaccaaaacagcatggtactggtaccaaaacagagatatagatcaatggaacagaacagagccctcagaaataacgccgcatatctacaactatctgatctttgacaaacctgagaaaaacaagcaatggggaaaggattccctatttaataaatggtgctgggaaaactggctagccatatgtagaaagctgaaactggatcccttccttacaccttatacaaaaattaattcaacatggattaaagacttaaacgttagacctaaaatcataaaaaccctagaagaaaacctaggcattaccattcaggacataggcatgggcaaggacttcatgtctaaaacaccaaaagcaatggcaacaaaagccaaaattgacaaatgggatctaattaaactaaagagcttctgcacagcaaaagaaactaccatcagagtgaacaggcaactgacaaaatgggagaaaattttcacaacctactcatctgacaaagggctaatatccagaatctacaatgaactcaaacaaatttacaagaaaaaaacaaacaaccccatcaaaaagtgggcaaaggacatgaacagacacttctcaaaagaagacatttatgcagccaaaagacacatgaaaaaatgctcaccatcactggccatcagagaaatgcaaatcaaaaccacaatgagataccatctcacaccagttagaatggcaatcattaaaaagtcaggaaacaacaggtgctggagaggatgtggagaaataggaacactcttacactgttggtgggactataaactagttcaaccattgtggaagtcagtgtggcgattcctcaaggatctagaactagaaataccatttgacccagccatcccattactgggtataacccaaaggactataaatcatgctgctataaagacacatgcacacgtatgtttattgcggcattattcacaacagcaaagacttggaaccaacccaaatgtccaacaatgatagactggactaagaaaatgtggcacatatacaccatggaatactatgcagccataaaaaatgatgagttcgtgtcctttgtagggacatggatgaaattggaaatcatcattctcagtaaactatcgcaagaacaaaaaaccaaacaccacatattctcactcataggtgggaattgaacaatgagaacacatggacacaggaaggggaacatcacactctggggactgttgtggggtgggcgtggcggggggagggatagctttaggagatatacctaatgctaaatgacgagttaatgggtgcagcacaccagcatggcacaggtatacatatgtaactaacctgcacattgtacacatgtaccctaaaacttaaagtataataataataaaataaaaaaataaaaacaaacaaacaaacaaaaagcactgtacaaatatataaaggtactgctattccacagttacccagaatagacaggacccaaaagtagtagagaatacctggactactaaaattacatcatcttctccatcgcaataagcttggaggaagagaagagaaatagaccagtattccaagaggccagctttcagtcaatccaatgaagaggcagcagaggaaagaagagcctttatcaggtagcatttccagcaactcaccagagctggctttatggaactcaagccagatttggttgccacaagatacaaagtaacttgacagctgccctcctggaaacaattaacttagtagtttttactttgacagaatcttgggcctgaaagaaatattttgaaatcactctagacaaaacctctactttattgacaataacaggccctaagagagcctacatttgtccccacttgagcaggatatgggagaaaaacagattagacagtgataattataatggttaacacttaatgagagcttattatgtgtcaagctggctgctaattattcaacatagattatctcatcttaatcttcgcacagctctatgagattgattttataataatttccatgttatagatgaggaagcaggctcagagacattaagtaacttccccaaagcactatagctagcatatagtactatagtgatgagacccaggcaagctgaccccaaggacccatgctctttatcgctagagaagctaaggtaccaacttttctggaaagccttctctgacaatttcccccaccaccaattatttggggggctccctaaactcccactgccccatgtctctatctatccctatgcaccattgtctctgccatagcagtatcaccaaattacgtattccatgagggaagaaattactaaatcttatgcttccttgcatcccttgtgacactacctagtgttgcatcggcagctcaatcaagatgtttcagaataaacaactatcgaggaatatagtataatgatgaaaagacatgggttctgaagtcaaatagacttagatctgaatccaggctcagccacttagctctatgatcgtgagtaagtcaactactctgaagctcagcttccctaacattaaaatagagattaaaaaataaattaccacaaaatgtgagaaaactaaactaagcaccttacccattgcctagtacataaaataactgtatttaccattctcctttccccttgtcccacatataatggtagagagagagcactattccggccaggtgcagtggctcacgcctgtaatcccagcactttggaaggccgaggtgggcggatcacgagatcaggagatcaagaccgtcctggctaacatggtgaaaccccgtctctactaaaaatacaaaaaattagccgggtgtggtggtgggcgcctgtagtcccaggtactcgggaggctgaggcaggagaatggcgtgaacccgggaggcggagcttgcagtgagccgagatcgcgccactacactccagcctgggcaacagagcaagactccatctcaaaaaaaaagaaagaagaaagaaagaaagaaagaaaagaaagaaaagaaaagaaagagagagagagagaaagaaagaaagagaaagaaagaaagaaaagaaagaaggaaggaaagaaaggaaggaaggaaggaaggaaggaaggaaggaaggaaggaaggaaggaaggaaggaaggaagaaagaaaaagaaagaaagaaagaaagaaagaaagaaagaaagaaagaaagaaagaaagaaggaaggaaggaaagaaagaaagaaagaaagaaagaaagaaagaaagaaagaaagaaagaaagaaagaaagaaagagagagaaagaaagaacactattcccggaacccagagccgaattagctatataaacttggttaagtgcatctcctttctgggctttaatctcttcatttacaactcacaggaccgttggtttgaaactaaataaaatgtgggtaagtgaccaaaaagtgctacacagatggaaggaatttttgtcattccacctatccggcttttaaaatcagccctgaaccacactgcatagaaatgtcttgaagctcaaggaagaagaccaatctcttggaggtttaaaagctataaagggaaggagtatttgcactgtcactaggagaaggagccagtccyaccawgaagctgagacactgccaagtggctttgctccaggagtccctaagtaattaaggccttgctcccctgccctgtttgcctgtgacctccacaaaggctagagaacaccaagtgctccacagcagctcttctcttggccagagtgacaaatgtattgctggccaaggatcagccaaagctattgctaagaggttcctgcccttggccttccttagaacagggtcggccgggcgcggtggctcacgcctgtaatcccagcactttgggaggccgaagcgggtggatcacctgaggtcaggagtttgagaccagcctggccaacatggcaaaaccctgtctctactaaaaaaaaaaaaaaaaaaaaaaattagccaggcgtggtggcacatgcctgtaatgccagatacttgggaggctgaggcaggagaattgcttgaacccggaaggcggaggttgcagtgagctgagactgtgccactgtactccagcctgggcaacaaatcgagaccctgtctcaaaaaaaagaaaagaaaaaagaacacggttaaaaacaagatacccttcattctttgtcctgaggttatcagctcatgattcctaggaatcagccctaaacacagctaccaggaccctgggtctggaacatgtcggatgtgactcaactaaagcctgaccagccaggccctttggacaactgaaagagaacctgtaggctatggaataaggggtaaggaaaagggacccatgctctgctaagagcgtctagtcttagatgctcccaaggtcacttttgggctcttgttcaggctgcacaggccccagggacttaaccacttcctttgctcatcaaagcagaaccccccactccaccccttgggactcccgcccccaagcctgaagcctggctctagggtaagacagtccaccaatctctcccttcaaaagtgaaaacatacggggccctttttgttgtaagagtttaactgttgggttgagaaagaatgtaagccaaaaacaacaaatatgaggaagtaaaaaaaagtttaaaacatattacaagttagtcacagtcactgtccccacttcatagttcctggttcctgtcataattggtgctgttagagaacagctacaatactatagtttccaagacttatttttaaacaatggaaccctctttttcaaatatagttcaaattggcctggcgtggtggctcacacctctagtcccaacatttcgggaggtgggcagatcgcttgagctccggagttcaagaccatcctaggcaacatggcaaaaccccatctctacaaaaaatacaaaagttagctaggcatggtggtacgtgcctgtagtcccagaagagactgaaggtttagatcaatcaacatgatgtagaccttatttggatattgatattgaccccatctctacaaaaaataaaaatattagccaggcatggtggcacatgcctgtaatcccagctacttgggaggctgaggcaggagaatcacttgaacccgggaggcagaggttgcagtgagctgcgattgcgccactgcactccagcctgggtgactgggctacagagcgagactctgtctcaaaaaaaaaaaaaaatgttgacccagattttaaccaaccatatacaattatcaaccatatacaaataatattgctaatgagcaagaaagtggaagtaaacatgtagatattcatgcaccaggctctgctaccagttggttattttggctgtgtacttgtgtccaaggtcattcactcactgggtaggtttatgtcctatgatgccatcaactgccagtcaaagaactaatcggcatgagcaaactagtgttcacacaaaacttgtataattgaaaccaaaatcaaagacacttttattgtaggtaaatgtacaatttccattaggcttgttaaaatactgaaagcaatttaaattcatttattcattcaaaaacaaatatttactgagcatccctgtccatctatgctggctaggcaccaaggacaaaataaataacacataatagccttaggggattcatacaaacatccctctatattgttttcatggatcccaaatattctgaagaccttgcaccaacaaaattgggagagtactggaagggatgacatttttattcccttatgaacacaaacaacttatcaaaaggcagcctgttccacaaagaacctctcaacattatagccctagcattttgggaggacgaagtgggtggattgcttgagctcaggagttcaagaccagcctgggcaacatggcaaaaccccatctctattaaaaataaaacataaaagtctttgcagatgctgctgctgccgggagccccgtactatcagccgtggttaaccccaccgtgttcttcgacattgctgtcaacagcgagcccttgggccatgtctccttcaagctatttgcagacaagkttccaaagacagcagaaaactttcgtgctctgagcactggagagaaaggatttggttataagggttcctgctttcacagaattattccagggtttatgtgtcagggtggtgacttcacacaccataatggcactagcagcaagtccatctacggggagaaatttgatgatgmgaacttcatcctaaagcatacaggtcctggcatcttgtccatggcaaatgctggacccaacacaaacagttcccagtttttcatctgcactgccaagactgagtggttggatggcaagcatgyggtctttggcaaggygaaagaaggcatgaatattgtggaggccatagagcactttgggtccaggaatggcaagamcagcaagaagatcaccactgctgactgtggacaactcttaataagtttgacttgtgttttatcttagccaccagaccattccttctgtaggtcaggagagcacccctccaccccatttgctcgcagtatccttgaatctttgtgctcttgctgcagttccctttgggctccatgttttctctgttttcttccatgactagctggattgcagagttaagtttatgattatgaaataaacactaaataacaaaaataaataaataaaacataaaaaataaataaaaacaaagtacagccctaccatggagatacaagctgccccactgctagaaaatcaagaagagatttctgaaatcaaggtctttgtctacaattcaacaaacatttaccaaatttctattttgtccttagacactctgctagacaagggatcagcaaactgaggccctcaggccaaatctagcccaaacaccttgtttttgtaaacaaagttttcttagacacagctacacatgtccatttaaatattatctatggctgttttcctgctacaacttgcggtatagcccatcaagcctaaaatattcactctctggccctccacagaaaatgtttgctcatctctatgctacactctagaaagatgcagaaatgtatcttgatctaggtggtggttacatagataaacacattggtaaaaattcatcaagcatttaattcattttattgtatgtaagccataactcaatacttctttttttaatgaaatgaagagtaacagcccctgccttctggcaatttaaaatctggtaggaggatatcaaagtaaataattaaaatacaatagtgagcctgcacagtggctcacacctgtaatcctagcactttgggtggctgaggtgagaagatcgcctgaagtcaggagtttgagaccagcctggccaacatgttgaaaccctgtctccactaaaaattagccggatatggtggcatgtgcctgtagtagtcccagttactgaggaggctgaggcaggagaatcacttgaacccaggaggcagaggttgcagtgagccgagatcgtgccactgcactccagcctgggcaacacagcgagactctgtctcaaaaaaaaaacatgaaaaataaaattttttttatttaaaacaataaaaaaaatagagtttggaattagaacatgaaatttctaattaggtttaagtcctacttgcaccaattactagacacatgactttagattcttcatctacaaaatgagaataataacaatatctatgtcattgactgctgtgagaattaaataaatatgtaattgtacctgacatataagtattcaacatacatttcttatcataacaattagcattattattaactgtctaattagtggtggacttcgctgtggctcagagttcctgtgacttcctggtaggtcccatgggaccctaagtcatatcaaagttgattcttttacaagtttagagctcaagctggtattgtacataaacagtatttcatggagctttagacttctggcccaatacctggagaggtgaaagtcctaaggatggggtcctatcccactgctcaaagaatgccttctagaagcaaaatcaggaaagcactacctctagttgacctagctgataatgagataagccatactagaaaatacacttaaatacaatatgcttttctttttttttgcaatagagtcttgctccatcacccaggctggagtgcagtggcgtgatctcggctcactgcaacctccacctcccaggttcaagcgattctcctgcctcagcctcctgagtagctgggattacaggcgtgtgccaccatgcccggccacaatatccttttgagcttaaaacttcagtcaaatcttccataccaggctgagaaaactggttcagtccaagggactggccaggagaagccatgagtctctgtcagtgctactgggtatgtagctctaacaggggtgatacagaaaagttcttaagacttctgaggtaccataaattaccttcagcaatctctgtgacaaacttaaagcctcttggatatccagctctatataaggaccaaaagaggatgatcacagaaatcacagatttggaaaaactagatgaacctccagagatcaccacttggactggcccctgctctcagattgcaaaacacctatcattaggcttgttttacagataatgccactaaggtccagagagggtaagcgtgatggcctaggtcagatatctaagaggcagtaagaaagaaaaaaagaatatctagtctcaaggagtaagcaatcttgatgaaaaagtaacactcatgaaactgtcgaaacacatggtcagggaataagggagatcccaatgaggagctacaggtatggaaagaaggacaagagttgaagtctcagagtaaaagtccctgcccaatgtacctctcacaaagtaaaaaggcccgtctttgcttaatatttactaccctgtaatgcctatttacctgtctccccactcaatagtaattcttccagtttatgtaccttatattatccttatctatattttcagcaccaagcctagaaaactgcatctcctgcaactttgaaaagactcagactagccccactcacccaacaatactaaaaacaaggttaccctgttaggcatctaccaaacctagaggccagaccctcaaaaaagcgcctagatacggctaatagaaagtgactttaacaagtaatttaacctcttattttgtccatctcaaagatatcaataacattaacaatctcagaagaccgtattaaaaattaagtatccacggtgaaactccatctctactaaaaaataaaaataaaaaaattagccagatgtggtggcgtgtgcctgtaatcccagctactctggaggctgaggtaagagaatcgcttggacccaggaggtgaaggttgcagtgagccaaaatcgtgccattgctctccagcctgggcgacaaagcgagactctatctcaaaaaaaaaaaaaaaaattaaatatctgtgaaagcacttaacacagtacttggcacatagtaggcattcaatgactgctagcttccttctcacaccccctgtgtctgggttcctttaaaatatagtttattccttggatcaacatttattaaacaacaaatatttatttgttgggcctcagggataagataatgatcttgccttaggtatctctgataaaacctcagcatctagtatgatgactgctgttgccacagctgcctggcacatagtaagcactcactaaacagggaactcccaagaacactcctggatacagaccactgatgcatcacctctttgtacaggccactccatctgctttgttagccctagaggtgtgcaagcacaaaagagatcaagtctctggacagcagcagatctatacatttacagagctccacccccatagtaaagcctggcagtcaagatgacaagaaaaacacaagaacaattcagatgagtccctcaaaactgcattaaagactacacggcggccgggcatggtggctaacacctgtaatcccagcactttgggaagccgacacgggcggatcacttgaggtcaggagttcaagaccagcctggccaacatggtgaaaccccgtctctactaaaaatacaaaaagtcagctgggtatggtggtgcacacctgtaatcccaggtggtgtgcacctgtaatctccaggcttaggcaggaaaatcccttgaatctgggaggtggaggctgcagtgagcagaaagcacaccactgcacactagcctgggcaacagagggagactctgtctcaaaaattcaaaaaaaaagastatatggcaatgttccaaactatacagcctctctacttaaaacctgggttataatattaaactgaccacccaccctcacatttcctatactgccccctgaaagaaaagggaagtgcttcttcctttcagtgctgcttgttcagaaaagctgatgtcctggaaaatggctgagcacctatcctggcaaataggatctagcaaaagcttgaaccccataaaagcatctcaatcattcaccttgctggcctccaaggctgaaaatagccccaaatgaaaaacaagctatgtgaatacttatctagtttcatagcagagaccttaagctagctgaagaggacaaacccctcactccttaactcaagcagacctaaaagcctcacctgtttctggccccatagcagctggcatagctctggcacctcccaggcttcatctttcaaaaacagaaatggaacaagtgcagaacagggaagagccttctgcagtcagcccagcactgcttgaggggtggtggggagataaaaagattcctggacacagatgtcctattttttttttttttttttgagacagagtctcactctgtcacccaggctggagtgcagtggtgcgatctccactcattgcaacctccgtgcctcccgggttgaagcgattctcctgcctcagcctctcaagtagctgggactacaggtgcatgccaccacgtccggctaattttttgtatttttagtagaggcagggtttcaccatgttagccaggatggtctcaatctcctgacctcgtgatccgcccgtctcggcctcccaaagtgctaggattactggtgtgagccattgcgcctggccacagatgccctattctttcatcaaatctgaaaacgaaatgaaaggccctaaagcagccataccccaaaagtagcattctgtacctccgcttcatcttctggcaataaccttaacaggtttctctaaccaggccctgtctcaatgcctttttaaaggtaggtttacctaatcccaagacagagtcagtaggtcggcactctgatatatcaaatccatctctgtctattacataccttgacccatgccattacagtccattgtttccaggttcacctctcacaatatattaagcacttctagatgtatggcccaggtttcataatgcccatgtttccagttttgcccagtgcaaggccaggctgagaacagatgcttaaaggtttatttgttgcagggcaaaagtgagcaggtacagaaacagggaaggaagtataaggacaagaatgtatcctgctttactctccctagaggccctcacccagtgcatgctgccctctggacctagactcaggctgggtttcccaagcctcctctcttattaccaaactcacagccctctacctcctctgactgtgtacaatactagtccctggacccttttcatcctagatgtttgtttcacctctggatatatttggaaactccttgagtatatggcccgtctctcttctttttttttttctttgagacagagtcttgctctgtcgccaggctggagtgcagtggtgcgatctcggctcactgcaacctccgcctcctgagtgaaaagtgattctactgcctcagcctcctgagtagctaggattacaggcacccgccaccacacctggctaattttttgtattttagtaaagacggggtttcaccatgttatccaggatgatctcgatctcctgacctcgtaatccgcccgcctcggcctcccaaagtgctggaattacaggcatgagccaccgcacccggccaaataagaccttttttttttttttttttttttttgacacagagtctcgctctgtcacccaggctggagtgaggtggcgtgatgtctgctcactgcaagctccacttcccaggttcacgccattctcctgcctcagcctcccgagtagctgggactacaggtgcctgccaccacacccggctaatttcttgtatttttagtagagacagggtttcaccatgttatccagggtggtctcgatctcctgacctcgtgatctgcctgccttggcctcccaaagtgctgggatgacaggcgtgagccaccgcgcccagccaagtctctcttcttatagcacaaaatacaataccagcctcaaggaattataccagtagctatttacagagttaaaaaaaaaatcaacttccctcaagtttttaattgctcatgtgtgaaaaggtgaaaagaatgtctcaccagattgctcctccctcttaggttatccgtctttctctattttatcattgggttcccagtgaattttctataaagaattcaagccaa

SEQ ID NO: 93319 - DNA, 16156 bp, Homo sapiens
cccaacagttcacagctttttgcatgtccctatctgaacatccaaagacccctaaaagaattgtggactggactgagtactccttacgtggacccttttagggaccacgaagcccccgtttctattgggcatcccagttgggctattcccttacccttgctaaaagaaggcgagctcctcttttcccttgatggtgagccagagagcactccatctgatgggcaggccttaatgagtcaggaagtctttcgggcaggtgtgactttgcctggatgtagtaataacctaactgattcctagttagaaaggacagccttagtgactactgctacccaagacacagacctgtgctcctgagggctgccctatggatcaaagcaagctaaatggcggctgctatggctgcccagcaagtccctagactccttagctggagtagttttattattattattattattattattattattattatcgagacagagtctcgcttagtcacccaggctggagtacagtggtgcaatctcggctcactgccacctctgcctcccgggttcgagcgattctgctgcctcagcctcccatgtagctgggattacaggcgtgtaccaccataaataccctgctaatttttgtatttttagtagagatggggtttcactatattggcgaggctggtctgggactcctggcctcaagtgatccgcccacctcagcctcccaaagtgctgggattacaggcgtgagccaccatgcccagcctggagtagttttagataaccgcatagctgtgcactgtttgcttgctgaacaaggggagtgtgtggaatcgccagctcgtcttgctgttcccacagtaatgcatcaactgaagtggacatgtatgttgaaatgacaagacagcaagcctcctggtggcctagactgcttttcaggagtatgtggggttttttggttgttgttttgttttgttttggcagggtctcactctgctgcccaggctggagtagagtgacacaacctcagcttactgcagcctcgacctcctgggttcaagcaatcctcccacctcagcctcccaagtagctgggactacaggcatatgccaccatgcccagctaatttttacattttttggtagagacagtgtcttgccatgttgtccaggctggtctcaaagtcctgggttccagcaatcaacccacctcggcctcctataaagacgtgagccactgcaggaggctgaggcaggagaattgctgacatatccagtttcttagaaaaaaaacatttaatagagacttacaaacagaagctatgtctgggtctcaggtggcagtgagacaagatggtagctttaccccccaagaccaagggccacaggggaggggtgacctcaaagggatgtgtaggacaattgaaatatgataacatcaaagttgttttgtcctaagggcaggatttatgggaagtaggtgctcccgcactagaaacacgacatgaatgggaaatctcagaggccctccgagaactggcattcatcaacctggtagatcaggccccaagatggaattgccttgacacccacaccacctgaaataatctggagtactgttggcagctgatgtgagactttggttcttgtcttcttagcttaaaataatttaaacaagagacacaacagcaaaggagatgcagcatacaataatttttgcaaaagaaaaagaacatcttgaaagtgaagtgcagaataggcagagagaagaattcagggcaggctgctcataaagatgagacagcaaaagttggcactagggaggctccctttatggaaatcttacatgattattcatgaggggttgggaagaggtgttgctagtaagcatgttctggccaaaagctattaaaagaaaaggagtgtcaaaaaatttaggccgtgctgggggtggaggctcacacctgtaatcacagcactttgggaggagaggcttaagcccaggacttccagaccagcctgggcaacatggtgaaaccccatctctaccaaaaatgcaaaaattaaatgggcaaggtggcacacacctgtagtccccactactcgggaggctgaggtggaagaatctcttgggcccaggaggttaaggctgcagtgagccgtgattgccccactgcactccatcctgggctacggagcaagactctgtctcaaaaaacaaagtcaatggttccctttggtggggaaggaagaagtggggtttgaatggggggcagggtacatatggggagatcctggccgtagtcaatttcttgatctgagtggtattactttggcgttcaattctgtaactcttctttaggccatatctttctgttttctgcagttttaatgtttgacatatctcaaaaggaaagaaagaaaaggaaggaacaagcttgccatttgatccagattagatgcaactgttccagctgcgttttccattttcatctcagccagtatttttcaaaatgtgacatgcacgtatttccaaagggcggtactgaaacaggataggtaatcaaggaagtgaccgtgttcttgggatgcagcaagcgtggtgaccgcacagtcaacacaataagcctcagcattcgaattgtaattgagctcattcaagcaaagctatcttcagtggggacttttctttctagagagcatgcgcattttgattttacctatcctcaaactgaccctttgctcattataatagtaaaaagcgcaccccgggtggagatttaagaagctaatgagacctgcgacatacgagccagcatgtacagctactcacgcctgtaatcccagcgctttgggaggccgaggtgggcagatcacttgaggtcaggagttcgagaccagcctggccgacattgtgaaaacccatctccgctaaaactacaaaaatcagccaggcgcagtggcttacgcctgtaatcccaacactgtggaaggccaaggcaggtggatagcctgaggtcaggagttcgagaccagcttggccaacatggtgaaaccccatctccgctaaaaatacaaaatgagtcaggtgtggtagcaggtgcctgtaatcccagctactcgggaggctgaggtgggagaatcccttgaacctgggaggcggagcagtgagcagagatctcaccagtgcactccaacctgggcgacagagcgagattccgtctctaaaacaagtaaataaacaaaaataaaaaaataaaaatacaaaaactagctgggcgtgctggcgggcgcctgtaatcccagctactcaagaggctgaggcaggagaatcgcttgaacctgggaggtggaggttgcagtgagctgagatkgcgccactgcactccagcctgggggacagagtgggactccatctcaaaaaaataaaaataaataaataaattaattaattaattaataaaataaaatagaaacagggtcttgctatgttgctcactatgtggtgaattttttcaggtgctgagcaagactggagaccagacacacaccaatgtcacttgcagtaaacaaaggatatttgtccacattcaaagtctatggtgacaccctggccacatggggatgcttggccaccctgcctcctaccttcatgccagagtcgcctgtcataatgtctggttacagcccttcctctgaggtccagggatttcaaagcagaagcagcaggtcttccccggctggaggaagagccaaagcctccattcctgggattcttggttgctgttacctggggcaaggggaggcccaggctgtggcgtgtattctcagaggattggtcgtcttggtccttctgtttcctgggaaggaagggctggtcctgtagggccccatctagatcccttagcaccctctaccacctgatgcccttggggataccaagctctgtgcagtccagaccatgttccagctcagtgcccaccttacaggcatgcgccaccatgcctggctaattttgtattttttagtagagatggggattatccatgttggtaaggctggtcttgaactcccgacctcaggtgatccacctgtcttggcctcccaaagtggccgggcagggctgaattcgccccctcaccagctactgccaaccacggatgaatggcttctgcctgcctcctgccctccagatcttaccagggcatttcactgggaaatatggcaacagcccttgccactcaggggacagcatggcaggggctgggaacgaatgttgttgccaaacgacaagacccagctgggcccagtggctcacacttgtgatcccagtggtctgagaggctgaggcaggaggatcacttgaagccaggagtttgagagcagcctgggcaacacagtgagactctacaaaacaaaacaaaaaaaattagccaggcatggtggctggtgccaataagcccagctactggggaggctgaggctaaggctgaggcagtgagccatgatcatgccaccgcagtccagcctggtgacaaatgagaccctgcctcaaaaaaaaaaaaaaaaaaaaaaaagaggaaggtgagcgcagtggctcatgtctgtaaatccagacactttgggaggctgaggtggaggttcgagaccagcctgggcaacatagcaaaaccatgtctttacacaaaataaaaaatgagtcaggtgtggtggcacatgccattggtgccagctacgtgagaggctgaggtgggaagattgcttgagcctgggaggtccgaagctgcagggagccgtaactcaggcatcacactccaacctggctgacagaatgggaccctgtctccaaaaccaaaagattccagctcgaaaaataattgtggggtggcggcaaaagctcctgactggccttgactttagagtgaatcaatgaattaattaagggcctgcctgttagtgagtctcctctgaaatttagcccagaaatttcctaactcagcaagatgaagcaggaggtagaaggaactaagggggcaataagcaggaggaaggaatgtccccatgagggtgacatcttccctgagagccccaggacgaccagcaggaagccaggcggggggcaggcaggaggactccagaaagctcggcctgaggggaggcccgtgggggtggtggggagtggtgcggggaaggcagaggctgagcagcaggtgaggtcccctgggttttgggggccaagcctggggctcggggcgagcaagcatgagtggagaaggggctgctgtggttgggctggggtggactccccacctgcgtcgtccaaacattagtgcgagtgcacccacacaaacacatacacaatcacacacaacatgtgagcaatgggcaggactggtccggccccactcagtgctgtcaccattggccccacagctgcccacagccctagagctctgggcccagattcctgccagccccacctgtccaggccaaggtaagatgatggagcaagggggtgccagggcagcaaagccccccacgtgcccctttcccacagggcccaggctcctggcatcaggaggctgaacccaggccctggcccagactgtgtgcttccagcctcccctcctctcgacaccagaacacagcctggccccagcttctgggaaatatagaaaaaaatgggtgaatgatccagtgacagggtgtcttgttccacacaagacacagtgagcaggggttgggggaggggctmctggctgcgggaggcacaccacactcacccaaatggcatctgtactcaataccgcacccttccctgggggacacctggtcccaacctgagctgcctttctcaggaccccagccccagcccggcccagcccagccacaccctgccactcccttcagccagtgtggcttcaggtcaagaggctgggcagggtcaaggtggcaacgaggggagaagccgggacacagttctccctgatttaaacccgggcagcctggagtgcagctcatactccatgcccagaattcctgcctcgccactgtcctgctgccctccagacatgctggggccctgcatgctgctgctgctgctgctgctgggcctgaggctacagctctccctgggcatcatccyaggtaatgaggctccccgagctgcccctacacaacacacacacagggcaccccccagcccaggctgacctgatytttgctctccccctggccagttgaggaggagaacccggacttctggaaccgysaggcagccgaggccctgggtgccgccaagaagctgcagcctgcacagacagccgccaagaacctcatcatcttcctgggygayggtgagtgagccaggccttccagccctgcagccctcacagccccggcgcccggaccctcagtggttccaggagagccctkgggcccaagcctcacacatttctgttccttcagggatgggggtgtctacggtgacagctgccaggatcctaaaagggcagaagaaggacaaactggggcctgagwtacccctggccatggaccgcttcccatatgtggctctgtccaaggtaagtgctgggstaccttagagtcctccaagcacagaaggggaatcctggctatggagtgtggtaggagggagggaccctaaacagctggggctccagtaaggagttagaggcagttggaatcccagaggacagagatcagggtctgggtctccgtgtctgccccagagaagagctcagagtgtctctgtccccagacatacaatgtagacaaacatgtgccagacagtggagccacagccacggcctacctgtgcggggtcaagggcaacttccagaccattggcttgagtgcagccgcccgctttaaccagtgcaacacgacacgcggcaacgaggtcatctccgtgatgaatcgggccaagaaagcaggtgagctggggcccgctgctgggtcacggycaggtcacagaygttggtcacatatactgacctctgacacccttagggaagtcagtgggagtggtaaccaccacacgrgtgcagcaygcctcgccagccggcacctacgcccacacggtgaaccgcaactggtactcggaygccgacgtgcctgcctcsgcccgccaggaggggtgccaggacatcgctacgcagctcatctccaacatggacattgaygtgcgacccccaggccaagggctggggctgggcagagagtagcagggagggggcacyagctcagacccaggcaaccaaaagccttatctgggccagcagggtctggaggtggggttgtgggcgtagaaggygcagcccaggctgggccattcccacagccttggggaggggagtcaggggctgtgcatgaggagggggcacggggccagccaggsccccaaatccacctgccccatcctctgttcccaggtgatcctaggtggaggccgaaagtacatgtttcscatgggraccccagaccctgagtacccagatgactacagccaaggtgggaccaggctggacgggaagaatctggtgcaggaatggctggcgaagcrccaggtgatgggggctggygggtgcagggggcacagcagggggagggcagaggtgtggggctcrgggctgtgggctgaggcctggctctctccctccccacagggtgcccggtaygtgtggaaccgcactgagctcmtgcaggcttccctggacccgtctgtgacccatctcatgggtaatgayccccttcctgccctggcatccctcagatggcctcagatggcaccttctgagcctgtgtgcacatccgccagcaccckcccacccccagcctgccagtcaccacaggaccccttgtcccacaggtctctttgagcctggagacatgaaatacgagatccaccgagactccacactggacccctccctgatggagatgacagaggctgccctgcgcctgctgagcaggaacccccgcggcttcttcctcttcgtggagggtgcgtggtggcccctggggagtgggggttgggggttggagcagggcaggctcagcatctcccccctctggccttcctgcaggtggtcgcatcgaccatggtcatcatgaaagcagggcttaccgggcactgactgagacgatcatgttcgacgacgccattgagagggcgggccagctcaccagcgaggaggacacgctgagcctcgtcactgccgaccactcccacgtcttctccttcggaggctaccccctgcgagggagctccatcttcggtaggcctggggagagtggcaggtgctgctgcagcaattaagtgggtgaaatctgagcctcagtctcctcctctgtcaaatgggagtaatgctggcaccagccctgtagggtctcctgmggactaagcccctgaccaggcaaaacgtggcggtgcctagcacgtgggagacactccacagctgtgttcagctcaaccacagggacccctctctctgcagggctggcccctggcaaggcccgggacaggaaggcctacacggtcctcctatacggaaacggtccaggctatgtgctcaaggacggcgcccggccggatgttaccgagagcgagagcggtgagtgccgcggggtggccccctgagggggaccagggtgccaaggatggggggctggcgggaaggggtcacctcytgtctgcctggaactgaatgaaccctccyacygraactgaaccctccaaccagggagccccgagtatcggcagcagtcagcagtgcccctggacgragagacccacgcaggcgaggacgtggcggtgttcgcgcgcggcccgcaggcgcacctggttcacggcgtgcaggagcagaccttcatagcgcacgtcatggccttcgccgcctgcctggagccctacaccgcctgcgacctggcgccccscgccggcaccaccgacgccgcgcacccggggcsgtccgtggtccccgcgttgcttcctctgctggcmgggaccytgctgctgctggrgacggccactgctccctgagtgtcccgtccctggggctcctgcttccccatcccggagttctcctgctccccacctcctgtcgtcctgcctggcctccagcccgagtcgtcayccccggagtccctayacagaggtcctgccatggaaccttcccctccccgtgcrcyctggggactgagcccwtgacaccamrcctgycccttrkctgctctygractyyytrccccaacyccagggactgsrggttgtgccctgtggctgcctgcacyccaggaaargaggrggctcagrccatccagccmccrccyayagcysagtgkgkaycaggcaggctcyctyccyggggamawgargcacccakaccymgcgmcccsctgatctttgcttcagtcmtkgmakcacctgwgggactygaggactygggatcwtcaggacgcctggagaagsgtggyttcctgccaccctscyrgccaaggaggctsctgkggtggggatcmccagggggmttttgacacagccttckgctgycccccactrrgytaattcyacacccctgtrccccyccagggggcccwctgmstcatggcaaaggcttgccccaartcwcarcywctcagaygttcsayrccccyacakgccaattycagcacccamctgagwtccgaggagcwcctgggaagcyctgggtgcaggayacwggtcgagagccawaggtccctcccyagmcatctggayactgggcatrgatttctcaagaaggaagactcccctkccyycccwgggcctctrctctyctgggaracaaagcaataataaaaggaagtgtttgtaatcccagcactttgggaggccgaggtgggcggatcacgaggtcaggagatggagaccatcctggctaacacggtgaaaccccttatctatgcgcctgtagtcccagctacccaggaggctgaagcaggataatcgcttgaacccgggcggcggagattgcagtgagccgaggtcatgccactgcactgcagcctgggcgacagagcgagattctgcctcaaaaataaacaaataaattttaaaaataaataaataataaaaggaagtgttagacaatgtaatgccagtactacttcctaggaggaaaatcatgagtgcctgtgggcacagtgtctggaggggtggataacgcaggccaggaggggctgctgaggagcagatgattgagcaggagacctaaacagagtggggcttgagcaaggcagaacagcagtgccaaggccctggggcagcgccagcaggtgctctgggaggccaagggctggatcagagggtgggtgggtagaggggtaaatctgagggtcaagagggtgggtagtgttggggagtgtgaagtctgagtagagggatgtggttggaggtctttaaggagtgctgtgacccgccctgggtggaaaataagtattctggctgctgccagaagaagggtcttgtcttttgggtggatggtgggggtggtagagggtagcagggagaggtgagaactggggaaggaactgactccaggtgtttctgatctccgtccgaaagcattcgggagcacccatcccaacacagccatgcttggtgagtaccacacctgccccaaaagaacattgaaaagaattttttttatttgaggcagagcctcactctgttgcccaggctggagtgcaatgaccttgtctcggctcactgcaacctctgcctcccaggttcaagccattatcctgcctcaccctcccaagtagccaggggtcaacaagtgtgcaccaccatgcctggctagtttttgtatttttagtagagacggggtttcaccatattggccaggcaggtctccaactcctgacctcaggtgatccacccgccttggcctcccaaagtttgggattacaggtgtgagccacgtgtctggccgaaaagaattaaaggtgaaatcagccacattttccagcaaagtttacactattacaaaaaatacaaaaattagccaagcctcgtggcccatgcctgtggtcccagctactcaggaggctgtggtgggaggatcacctgaagtgaggagtttgagaccagcccagccaacatggtgaaactaaaactggtctaaactaaaacacggtctctactaaaactacaaaaattagccgggcgtggtggtcggcacctgtaatcccagctacttgggaggctgaggcaggagaattgattgaacctgggaggttgcagtgaattgagatcataccactgcactccagcctgtgcgacagagccactctgtcttaagaaaaaaaaaaaagcaagcattttgtgctcactagaaatattagcatgattgaatgcttccttgcatatgaaaattattttaacattgtaaaacatctatttggcaggcatggcggctcaacacctgcaatcacagcactttggcaggaagagcgggtaggatcgcttgagttcaggagtttgagaatagcctgggcaacatagtgagatcccgtctctgcaaaaacaacaactgagtccagggaggtcgaggctgcagtgaaagaagattgctccactgcactctagcctgggcaacagagcaagaccctgtctggaaaaatatatacatgtatttgaggacctggctctctcaggacagttttttttcttttctaattctaggttttagtggctgtcataaaaatatgggaggtgaacagaaggtagacaccattagctggccttactaaatcatcatactcattgttacattccatccaccaaatatgcaaaggttttggtaaaatccagctagtgtatttctatcttcccagttgtcagtgggttagaaagttcctctttctaaccaatgtggaggtgctgcatgtttaggttttacatgagtgctcacacccaaggacttctatattttaaaagtgaagacattttaaaaacagattattctggccaggagttgtggctcatgcttgtaatcccagccttttgggaggccgagacaggcagatcacttgaggtcagaagtttgagaccagcctggccatcatggtgaaatcctgtctctactaaaaatacaaaaattagccaggtgtggtggcaggcactcgtaatcctagctactcaggaggctgagacaagagaatcgcttgaatccgggaggcagaggttgcagtgagccgagatcgcaccattgcactccagcctgggtgacgagagtgaaactccatcccaagaagaagaagaagaaggaagaagaagaaggaagaagaagaagaagaagaagaagaagaagaagaagaagaagaagaagaagaagaagaagaagaagaagaagaagaaggaggagaaggaggaggaggaggaggaggaggaggaggaggaggaggaggaggaggaggaggaaaagaagaagaggaggaggaagaggaagaggaggaggaagaagaggaagaagaagaagaggaggaagaggaagaggaagaagaggaagaagaagaagaagaaaaagaagaagaagaagaggaaaaagattattctgaaattaggtcattctgttctcaagcttccttttcctgtgtaggtatgagtgtttatgagtctaatacattgtttaccccaaaatcaagtgtcaaataaatattttcaaacttctgctcaaaaatttgctctttccttagcaagagttttgttttgtttgagacagagtttcgctcttattgcccaggctggagtgcaatggcgcgatctcggctcactgcaacatctgcctcccgggttcaagcaattctcctgcctcagcctcctgagtagctgcgattacaggcacccgccaccacgcccagctaagttttggtatttttagtacccaaagttgatgagtcgacctgctccacgcgtaatttcaaggtggtcacgttggggtcaccccttgcagcttgtagctgctgtgaacgccagagaatgaagtactcagacaattccagctgagtggggcaggcggcarctcctctgagagagtgccgccccaaaatccatccgccaagtatttattagaaggcttgttaaaccacaaacatccaccagatgggtttttgccgtggggtcatgaggcacatacggccttgtaaaagcactcagaccacattcctaggaggctgttttcagcgctccttatcacacattccactccttgtcctgttttcagtgtcaaggagttacattctcacgcacaaacaacgtacacacagtgcctcagtatttttccatgcctcgagctcaaatgccttgtacataagtttgaatatatcgtcgtgcaccccccacatctcccccttctttaattcttagagcttgctggttatccaacgcaaaataagcttctatccttcttccctggtcatagatgcttcgggtggcagcacagagccatttacagaagcctagcaatcagatacaaaaaagaatatagcggccatcaccctagcaatcagatacaaaaaagaatatagcggccatcacccaaatgcgtatgtttaacccagacaaccaagtattcgggttcagtcattgaaagccttcttgtaattgctgaagggtatttgtttgtaattgctgcgagaccattcttcaagttgtttcttcaactagacctcaaatgctttgtacataagcttgaatatattgccgcgcaccccacccgctccccactgcctgccagagggctgggaaatggctgcaccgctgaacaccgcagttaccccggggaaattacttatgacctcctcccgcgcgctgccactgtgcgctccctcccctcccctgctttcccttcctctcctctcgcgcaccctcctcccgccctcagggacccctgggcaaggccactgcgccccgggtctacggcagctggcggggcgctcaacgcgcgcactcacacggacgacgtagcgcaaagagttcctgtcgtccaggctgaccataagcgagaagagcgcggcggcgctgtacacgccctgcacttttttacagcagccagttgaggtcccatcgcgcagcaaccccccggcgctccgccgcgccgcgcaggtcccagcccccgcagtcctcgatgacctccagcatgagcagcgggttcagtcgttcgatctcgcgcatctcgaggcacaagcggaagaaggagcgcacctagtgctgggcagcgccgccgggtccacccttgggccgagccagcaggcgccgcaggcgctcctcgttctgctagccgatggccgcgatggtgccgtaggtgagcttgtcgtcggggatggcatggcgccgcagccagccgccgcaggcgaacgagtataagtcctggcatgggtcgatgctggcgtccaggttggcggccaagaagcgagcggtgcacgcgaagtcttgcgctcaggacagccttcaggacaggctccgccgccggccgcgaccgggcccaggtacttgagcaccagcatagccgccaggatggagcagaggccggctgcaaacaccagcccgacagcaggttcaacttgcgccgcttccagagctgcagcccggcctgggcccggtggcctgcgggcagaaagtccccgcaagcgccccccgcgccgcagtgactcacatacttgacctcctggaactcatcgtagtgcgccatcagcgaataccaggactccatggcgccgaggccgccggggtgcagccctgggccacctgggctacgggatgcgcgtggccgccggcctcctcgtgagcctccgcgtggcccctggggcctcagctgcgggaaggacagaggcaggctaatgagacgccgcagcccgacggggttccggggcaccgcgaggagagacacaggcctgggtgcagaggccccagccgcgagcctcattcactggggaaaccagggaccaggagggctcggcggggccaccacccccgcgtgcacagtggagtcttctcccctgtccccctccctgcacacacgtgcgggtccctgggttgggagggccctgatgggaagggggaggagccaggcacggggcctggcacgtagtgggccttcattgaaaggctgtccctcttcccttcgcctttctggtccaggacctgccccagccaaggccgggcagaatgggggtggggggtggagaagcggaggctggagtgaggaggtggggtcaggagcgcgtctatgctgcactttccgctttccgcgctggacacagacagaggctccacaaagcggccaaagaaccaaactttgtccttgcggaagtccgcaggatctaccactcaaccccgatcgctggctccttctactcggtggcccgacagcccacccgctccttccccaggggcgagcgccaacgccccagggtcgtggatacacagcccaccccctggacggccctgatggagaccggctccgtccccccacccacccccattcccagtctgtgaccccgacccgagccactcccggcttcaatacgttctccccagaacccaaacttgggtgaagtttcacctcccgcggggcgcaaggagacgaagccgggaggctccgcgcagcggccgcgatggcggcaacggctgcagggattcggcgccatttaccccgcaggtgcgcactcgagcaggaccaggactagcgggcccgctcgaaaccagagcctgagcctgagcagaactgcgtgggcagccgctgtctcccagcgcccgctgccttttctgccgccgagctgccagcccgaggggtccagccgtgtcccaggaccagtaagggcagcgggtactcccgggaggggtcccttcggatcccgcgtccccattacgagctgcccaccagccggctagaaaggggctggagctacgcagctgggggccgtcatgccccagcccacagccctggagcaccggccggggaggactcctcctaaaggataagggggccctgatggagtgcctgggctgcccgcacagcgcctgcgcaccttcaccagggagcttccttgtactcctgggaacgcctgtccaggatgaggtctccccagggs

SEQ ID NO: 93320 - DNA, 20954 bp, Homo sapiens
gcaatgcagttcttgcccccttggaggaaataattcagctgaggagcaaatggcaaagtgagagactgaggcaagttttagaataggagtgaaagtttattaaaaagctttatacctgggaggctgaggcgggaggatcatttgaatctgggaggtggaggttgcagtgagctaagatcacaccactgcacttcagcctgggcaacagagcaagactctgtctcagaaaaaaaaaaaaaaaaaaaaaaagctttagagcagaaacaaaaggaagcaaagtacacttggaagagggccaagtggatgacttgagagatctgaaaccaccagtgcaaaattataacgaagacagtgaaagagatctgacctaatcaactccatcttgtttctaacctcccagctgtccctgttcattcctgggcagaggctgaactaactttgggaggaacttagtttatattctatagtttaaacaaagatgataacagccctttcccaaaagaaacctccttcttgcctggggactagacttcccttgtaggactaacaaattagtcacaagattagaaattatggttcaggagtcatgcagctggagactacaagattctgaccctccctaaactgctcctgagatcagtgcttgagatattttgcagaccctgcacttggtggatcagctggcaccacccagattaataaactggcttatctgatcttgtggcccccatccaggaactgactcagcacaagaagacagtttcaactccctatgatttcaactccaacccaactaatcagcactcttgactcactggctgccccccaacccaccaaattagctataaaatctctgatctatgaatgcctgaggagattgatttgagtaataataaaaactctagtctccctcacagctggctctgtgtgaattagcgtttctccatcgcaattcccccatcttgataaattggctctgtctaggcagcaggcaaggtgaacccattgggtagttacagatccaagtgcactgtacggcccttgacttggggttttatacattggcatggttcagggattgtagtttatcctctcttgattttttccttggagtggactgtccacaggcccagttgcctgccagcaattgggaggggccgcatgtacactgtgtttactgaagttgtgcacatgctcatttgagatgtctttcccttaccagttgagtgtacctacaggaaggtcatatatcagttaaactctgacattttgccccttagtttacatgcttaagcttgctcacccaactcctagagatcttattgggaagctgctgatcaccagctttaggtgtttcctatctgttaggagcctgcctttccctggtgccagctgcaaccaattatcattttagcgagacagcttaacaaccacatgactgtcacctgatggttacaggtgacaggggggttttctcttaccctgctcacgtctgcctagctacctactaaaaaattcacacaatcacattttaatgctagcttaacaaactgcaattgtattattctccgtttgccattggcttatactaaactcagcctcttttcttctgtttcaatggaagggaagttccctatcatcactgtccactattcaaacccaatattaacttctaaacttttttttcaaaattatcatctcatatttatatagacatgccctgacagtggcatcatgagaaaaaaaagttgttttggaatatgcagtaacacgagaatgtagaaaatattttgttatctatatgactgaatttataatctctgatattgtttatgattatagacaatggagaaaacaatgagaatttatcctctcagtaggtattaaaactgtctgtttgtccttttattgataatctttttatatgttatataattcctttataatacagctgttataaatggtgttgctctccaaacatcttcagcaagaaaatgtttgactctcactggagccaaagtaatggccattttccctttctgggttcaaccagttgcctctgaaaactctcactctctcttttttttttttttttttttttgagacagtctttctctgttgctcagactggagtgcagtggtgcaatcacggctcactgcagtctccacctgctgggctcaagtgatcctcccacatcagcctcctgagtagctgagatcacaggtgtgcaccactatgcttggctaattttttttttttaacatttgcagggacatggccctgacacgttgcccatgttggtcacaaattcctgagctcaagcgatcttcctgccttggcctctcaaagtgctgggaatgcaggtgtgaaccactgtaccgagcctgaaaactatttctgtgtttgactttctttaagattagacctcagattcaggattaaacagaatcaagccaacaaacaaacaaagccttactgattaatagggtgccttttctttccaaacttctttgaacccacaaatactcatcttgctttaatggctcatggaataagaaaggcagacaaaggagatgacagtaaaaataacagatagttgatatgcttctaattcttccaaattggtctattttgttatgttttccccatttgtcaggcctacattttaggaagtccagtaaagacacaaaggatggctaacccatcattcctagggtcatttatgagtattaggtttgtttattcacacatatgaagaaaagttgttcaaatgaaagtgtttaggaaatgttatatatttttttcaggtacataatatattcttacagtaaacctgataaaattactcagggtgaggggggcaataaaaagctatttaaaaactctttataatatttggaataaacttgttttttactagtaagaagaaaattagtttgcaagtcatattgtaaaggaagtgtatatagaaattatttattcatccatagcaccacagtggtatgtagaattcatacaaaagacagataagatgtagaaacataaggttaaaaaataacttgactaagatttgtgcagaacccaggctcaaataatcatatgtcttgcccttagatcctataggcatgagatataaagccagttaggaagatgggagctttttccacatgaaatattatagatatgacataatacctgactagaactccaggagctctcatttacaaaacatttatgtattagatgactttttgctaaatttttgcaaaatattaatgaagattgccaatgccctttacttatgataaaaacataccacatacaaaacttgacaagacatgctagatcgatagtccagaaattagaggcacattgtaattcatgagagaacatttatacttgacctcagtaggaggggccaaattaagtactacttactaccaacaccaccttaagggtcagagttttagttttggatccatgctttccactgcagctgaaatgaatatgcaaatgctgaggatatatgatagcaacttctctgtcaaaaaagaagacagcctatcagaatataaccagtttttgcattttttgtcttagctactgtggtcattgcaactggtagaccattcttccatgacagtggagttgtcatcatattccttctacgattttatatgaataaagatcacattattgtatattaaaaaccatgcttattactgttggttttggtaccatgcctactctggaataagtcaagtatactgcccaactcttgagcattaagtcagcactattctatgttgaaggatatagtatctgtaatgaacctggctgcatttaaattaaccctgtcaaagaatacagtgcactcaagtttcaatagtctatgctttttaaaagaagaacccactacagaagaatcaacaaaatgactcttctggatcatgcttttagagctacatcactacaaattatagatccccatccatggtgtcaggcacaacatgaaagaaatttctgaacggaaataatactggtgaataacttttccaatgtatacagcctatcaaaaaatcagggagctaaaatgcttacgttaaatcttaaaaatatattaatagatactgccaattgtcaaaatacaacaaaaatagtggctattcaagctatgtttcacagatcacatggctctaggttactctagctattaaaggagtgcgtaccctcattggaaagaaagctgcacacatattctagatgagttaagagggtatccatgacctggctaattacaacataattcattttggtacttgagttctgaggtctgctaggaaactgggaagaaagactgtacgagacacacagataattccatttgtgcaagtagtgctaataaaatgtgacttccttgcactattaaataccccaaatcttgctttatcgagatggcatatgattatttacttattcttcttcttgttctgtcacccaggctggggtgcagtcatgcaatcatagttcactacagccttaaactcctggcctcaagtgatcctcctgcctcagcctcccaagtagctgagactacaggcatgaataaccacacccagctaagatgacattaaaatttttaaatgcatctacaaataaaacttaggatttatgacaaaggtaacaatgcagtaatatgaagaaaggataataatcttttttcacaaaatggtgtaaatggtgctatatgaattgtacatccacacaggaaaagaatattgggtccactgataccttacagcatacacaaaactaaatttcagtcaattgcagatctaaatataaaatgtaaaactaacaatcttagaagaaaatataaaagaatgccttcagtcaccatggagtatgcaacgatttattaaacagaacacaaaaagcattaaccaccaaattttaaaactggaaaaattgaactatattaaaattcatgcttggtgtcaaaaatcaccattaagaaagggaaatatcaatcaatagacaagaatgatattcattacaaatatatctgacaaaggacttatacccagaatatatttttgataaaactcaaaaattaatgtgaaaaagacacacaagtagaaaaatgagcaaaaaaatctgagcagccatttacaaaagagaacacagtatggctaataagcatataaagtgctcaactttactactcatcagtgcaatgcaaatacaaccacagtgtaatacttctacccctacaaaagaatggctaaaataaaaacaatggggaaatagcaaatgctgttgagaaggtggagcaaccactctgaaaaagtggcagtatttataaaagttgaacatcattatattcaatgacccaataattctaatcctagataaatatgcatttgttccaactaaagacaagtctagaatgttcagctaccctaggggtactattcccaaactgaaaatgacaaaatggccagtaacagtagaattgataaaaaaaattgtgacatatttaggcaatagaatatcaaacaaggaagaatataaagaaccctcagctatacacgaggtggctgaaacttacaaagagtgactgaaaaaacctgacacaaaaataatgcatgcactatgattccatttatataaagtctgtcggaagtctaggtaatcgttattcttgggatgttggaagcaggtactggaaggggacaggagggggggttctgggatacaatgttctttattttctctaagttcctgttatatgggtttctccagtttgtgaaaatttattcagatgtacccaaatcaaaaagttaaaactgaaacaaaaataataattgcaatggatcrcgttatttaaaacaaaggcgaccacaatgaactcctctctccccaccccctaacccctgcgcacgcacacgcacaatgaagcgaaacctcattggctgggatcagtgacgcacttctgaaagccgcagtttggcaccatcttttccatctcctsctccttccgccttcccgccatccgccctccacacgattcagcccggtggtgtyagccccctggactcgattcctgaggcaaacagtgccccttaaggtcggcgacagcctcttctgggttcactgcagtccaaccggttccctaccctctgccattatgaacatccgcaacrctcagccagacgacctgatgaatatgcaacactgcaacytcctttgccttcctgagaactaccagatgaaatactatttatatcatggcctttcctggccccagctttcttacatcgctgaggatgaggacgggaagattgtgggctatgttctggccaaaatggaggaggaaccagatgatgtcccgcatggccatatcacctcactggccgtgaagcgttcacaccggcgcctcggcctggcccagaagctgatggaccaggcctccagggccatgatagagaaytttaacgccaaatacgtgtctctgcacgtcaggaagagtaaccggccagccttgcacctttattctaacaccctcaactttcagattagtgaggtggaacctaaatactatgcagatggggaagatgcttatgctatgaagcgggatctctcgcagatggcagatgagctgagacgacaaatggacctgaagaagggcgggtatgtggtcctgggctccagggagaaccaggagacccagggcagcacactttctgattctgaagaggcctgtcagcaaaagaacccggctaccgaagaaagtggcagtgacagcaaagaacctaaggagtctgtggagagcaccaacgtccaggacagctcagaaagctcggattccacctcctagagcatgcttaaggtattctgtcttccctgacccagtacccccttctcctaaatccctgcatcctgccttggcctgcccaattccatcctgtcttaccccattctggccctgcgagattttacggtaaaaaccacctggtgaccttagggagaagttagagtgagttgagggagactcattacacgctattggaagttaaataggataccagctcatgctgaaagtagattaatttcaatgaagaaacaagcatttatcctgctttttgggcatgagttgtatttcagggtaaccacgtagttgatgaaaggcatttttttctttatggaattccagttagtaataatgatagaaatataaaatcatcattttccaactcttgatgaaataatggacccagccaagagtcatcaatggctaatagcattaggtaaaagttggagcactttgtaatgatggatcagactgacaacacttgaagtcagtgtagtcagtcttcactaaacgtggagacaaatatgtgtctccttatgcaacaggaagtgcacagtactacctatgaaatattctttccaaaagaaaattatgagatctgactaccattttacagaaaatagagggacttgttaaactataccatgatgcaaacagccaaatccagaatgagaggtttttacaaaacaaatgacctggtttcttcaacaaataaatggcacacacacaaaaaaagatgaagcattttctgttaaactttacagatacattaaactcaactgctatggacattgtttggatactgattcaaacaaaccatgtataagacatttttgagataatcaggcaaaatttgaacggggactatattaaggaattactaataattttattagaggagctaaatggtattgtattatgtttagaaagtccttatctgttaaagatacatacagaaataattatagctgaaataataggatgcctaggatttcctttaaaataatccagcaaaaaaagaagaaaaagattgaaagagggaaaatgaaataagaatggcaatgataattgttgggttgggaaatgggtacttagggggttccttatgccatttactctttcgaatgtgtgaaaattagcatgaaaagttaaagagccaaaacaattactgtactttttttttttttttttgagacagagtctcgttctgtcgcccaggctggagtgcagtggcgcgatctcggctcactgcaacctccacgtcctgggttcaagctattctcctgcctcagcctcccaagtaactgggactacaggcgcccgccacctcgcctggctaatttttgtatttttgtatctttttttctttttttgagatggagtctagctctgtcgccgaggctggagtgccgtggcactgtcttggctcactgcaagctccgcctcccgggttcacgccattccgctgcctcagcctcccgagtagctgggactacaggcgcctgccaccacgcctggctaatttttttgtatttttagtagagacggggtttcactgtgttagccaggatggtcttgatctcctgacctcgtgatgcgtccgcctcggcctcccaaagtgctggggttacaggcatgagccaccgtgcccggcctaatttttgtatttttagtagagacagagtttcagcatattggccaggctggtctcgaactcctgaccttgtgatctgcctgcctcagccccccaaagtgctgcgattacaggcgtgagccaccgcgcccagctcttgtacttcttaatacacacttatgctaatactaagaaaccactgaaactaagttttaaaggattggtatgttagaaacaacttaattgtaataatataccacagtatttcttccatcaaaggactttgtatcgccttaggaatttcaagggtcggtgagctactggcagtttacaggctttaacatcttaatctagtcaccttacccttacatgtatgaaaggcagcaacttctcatggcaaagtctagtcataaatagtgtattctgtatataatttcagtaagtgctatttgattagtctactcattcataaaaatatttgtcaggcattaggcttggagctgagtatacagcagtgatcaagacagactgatgtttatattatatagcatttaagaataaatggactttttttttgcattttaatgccaaaaccgaagctataacacactaatcccattttattttcattcagttacagttcagtatgttataaaaatttagatacagtaagtctttggtggttagaaagaatctgtcctcagaggagattttgcatctgacttttaataacctgaaagtttcacagtgactgattcattttttctaaaaaataaagccggcagaacagtctaaaagcaaagatgaaattaaaacttgatgccttgagaaagcgttgtcaaatttacacctgtcttgaaaaccctggagggctctctcaagactctttgaatgcacaaaccttttaaaaaaaatttcaactttcaaattccttcgtagaaggacttacacagtattgatctcatctttgtagttatttgcttctcttcattgttaaactctagctgagaacagagctaatcagaggttgttttaaaaccatatatatatatatatatacacacacacacacacatacacctataaaactgatgaattcaaaagcacttaatatctgctatgagaaacaaaataactgccactgtagtaaaagaagagagaaataataaataagaaaattcattgttgtgtcacagttataaatttcagcatacaaattcaagaataattgaactgtttctttatgataccgtaattgaactttatttctaagttgaaggaaatgtttcctagactgagcttcaccgtctttctgagttgttatctgctgagacatattcaatggccccatccaatctttgatcctcaggattcacttctgggtcttttccaaccggaggtctcttaccattttggtagcaagggtatatgagtattagtctgcacaggctaactgctctaaaaattaacttccaaatctcagtaacttaacccaataaaatcttatttctcacatcatagtacaatgtgggtcatcagtgtggtggtgatgtggagtagaggggaaaagatggaccctactccatggtatcattcagggatcatttagacagggattcttaattttctgtagctccctttggcaatctggtgaagcagaaaaatttttaaaagatgtaaaaattataccagattacaaaggaaaacaatttcattgatatagttatcaaactattttaaaaatacttttgttgtaatatatgtgctttgtgttagcatattgaatagcctaataattactattatttcaaagtaaattttagtataaatgatatttaagataccttaagtatctataatgtgatatgaaaatacctatgagttttattggtgacaaagtctcaagtattgctaatactactgtgcattgattcctatgttcataatttaaagaattgccagatttcagttagaggttgatgaaaatacagaattgtttttgttccaaatccaaggtcatggttctcctacatcttattaaatagatcccaggttaagaactcctaattcaatgactcttgtcattttctaggatcataagaccttcaactggttcatatacattcaactagcagatgagagaaaagaatgtatatagtggttaataaaggttttaaaagtcaagtcttacccaactaactgcaggggaggctatgatatttagtttagctttgtgctcaggaaagaaaggaaggagttcagcaacaacacagcatagtttctgccacaataggaaacatcctagtggtgctctggactttgagaagttttgcttccatgcccagttagaagcaatgggatcatacagctgctctcactccatggcatggcccagggaactctgttaggctgtctgaggttgtctacataaacacctgacatatatttattctgctgcttcacaaacttgggcgtggaaaactatgggattctgttatcttgctgccattatgccactaattaaacctgggacaaatgacccctctcctctgaagtccccaaaactgtctaaatcttcacttgcatcccatttaatagggattcaccagcacataggtctagctccctgaatggagaaaggctacagtgaagaaagaaagaacaggaaaaacatttaaaaggctcatactgcaaaagtactatccttctacaattgtggtgctccctcctgtggagctggagttcaaatacctatagaaaaaatgtcctaaaaaaaatatttttcattttccctatctgtacttttggatttgggaacagagacagagttagaagtgatgctgagcaggacagttggtgaagaactggttgatttcatctaaaaaatggtaataaaaattgctcttcacactatgaaaacgcactgttttgcaggtattaattctaagcactgttaatgatgtgtttcatttattcctcataataagcctgtgaggtaggtactattactccattttgtggttgaggaaatcatgtcacagggagggctgcatgttatacagatagtggaaaacaaggatgcaaactcaggtggtcagactccatgattgagaagattaaatgagtcaatctatgtaaattgctaagcacaactcctcacacacagtaaaataatcaataaattttagctcttaatataatcgatagtaagagtaacttttcaggttctcttcttctccacggtaatcaaatgatagaatgttgtgtatgagcagcaacagtttgcaatcttggatgggaaatgcatcttaatgattaaaatagctttcactgacaagctaaatgtcaaagcattcagctgaatcaacgcttgtcaacggcagagtttcttgggagccatagcaatgaagacaggtcagttcaaaacatgctggttgaggcaggaatgtcatcaaactgctgcttatctcttgacaagaaatatgtgcttgattattaataacaaaaatgaaaaaaatgcaaaatcttagtgttttcaattgagctggcaacattgagttaagtaaggttacttcagtgactctccctttctggtttattctttgtgtcgctaaactgtcattctaacaaaaagttgttaaatgttcacatgagcagtcactgaaatagactgttcttaattttaccagacaactaattataactggaatgatataatgaaatatggaagaaacctacagactgacaggtctggtaaattcgtagtataaccttaccccagatatgccagaaaccatagatttcaaatgcaactgcactctatgaagataaagagggggttgggaagagataaaatattgttttgaaatactaatcagatagatgccatttgttgaattatttataatctctaacaatgtcacctttcaatcagtgtatgatgtacatgtaggatgactgaaataccaactttgtcaraagtaactgataaaagcagaggtttttcctaaattttgtactctatgctctagtatatgaaatccaatgggctttatggtacaggaggttagatagaatatttaaaattctttgaatgggcaatgattcaaagagccaccataaaagcctttctgaaaatattctacaatgccatttctatagataaatatctttggaaaattataggatttttttttaaagtaaagccatagtattctgtttcatgtttataacaccatatcgacaaatagcatgtatttgtcaggcttccatagcccacctttaagaaaacctgataatgtaaaactttgaacttaataagcaagacattaagggcttggggtgggcacagcggctcatgcctgtaatcccagcactttaggaggccaaggcgggagctttgcatgaggccaggagttcaagaccagccttgaaaacatagcaagacctagtctctacaaaaactaaaaaacattagccagcgtggtggtgtatactggtgcgtgcttgtagtcctagctactcaggaggctgaggctggaggatcacttgtgcccaggagtttgaggctcttgtgagccatgattgtaccactgtgctccagtctgggtgacagagcaagaccctgtctcaaaaaaaggactataatactaacattttaaagggaatctttatgaaaaatacctatactcttaaacaacaaactatcctatagcctttattacagtgttatttgactttttcagtttaatttcttaaaattttcaagcagtatttactgagataactaaaacagctatataacttcttttgcatgcctgttcatgcaaaaatgaaaaaggcaatgatgatagtctttctgacctgttcctccatatcttgtgtctcttttgttatagcaaatatactttaaaaaataagattttacatagtattacctcttacaactggcttcacttgttattctggcaacagaattttctataacaatgattttgtacaaaaatgctttttaactgctctgtgcataatagtcagcctcaatcttatttacttctgtgtgcatatgatagatgaaaaggtactgagtaaatatttattgaatgaatgaatgaatggacctctcaaattacccatataataaatttttttaaaggagagaaaaataatgtatgtatgattcctcttacctgatataattacctacttcctcttacctgatgtaattagggcactttaatttgtgaataaagaaacattatggttattttggtttcctgtccaggcctcagaaagaaaatatgacttatagagttggacacattgcatctaacttatcaagagctaaaaaggcctttcatttctttagaattggaataaattttcttttgagtggagtaggatgagatagaatttaaagatgacaagcaaaatgatctcagtttctttagttttaaaataggttctttgggggtaaatcccagttttttggtgttcttcctgtccctttctcctggcagaaatgtcctttagatgtcaggaaaggttcatgtgttcttatggcagggaggggagagagccccagatctgtgtgtggtctttgtgcagtcatctgaattctcactgactkccatggagatatatctagtccaaactagttactgggtttctttatctgctgttccagtctatcattaactaaaccagtrttctttcagagctgtcagagcttatagctctccctttctcatttgttttcttctcatttttcaacagcatttcaggtcctcatgtctcaaccacatctactctgtgaaccctggcttagtctgtctgctctgcagcatctgctgtggggatcatctcacagtgaccagaatggcttctcactcttaactctataaacaaccacctttcacatatcctgctgggatcatgaaggaatacctggacacaagagccactgcacaacagccaaggaactttgagacctgccattacagaacctttcttggcctactcacactaygctgccattttattctgtttgtagtagtcctctgttgggtgtggttatcctgcaagtttttctccttttagaatgatgaacaggaagcagggcaaactcttgaagatttccagctttcagtttttgtttttgttttttaaccattatttacctgagttttcatccttgaggaggtgaagtagtcaggaccatgaagtcagacctcatgccctcttcctcctctttcctggaagaagtattcagtttccttttcctttctctggtaactcctcctttatactattcccccctcccttttttttgaggaggagggcatcaccttcccagtgggaaaaggtgttaagttaggagcttctactgtacaatcagaacttggagattttaagaaaaggacaaacggtaattaaattggaatctctaatgtgcttgtttgtgttagtttttttgtgattatgtcacttggcatttattgagtacctgcagtgttcacacacaatgctggagccttcattagttacatatttaaccctctcagcaaccctgtaaagtaggtagtattatccctgttttacagatgaggaaactgaagctcagagaagtgaattaaatatcctggatctgaacccaattctgtttgaattcaaagccaaagttccttctacttttctgttcctactctttgcattttatttataaatgtgttaaaattttagcaaaaatggagaatctgctgtttaaaaatgtgtttgcttaatacatggctactgtatgtcaattgtaaatatttatataacctacaattataatctatttttattatttttctctagtaaaaataagtgaagacaaagtaccttgacctctgcagtaaaagttaccagataaatccagagttatcattacttaatgttgtttttatgttcactgaatgtgaattaccaaagtatataacatttttcatgtttaaacttttatgaaaactggtgtgtatggatttaagtcaaagcctggactttatctggtgacaagaggtaagtcttttctgtgtaatcgtaattagccctgctaagcagttcttacagatctaccctagtgcactctaagaatgtctgcctaatggtaaatgattgcctgaggcagatataaaagtttttccctacatgaaaggatttgccatttcttgtgccaatacagtatgataaaatctatctttccatcttttccttttttctttttaatattctatctcaacgctaaattattttattctttcctctcaaccatgtgtttatctctttatttttaaatattacagctttctaacatctgtctctagggcagcataatcttactgatgaagtattccatgttttccttgagcttttgtcaatatgtctttgtgttaacagcttagcagatggagaaacagaaggagtagcctcagcttacctgaatgatttttttccagcaccaggcacattgacttgctgtctctagtaacttgataggagttggagcaattggaaaatgggaaatgatatatgacttctgcagtgttatttactaaaacaattggcatttctttgttatcattatatcttctttcccagtctcgtaccaggagaaagcagaattatagcagcctatctggtttgggctataatgaaaataaaataaacaataatactaatattgctttgggcatagattagcatgttcataatggttccaggacagtagcggtgatttagcagcagcagtggctttttgaaacacaaattgtgagagtctgtggcaccattttttttgtaatagcattgttctttttacacaggaaaagtgatttttttttttttaattctgaagggactttttactgaggcacagtcctagagagagcaaagcaaggctttgaagcaaggagggaggacagttaatggtgtgaatacccttatactagctatattttattcacttgcagctttaaataaactggatgtgctcaggtctgctagcagattatttaaagatattgatcagctcactacgttttctttggttaaaagaggaaaacttgtgaatgaagcctgtgagttcctagttagagtctgtgtggttttccctttggagataagagcaagaagcgagagatgaccatctgaaataaaaataatggggtgtggatatatgggagaaatggggaatagtactgggaattagtccacagccaggaaaatttagaaaggatcaggactgaaacactggaaagaaagttttctttattttttatgtgcagctaagtcatttggttattatgttaaaaaatgcagattttttttttttcagtatgtctggtggggcctgagtatctgcatttctaactagttcctacattgctcatgttgctggtcccggaaccacactttgactagtaagggtcttaaagctcatctccaacccttggactggggtccaaaacacctgtgactatccattaggtcatttaataatagattagaccctaaataattcagattccccttcttaaatatacatttacataaatcctgtttgagtttatgtcttgatggcctaataatttcaataaaaatagagtttgttaaaaacgtgtacaacaaaaaagtgtatatagtataaaatgtattgataatattatatctattaggatgctttgatataacaattttgcctcattggcttctaggcaagtgaatggtgtatgaggtttttaaaagtttcacttctaattctcactcaatttatcgtgttcattggttgatgaattagctcagacactgaaattgttttccatgctgacaacatttgacaggatttgaaaaagactactgagtctttttttttttttttttttttttaattttaaggagcagcagacctatgtatgggttcaggtggtctaatagagattttccatccggggataagaatttctagcctattgtttctcaaagtatagttcatatgcttagtgcatcggaatcacctgggtgctatgttaaaaatgcagtttctttgtctctggctcagacttaaaaaatcagtcccgtatttttaacaaccctccaggtgattgttttgcacactgtcatctgaaaatcactgatcagtacaaggcgttgaattcttcataaagataatatgaagggagcttttttccatgttaatactctccagacaaattaattcatcaaaagaagcaaataattcagaggagatataacaaaattttgtttattataaaacatatgggaaagggtgagatggtatatgggaactctgctcaactttctgtaaaaactgttctaaaaataatttgtaaattaaaaatattttaaaagtacgtgtgaacattcgacacacattcttccatatgtgttttacataaatgtgagatcatgtatgttattttttagggcttttttggtcattactttcttcctcatcctttcttttcaagcaaacaatagctacaacttggcaatggcagtatacagcacaagcctgaaggatgagaacattcacaaatcacaccatgaaatttgtcccaatttgtttccagagcaaaaatctcaaattctgcagtgtcttgttaggaaccagacacctagcatgtctggaaccacgtccttccatccatgtcattagctcctcatatcccatcaccatctgggcatcttgagttagaacttttaagaacacagtacccagccaaaatccagtgaaacagactaagtgacttatcaaggtccttttttatattaatacttttccctagacatgaatgcgtctttgaaatccagtaagacacagatcatttccttgaggtgcacttgaagggttatttaaacaccatgtttccttattagggcgtgggaattacgttttgtgaagttctggggaaaaaaactcttttcattttaaatcatacatatattgctttcctaaccaaaattaagatagatttcacacctttggaatggtgtcatcacctcaactgcatttyacaggcgcttacctagagaacacagtccttagcaagttgagcaattttcacaagaggtggttcaatagagtgagaagacacagagtgcggagtccaacagcttaaattttagtcctagtttggcttatgaccacgtggatatcctctagcacatcagttttctcatttacagaatagagataaaaataacttttgtgctttcagggttattgtgtaatgagttagtgtaaaaaaaaacctgcattgtaatttgtaaaaaatgttactgtaaacatttttacttttagacatttttacccctcaatttaaactggtgtagagtaacagtgatcattttttttttgtttcctctttaatggtccagaaaagaaccagtgtttcagagaatgtattatcaaacaataactatgtcagcaatgacaaatatatgcatgtatgtggacattttaagggataaaatatggagaaggtgaattcctgtaaatatagcaagccaactttctatacattcatttgaaaagaaaagactcaataaaagttaccttttactctctatgacctaagcattcatatgtaatatatttttcaggtaaagcgaactgtacttaatctcctatttacatggttttgaataaaggaattcacacaaacacacatacacacagtgaccaaaatttttacatattcgaaaacttcagtaaactggctgggcgtggtgcctcatacctgtaatcccagctaatcaggaggctgatgtgggaagatctcttgaggccaggagttcgagatcagcctgggcagcctaagcaagaccccaactcttttttttttttttttttttttttttgagatggagtctctctctgtcacacccgggctggagtccagtggcacaatctcagctcactgcaacctccacctcccaggtaattctcctgcctcagcctcccgagtagctgagactacaggtatgtgccacgacgcctggctaatttttgtatttttagtagagatggggtttcaccatgttggccaggctggtctcaagttcctaacctcaggtgatctacccgctttggcctcccaaagtgctgggattacaggcatgagccactgcgcccggccaagatccccaactcttaaataaataaataaaacattagtaaaccatgatagtacattagggcaagcatctggytggtttttcattaccagaactctaacgagagtgttaagtctggcttttattcctgaaagctggtacacaaattaaaagtttgactgtttgttaaataataaatgttataaagaattttgaaaaatcacgtactctcttgtataaggaggtctttaataaacaaatatttctaattgctcctttggcaatcaagacgtttttgcatcctgggacagtgtcgcttagtaagattcccagtgggtgagaggtacatctcttttgtaaagtggcagatagattaatgtgaaagaaaggtgagaaagaggcagccccatagaactgctcttaggcagatcattttagaaaggcatacatatggaacttgagaatgcagaatttgagttccttaaaaattactcatgtctgtgtagcccttgaaaggcaataatctaatatatatttttcaacatttaatacatgttctttaattttattatcttctttataattgttggggatggggtagattaagcttgtatccagtaggtatttaagctgaaacgtcacagcttttgtgtgtctaattagcatcattgcctcaactgcattgagttaataggtagtagtatcacagaggttaaactcattcactctagattatacctagagttataccctaaggtacctgctttggaaatgttgaaatatgtaattgcatataccttgctttataaagatagcaaccctatcaaaactaaatccttggcaggctaataggagcgccatgaaataacctgaaattgtcatttgtcagcagatgatagaaatctgaattcagagttagaaagctggtttaggagtgacaatgtatgaaagagaaaattgtcagctgttagaaagtcaaagatgctatttttataaaggcaaggtgaaaaaaagactttatgacagttgtattggatcctctgtttgttcaagaaaaaaagtattttttattactgacttgaattttattttcataatgtaaagtagttgttataataattgggtaccctgaataatgaaaacagactgtatttatagtttaaatttttgcatgccagtacaattcttattaaaagacatttgggtcagttttgctaaaaaacagaagctcctgtctttaatgaggaaaaagcataatagtggcttatctt

SEQ ID NO: 93321 - DNA, 13958 bp, Homo sapiens
caaattcgatgctcaagaaaaggccacagccactgattcttgcatgtggcagcactctgtcccccatccttttcacagagcatctgcatgctctgggtctcgtgcaaggaacatgatcaaaacaacctttttttcttctacatcccttctcttccatccaggtaagaagctgtagagttacacggtagataataagtggatggaatcaagaaatgacaccttccatctgccggagtggctattttgctcacttagtcagcaacaatgaaccatagtctgccttgaaaatgatacacattcccctccccatctccaacatacacacacacatacacacattccaaggaaaggtttaaagcttttttttttcctctctctctcaaaaaaaaaaaaaaaagataggkgtgggcaagaatgagcatctttcacattctgcattttcagagtaagtatccaatgcaacttgccatgataactaaatttattattaactgtgtatttcatgatgttagtgacaatatgttaatgtgatttttcacgtcctcctgcagtgaacagatggctccttttactttactttccacatcaagtgtgattatttcttggtgccaaaagccacctgccgctcctcggtctccagtctaattttttatgttggtaaaacacagcaggacttgttatcagttggatggcgtcttaataaaaggagacacgccaacatattgacatcatgttcaaggggaaatttcagccccttcaaacccttagcccccttttcccacctcctttcaaaaagtgaggaaagaaaacaaaaaaataacaaataaaaaataaatgcaaagatcccatcagtttcaagatgtttgattacaattattgggcctagagccaagatgctgatttggtctccctttgttcctaaacccaagcacctcactcagggctctgatctttcatccagtgtaatgataattagctgtaacatattccaaagtcaaatgtaagcaggaatacattaacattgagatcagtgtcagggcaattttcactgagaaaatgacaaagaacacacacacacacacacacacacacaatcaatcaaacatttcaagattcaaatattcataaaatcacttccagatccgtgaatattaaactcattggcttgtctgtcatgtaatgcttacctaaaatgccaagggctcctaatgtgaatgcggtggctcccacggcccatgcatamcagagaaaacatgagtaataaaccacggtagcttgctttaatttttcctttcttcattagaacaaagagggatagtaygttaggtgatttgtggtccaagaagaggtcttccaggcgattggatggtatggctctcaacagctggtccagcacatttgggaacagcatgtagaaaaatgcatcagtgttttgaagattaccaactgtgatgatgcattggttatgacatggtctaaaaaagtcaaatttgctagccacaaactatataaatgaatgctcttaccatcaggttgcacactctcaaattcatgactaagataagtccaaatttggtgaaatctaaactttccactgattcccactctcgagattgaaaagagtggcagcattcttagatgtctgcaatttctttctaagagccaaggcattaaacaggcagctggtttcctagaatttaaaaagtttataaaaagcagaagaaaatgcttataatgaaagtacaactatcttaatcattcataattaatggttttcttgggatgaacaactacaactagattattctgccacagagtctctcaaattgatgtaaacgtaacagcgacttttttattccattcactcaactgtccctccaaacaaaagagcctgtatgaaataggtctctttgcactgttttgcagcttgatcagcttgtatttacatcacactttcctaacattttattatgaaaatttgaaaacatatagaaagttgaaaaaactttcatcaacatcgtatctaccacacagattatataattatcattttattatactacttttatcatatctttctatctatacaatcctctgtctcttcatcaatccatcttattatatcagattgaaaatgaggcctggtgcggtggctaatgcctataatcccagctctttgggaagctgaggtgggcagatcacttaaggtcaggagttcaaaaccagcccggccaacatggtgaaaccccatctctacttaaaatacaaaatttagccaggcgtggtggcaggcccctgtaatcccagctactccagaggctaaggcaggagaactgcttgaactctggaggcggaagttacagtgagctgagatcgtgccactgcactccagcctgggcgacagagctagactctgtctcaaaaaaaaaaaaagaaaagaaagaaagaaagaaaaaaagaaaaagaaaaatgaataaccaatagcctatccggcaagcaaaattaaatttatcttgactttacgatgattgcttaataaagtgagggccatatttagtggtgttcattaatccatccaacaaataccacttgaattcctgctttgagtataagtgctgaaaatacaggattgaattaaataaccaaggtccctgacttcattgaacttacaatttagtgtgcttaacaggaaaaaaataattaaacaagtggctctctaaaacatgcacaggaaaatatgtcattaagataagtacgttaagctggtactgttcttaacttaaaggttataataagggcagtaagaatgtttgatgcaccactatatcatggcttataatgaaatccatagatagcaacctctcaaaacatattcaccatgttactgattgaatgagtaaattttaaatgttacaatgtgaacactacttaaaaccttcaatactaagtagctgcactttagaagagtagccttaaaggtaaatgaataatatacaaagtcaagtatgttaacaactctatttttaacaatcccataataaaagactttttgaagaaaatcccctcatatatttttgttgtttgaactattctgaatagtatgttcaccattaaagcatttatgattttgtggaatataatacaaatgaaataacaattttcttgtaaaattgaatgccttcacaaataaggtagtgccaacaaagatttcagaagtgcttaaatcctacattagaatataaagaagctattatagacaacaaaaattttagttggttttgttttgttttgtttttgaaataaagaagatagtggacttcatttaagctccttagttttcgtttgcttgttttaaatactgtttatcagctttggttaaacccatcagtagtttgcaattactctaaggaagttattgcaatttggtaaactttctaaactatattgggacacttattatctgattatttagtggctacaatttattatcagtgaaactactatgtaagccagttctttataagcagaactgacgattttataaataaggtatttgtattaaagacaaaatacttaaagtattcccagactcaaaacctaatggaattaggaacatttgtttgtaaatattggtgtgaacggagagagggaatgtagaaaagaagctctgggtcaaatctttttattgcgtacattaatctatacacacaatgtttactcttgccaaatacctggagagaaaaaagttaaaacaatgtaaatataaatttgttccatgaaaatgcagacatgttatggttaactggaatacgggtaaatgttgcctctacaattttgcttggaaaagctttgatagaattttagaaacaaagacacaaccaggaaaatctgatccagtttttaataatttctataccttacttcgcaaattaagtctcaatgttctttctttctcagacttcatagtatttcctgaagggtttttgcttaaataaaaaatacgacccagataaaatagtgaaataacaatatcacagttaatttttatgttattttctatcttgttctatttggttttactaaacacaaatgggccttatccttgagctaattcagaaatgtagcctatgccctaatacaaaaaattgccattcattgactgcatattcaatatattttaattaatgattaaataagtctttattcaccgactctatagttaatctgaaaatttaagtttccatttagtggaattccactctggccaagatgtagtaaaaaggattggagttaccttttcatctaaaacaatcaaaaatggaaaaaatagatgaaatagttcacataatgtgcaaaatataaaacaacagttcacaaaatgctggatatcacggaatgaaaggcagtaatttctaagagattaaaaacaagtgacatgactactatgatttccccagcttagtttcttgagagagttttgaagcaacagcacagacagggaacccaattgaaactcagtggaaacctatggcaaggagattaggctgagagcctagagaaaccaaagaagctagactctgccaggcatagcactggagaaaaaagagttgcatagagagagaactccagagagctttagagggtcccccagtgagtattcagttgggtattgatcagtgcatgtataggagaaaactactgaggctaacgaaagatgcacctggaaagactagagataacagtatccagtggtcactcagggctgggaggaattactgttccaaacagcctcatttgtcaggggtgttgggtagagtacatagaaagatctcttcacagtaaagaggaagaattagccccagactgagtactatccttgtgccatctaagaaatcttaaaagcagacgcaaaagaattgaactgtttccaagtaatttatctgcatcccaaaacaaaactcaagaccatttatagggatacaaaaatatcaagcacccagtcaggtaaaagtcacaatgtttggcatctaattaaaacttatcaggcatgcaaagaaacaggaaatacaagccataatgaggagataagcaatcaatcaaaaccgaaccagaactgacacagaggttagaattgcagaaaatgaaattaaaagttattctaactgtattccatgtgttcagaaagttaagtagatattaaaaaacccaaattgagcttctagggatgaacactacaatatgtgaggtgaaaaatgtactggatgaattaatagcagagcagacattggagaagaaaagattagtgaacttgaagagagagcaacagaaactatctgaaatcaaggacaaggagaaaaggtaattataatgagtagggcatcaatggagtccctaagggatagaagagacagaataaaacacatttgaagaaataatgggcccaaagcttttcaaagtcgatgaaacctgtaaacctacagattcaagtagctcagtaaaccccaagcaaagaaaataagaaaactattccaagacacttcatgataaaactgggcaaaaccactgataaagagcaaaaccctaaagatagagaaaaatagacatgttaaaaataatagcaaagttccacctgaaacagcaagagagacgatggtagagcaacagctccaaggtcctgaaacttaaaaagaaaaaatatgtcaaatagaattctataccccgagaaaatacctttgaatattactatgaaatatatttcagatgttcaaatttggaagaattcatctccagcagacctgcactattaagaaggaaaatgataacgtagagatatagatccacacaaaagagtgaacgccggtaactgtaattacatggataaatatatgatttaaaaaaaaaaattaaatcttagaagacaactgagtggctggaggtgaagcctgggctggaggggtggggtgagaaggcgccgcgccagttaaagggcaaaggttgccttgcgcctgcgccttgtgctcctgactggctgcgctccctgcccccaacaccgccgtggcctgggaaacggtcccagagctgctgagccgacctactggtgtcatggcagccccraagacagcagctgtggggccgttggtgggagcggtggtccagggcaccaactccactcgctttctggttttcaattcaaaaacagcggaactacttagtcatcacaaagtggaattaacacaagagttcccaaaagaaggatgggtggaacaagaccctaaagaaattcttcagtctgtctacgagtgtatagcgagaacgtgtgagaaacttgacgaactgaatattgatatatccaacataaaagctgttggtgtcagcaatcagagggaaaccactgtaatctgggacaagttaacaggagagcctctctacaatgctgtggtgtggcttgatctaagaacccagactactgttgaggatcttagtaaaaaaattccaggaaatagtaacttcgtcaagtctaagacaggccttccactcagcacttacttcagtgcagtaaaacttcgttggatgcttgacaatgtgagaaacgtccaaaaggctgttgaagaaggtagagctctttttggtaccattgattcatggcttatctggagtttgacaggaggagttaatggaggcgtgcattgtacagatgtaacaaatgcaagtaggacaatgctttttaatatccattctttggaatgggataaagagctctgtgacttttttgaaattccaatggaccttcttccaaatgtcttcagttcttctgagatctatggcctaattaaaactggagccctggaaggtgtgccaatatctgggtgtttgggggaccaatgtgctgcattagtaggacaaatgtgcttccaggagggacaagccaaaaacacctatggaacaggttgcttcttactgtgtaatacgggtcgtaaatgtgtgttttctgaacatggccttttgaccacagtagcttacaaactaggcagagagaagccagcatattatgcactggaaggttctgttgctatagcaggtgctgttattcgttggctaagagacaatcttggaattatagagacctcaggagacattgaaagacttgctaaagaagtaggaacttcttatggctgttactttgtcccagccttttcagggttatatgcaccttattgggagcccagtgcaagagggatactctgtggcctcactcagtttaccaataaatgtcatattgcttttgctgcattagaagctgtttgtttccaaacccgagagattttggaagccatgaaccgtgactgtggaattccacttcgtcatttgcaggtagatggaggaatgaccaacaacaaagttcttatgcagctacaagcagatattcttcatattccagtaataaaaccctttatgcctgaaacaactgcactaggagctgccatggcagcaggggctgcagagggagtaagcgtttggagccttgaaccccaggctttgtcagttctcaggatggaacgatttgaaccacagatccaggccacagaaagtgaaattcgttatgccacatggaagaaagccgtaatgaagtcaatgggttgggttaccagtcagtctcctgaaggtggtgayccttctatcttctctagtctgcctttgggattttttatagtgagtagcatggtaatgctaattggagcaagatatatctcgggtgtgccataataataccagctatggagtcccaagatktaaacattttacataatgaaagcatatagcagttctgccycttaatataatgacactattatagactctgattttgtttataaaccacttgctacatgacccatgaaaaccctagacttgtgacctgaaataaagaaaatacgttagaagagcactgtagaaatattgggtgtgttttttttaacatcgacagggttgggccagccatcttgaaggctggccccctccattgccataacattctgccccattctttctaaaacataggctattcagattctattcatggaatctttttatcaactatcctctaacacttatggacccagatttggttctttgtgttacacacacttgattaagaggtgtaattaatctgctaaaattaagggactttttgtcattgttattcttgtttttaataggctacaagtcctcctttctacatattagagagactacatcttaactgaatgtttaatggaaatatttgctaaattcttacaatagaaatttagtattctcatagcttagatattttcctgaaaaatatttgccaaattgaaatttattagacaatttacatggtctcattaattactattttactgaattattgtgtgaatcctagagggacagggacactatttcccttttttatatcatgtctatatcatatagagtagctcatttataagttgaaagtacattgtagtcagtagattataacatggatggtcctaaatactttaaggtaaacagctatatacattttggggaatgtgtatacatattatttatcaggagaaacctacaaaggcagtatttaaaagttaaatatgttttatgctgctacaaaaagtatattatgattgcaccaaatttcttataacttactcttttatttaatatattagctggatatatgctgggaaaaaacactggaatatttcagaaaatattgctttcaagtaggaaaaaacaaatgactgttcaaacaaaaataataatatagtatgaaatgcaagcatgtctaaaagaaaacaatagcaaagaagaggataaatgaaggtgtagtagtttgagactcatatactgtgtggaaaatgatgtatcacttgaagttatagtgataatgaaagatatatactataaatcctgaaataacaaaatgttatattaaaaatatgcactagaactactaaaatattcaattctaaagaagatacaaaacagatgaggaacaaagaaaaggtaggaaaatatatttaaccctaaccataccaacaagcacattaaatgtaaatgatttgattaccccaattaaaaaggaaacttgtcagatttaaaaaataaaaccaaaatatacactgcctccaagaaacatactttacacataagaaaaaaaggtcaaaagtaaaatgatagaaaatggatataccaagttaataataataaaaaagaaatatcagaaagtaaatttcaaaacaaagaatattaaaagtgataagatcatttgcaatgataatggggtaaattcaagaggacataacaattctaaatatttatgcacctcatgatggagcttcaaaatacataaaatcttatagaactgaaaggaaaaataaaaagttgtgcaataacaggaagatatttcaatacctcttcctcaatatttgatagaaaaagtagttaagtttactaagatatggattttaacaacactatcaaacaacatgacttaactgacatttatggaaaatgccacccaacaataggagaatacatattcttttcaagtgcacagtgaatatttaccaagattgaccatatagaggccaaaaagcaagcctcaaaaaattaaaaaagatttcttacaaagtatggtgtctgagcacattagaattatacatcgacactagaaaaatctttagaaaagtccccaaacatttgaaaactaagtaacaaactttaaaataattgataagttaaagagataaagagggaaaatagaaagtatctggaattgagtgaaaatgaaagcacaacatattaaaatttatgagagattgttaaagcagtactttagaagaattttatagaactaaatgcctgtattagaagggagaaaaggtcttaaatcactaacctctgcttctaccttaagaaacgagaaatggagtaataaattaagcccaagctaaatagaagaagtaaagaaatagtaaagatgagagcagtagtaatcaattaattctaaagaagatacaaaacagatatagaaaatagaaaacaatgacaaaatggcaaaattgatataaccaaaagtttgttctttcagagtgtgaatatgataaacttttagcctccgttactagaaaaaaaggagagaagacaaaaattatccatatcaggaatgagattgacattactactacaggtcctgtaggatattaaggatagtaaaatgagaatatagaaatattatgaaaaccttatgccagtaaatttgatgacttggataagatgaacaaattcattggaaaacacaaacttcttaaactcaggaaaatatagataaccagaatggctctatatctcttaaaaatattgaatttctagcttaaaaccccccttacaaagaaaacctcaagctcaagtggcttctttcacacttataaggaagaaataatgcctatcctacacaaatttttccagaagactgtaaagaagggaatgttctcaaactcattccatgaggccaggtttatcgcattatcctggttccaacaccaggaaaagaagatgttacaagaaaaaacaactgtggaccaatatctgtcataaacatggatgcaaaaattctgaacaaaattttagcaaattagtttatcaatatttgaaaagaataatacatcatgaccaagtgagggaatgtaacaataggataatgagtcagcataattagaagactcaatgtacttcaccagattaacaaactaaaaaagaaaaactacatgagatagaaactacacagtaaccagaatacctaaaaaacaaaacaaacaaaaaaagagtgcctctaccaaatgctagtaaagatgtagaagaacttgcctttcatgtttcttgtgaaaatataaaatagtgtaagcactttggaaaacagtttgagaatttcttcaaaaattaaatatacatatgatcctaggtatttacccaagagaaatgagaacatatgtccatacaaagacttgttcacaggacttattatggccaaaagttgtttacaactcaaatggccaccaacgggtagaaagataaacaaactatgatatatccacacaatgggatactatttagtaacaaaaagaaatgaactattgataaacactataacatagttgaatttcaaaataattaaaggaaataagccagacgaaaagagtatagtatgatcctgtccttagaagattctagaaaattcaaagtattgtacagtgtcagaaagcagatcagtagctgcctgggagctgggagaggggtgatgagaaactggcaggaaggcttaggaggcatgattttaaaggggcacgaagaaaatttggggggtgaataatatatttattatagtaattattgcggtggtttggaggataaatacatatgtcaaaattaatcaaatcaaacactttaaatatttgcagtcaataatacctcagtaaaactatttttaaaaggagaaaattatcttcaaactcttaaggaatatagccaaagtttattcaagtagcttaatctctgctctttattatgcatactgatgtatcctcactgagtctgcagtgagctagcatggggtgtaccagttcctctctagcaggtctgtgagctctatttgaagtcatttgtgtgattaggctggagaagtacatgataatgtctacaatcatttaaaacaaattaatttctcatttcattctatccggtcataattctccttctgggacctattccaaaggaccttatgaagagttacaaacaaagatgtcataagaaaatcagaaataaaagtcctcaaactcagcatctcactctcactccttccatatgcacattcctgtgcttatcagcttatcttttttaggtatctttgcctttaaaagcctcattttcttaacttaactcataggatattggtaaattacaatactttaccccaaggctataaaggagcttctgtgtattttattataaaattatctaattaataatttctctatattgccactaagcagaactacatggtgaaattatgatgatggggtctcactgcatgcatgttatgaaacagcaagtcatcatttaatgtcaggcatatgtgcgagtgagagagcatgagctggaacactaaccaggagaaagaaaagcacctaattctgatgctattttccgagaagccattttgtaaatttaagttgtggctgggaggggaggaggacagtaagaaagaatagtgagagagagaaaaagttggaggacaggaagagaaagagagagagaggagaagaagaaaagagaaacaaggtgaggaagggaaagaaatgttaaaggtatccgaagagaagacagatgtattattaaatctaattaaaaacacctcatgtgatataaatgtagaagcagcactaaacagctagatcatttctaactgagctctgggaatggaaaccatatacactgcactgagagagataagcatctccccctccccaccctactcagaatctgaattattatctgtttgtgtgtgatgtctggtgcttatattatcattttgatattaatattcataatctaccaaggaacctattgtttcactcatggtaagccctcgttctcaatgcgtgagtctaaatgttacattatacaatcctcattttggtgggaaattatgtaccaactctatgactgctctatatggaaaatttgctttcatgcctttttttaaatcttgtgaactaataagatcccctagggtaatcttccagcaaagtctagaataaatacaataccatctcagtaagtcacctactttaacctcccactgaaatgacagctctatagtctgtctatattctgattgtttcaatcaatacaaaatgaataaacttaataaacttaatatttaaatagcccccatcgtttccatcaacaacctttacagctcaatttattcgaggcttggagaaattgcatgtgatccttgttctctatgtgtttagcatacattatacttcattatcatatcagccctcaacaaaatgatttattttagaaaagaaaacaagagaaggccttgacctttggtgggaaaaaaaaacagaaggtggtaagactgtagtgttaatctcatattaaactacctatgaaattcagtttaccgttacaaaaactaacaaacctttcttatattcagttattagaatatgtttttcaagtgtcataggaaagtcaagtttggaaaatatttataatgccaaaaatagtaaggaaacactatactgtctataccagtagctttgaaacagagttgagcaaaaccaggacaaaaatgttctagtaactacaaataatgataactctattttgtttagatttttctccaaacagaggtagacaatatgcttaattgcacctccctgcttccacctttgtgggcctcagcaatgtgaccagagcaggggatgaatagacaacctgggaaagaatctttaattaggttctctctctctctctctctgctctctctctgctcgctcgctctctctctctttctctctctctctgctctctctctcctctgagaaaaagtttgtctggcctcaagtgcacgtcactgaatcaactggtcacttcttccacattctatttcaaataggtcatagatatttaccattagctcggttttataattaacaacattgaggaaaataacaagaaaatcatcttcacaatccaaaaaagttatagcgttagcatttaggagatgattcatctggggaataggattcgttctgtagagtttggtattctcaaaaatagtcttctcaaagaaaactccaagactacattcatgtgcaagaagaggttgtagttaggtaagg

SEQ ID NO: 93322 - DNA, 13560 bp, Homo sapiens
  misc_feature (1)...(13560): n = A,T,C or G
ccctgatataatttgaatctgtatccccacccaaatctcaacttcagttgtaacccgcaatgttggaggtggggcctggtgggagatggttggatcatgggggtggatttctcatgaatggtttagcaccatcccccttggtgccgttctcgttctcgtggtagtcagggagttctcaggagatctgattgtttaaaagtgtgagcatctcccctatccactttctcctgctctggctctgtgagacgtctcgctccccctttgccttccaccatgattggaagcttcctgaggcctccccagaagcagaagccactatgcttcctgtacagcctgcagaaccatgagaaaattacacctcttttctttataaattacccagtctcaggcatttctttatagcaatgtgagaacggcctaatacatcccctttgctttggcattccattgcagccccttgaagacccaaactcttccatcagctgtcaattttgcactaagcacagttggccactattcctctcagtgatacctgccttcaacatgggaagcctttatcaaagttagtggacctctcaggatggaacttaaggcattaacatcacttatttatctattcatgccctcattcaaacagccattctgtcgacctttattgaacatctatgtaacagatcccatgcaaggtgctgggaattgaaatacagggaagacttgatcacctatctcaagatgtttcctcaaggagacagaaggaccagggaatgtaagtcccatgatggcaaggattctatctggcttactcactgctgcctagaaaagaatctagagcatcattggccctcaataagtattgaaggaaggaaggaaggaaagaaggaattgaaggggaacctgcttgaggaattgtccttttctttctccccaggtgtcagtcaagtccagaatatcctcactgtttatgtgaataatgtgtccacttgggaatgatgttcaggtcaactatgagcacccaaagtactaagccctgttcaagaaatgccctgttccatcacattactcaacttcaaactacactacaaggctacagtaaccaaaacagtatggtactggtacatagacacataggccaatgaaactgaatagataacctagaaataaaaccacacacctaaaaccaactatctttgacaaagtcaacaaaaataagcaatggagaaaggactccctattcaataaatggcgctgggattactggctagctatatgcagaagattaaaactgaatccctacctatcaccatatacaaaaattaactcaagatggattaaagacttaaatgtaaaaccttaaactataaaaatcctagaagaaaatctaggcaatacccttttggacatcggccttggaaaagaatttataactaagccctcaaaagcaattgcaacaaaagcaaaaattgacaagtgagacctaattaaattacaaagcttctgcacggcaaaataaactatcaacagagtaaacagacaagctacaaaatgggagaaaatatttgcaaactatgcatctgacaggtctaatatccagaatttataaggaacttaaacaattcaacaagcaaaaaacaaaactccattttaaaaaagtgggcaaagaacatgagcagatacttctcaaaagaagacatacaagtaaccaacaaacatatgaaaaaatgctccacatcactaagcatcagagaaatacaaatcaaaaccacaattagtatcatctcacaccagtcagaatggctattattaaaaagtcaaaaagtcaaaaaataacagatattggtgaggctgtggagaaaagagaatgtttatacactgttggtgggaatgtaaattagttcgaccactgtggaaagcagtttggagatttctcaaagatctaaaaatagaattaccattcaacccagaaatcttattactgggtatatattcaaaggaaaataaatcattctaccaaaaagacacatacacttgtatattcatcacagtactatctataatagtaaagacatggaatcaacctaggtgcccatcaatggtggactagataaagaaaatgtggtaaatatacaccatggaatattatgcagccataaaaaagaatgaaatcatgtcctttgcagcaacctggatgcatctggaggccattatcctaagtgaattaatgcagaaagagaaaactaaatactacatgttctcacttataagtggaagctaagcattgggtacacatggacataaagaagagaacgatagacatcagggcagaagggaggaagagagaaaaggactgaaaaactacccattgagtactatgctcaccaccctgagtgataggatcaatcatgccccaaacctcaacatcctgcaatatattcatgtaacaaacctgcacatgtaccccttgaatctaaaacaggagttaattttttttttttttttagatggagtctcgctctgtcgcccaggctggagtgcagtggcacaatctcggctcagtacagcctctgcctcccaggttcaagcaattctcccacctcagtctcacaagtagctgggattacaggcacccaccaccacgcctggctaatttttgcatttttagtagannnnnnnnnnnnnnnnnnnnnnnnnnnnnnnnnnnnnnnnnnnnnnnnnnnnnnnnnnnnnnnnnnnnnnnnnnnnnnnnnnnnnnnnnnnnnnnnnnnnnnnnnnnnnnnnnnnnnnnnnnnnnnnnnnnnnnnnnnnnnnnnnnnnnnnnnnnnnnnnnnnnnnnnnnnnnnnnnnnnnnnnnnnnnnnnnnnnnnnnnnnnnnnnnnnnnnnnnnnnnnnnnnnnnnnnnnnnnnnnnnnnnnnnnnnnnnnnnnnnnnnnnnnnnnnnnnnnnnnnnnnnnnnnnnnnnnnnnnnnnnnnnnnnnnnnnnnnnnnnnnnnnnnnnnnnnnnnnnnnnnnnnnnnnnnnnnnnnnnnnnnnnnnnnnnnnnnnnnnnnnnnnngagttcgagacctgcctggccaacatagcaaaatcccatctctactaaaaatacaaaaattaccagggcgtggtggcaggtgcctatagtcccagttacttgggaggcagagacaaggagaactgcttgaacacaggcggtggaggttgtagtaaactgagatggcgccactgcactccagcctggccgacagagcgagtctgtcacctgtctcaaaaacaaacaaacaaacaaaaacactgaagaagaagggaaagagggagagagaggggagcaactcaggcgtaagctgcagctagggagacgaaatggtcttttgtctggtatggtctcaactttagcatcgaaagtctctagtcccaggaaacccatcagtcctgggcaaacttggccttttggttaccttagcttagctaaagggaaaggaagagggtggggtctgggagagggtggggtctgcatttatcaaaagtagaaagaggactggggagaccagggcaaaagaataaatgtgcaaagtgcagttcaataatctgtttgtatgcctgaggtctgggactggatctggattttatattcaggtcatccaccaggtcttaagggtttagattctggaatttataaacaagggtttaaatcttctgagactccattttctcatctgtaaaatgggtcaattaatagtactttgctcatggagttattaaaagggttaaactagacaataaatgtaaagtactcagcatcgtgcatatggtaagtaaatagtaggtattagtgctattacctggcttctagtggttgcccagtaaatgtttaatccttaatggcccctcttgatccctgatgaaaggggtcaggtagaaggcttggggcgggggtgtgatttttgtcccaggctcgcagccccctcttgactcctgctaggagagggcaaagtactgaggacttgccatttacctttgttgatgcagttaagggcttctggggaagcgggaattaatccaagagggagccgggtctatccatgggtaaatgaatctgaccaggaccttcatttgcaccctaaatgccatccagccatcatcttacatatccccagtccattcccccttccactctcctaggtgacaacttcccacctcctccgtgcgctgccacctacaagagctcctcctcccttgcaaccaatggccttgttcctggcttgtccagcaaactgaaaccatcgaaaaaggactttgccgggagcggtggctcacgcctgtaataccagcactttgggaggccgaggcgggctgatcacaaggtcaggaaatcgagaccatcctggctaacacggtgaaacccagtctctactaaaaatacaaaaaattaggtgggcgtggtggcgggcgcctgtagtcccagctactctggaggctgaggcaggagaatggcgtgaacccgggaggcggagcttgcagtgagccgagatgcgccgctgcactccagcctgggcaacagagcgagactccgtctcaaaaaaaaaaaaaaagaagaaagaaaagaaaagaaaaaggactttggcagcctctgccaccatatgtacccaccaatctgccttcccacttgccacttgggatgaactgtcccctgctcttagctcaaaccaacaccatcccctctcatccacgcaaggacagctccctcaattctctcctttcctgcgctgttaaatattccctcttcactacatcactctcattagcataagaacgtttctgatttctcctgtcttaaaaaactttcccttgagcccacttcctcctgcagccactgcccacttctctgcttcccatagaaacaaaatattcaaaagaggccaggcgggtggcatgcgtctgtagtcccagctacttgagaggctgaggcaggtggattgcttgagcccaggaattcaggtccggccctgtctcttaaaaaaaaaaaaattcaaaagaattgtctatatctgctgtctccttttcctcttctcacctccctctctctttttttcattgtgaaatgtaaagcttgtagaaaaatgctgaaaacattaatatactcataggacccagcaatcccactcctgggtatatgcccaaaggaatgaaaagcaaggattcaaagagagtatgccaacattgtatgccaatattcacagcagcactattcacaatcgccaaaaggtggaaacaacccaagtgtctatcagcagatgaacggatagacaaaacataatacagtcattcctcagtatccatgagtggactggttccaggaccccagcagataccaaaatcttgggatgctcaagtcccttaaataaaatggtgtagtacttgcatataacatatactttaaatcatctctagattacttatatcatacctaatacaatgtaaatgctatgtaaacagttgttatagcatattgttttttatttgtattatttttattgggctttttttgggtaatattttcttttttttttttagagatgggagatctcactacgttacccagactggtctcaagctcctgagctccaaggatcctcccgcattactctcaagtagctgagactacagacatgggccactacgtatagtctttcaatattttcaatctgaggttgattgaatctgagaatgccaaacccacaatacgagagccaactgtgtatccctatcatagaacagtatttagttacacgaaggaacgaaattctgatacatgctacaacatggatgaatcttaaaaatgctatgctaagtgaaagaagccagacacaaaaggacaaatgctgtatgactccacttatacgaaatatctagaataagcccctggcccgccctacctgtggcgtggcgtcagcagcggctgcgttagaggcgggtggcggcgcgggtgtttacgtcaggtcgcagggtgtcgctggcagcatggcggactacctcatcagcggcggcacccgctaccagcccgaggatgggctcaccgcacagcagctctttgccagcgctgacgacctcacctacaacgatttcctgattctcccaggattcatagacttcctagctggtgaggtggamctgacctcagccctgacccggaagatcacgctgaagacgccactgatctcctttcccacggacactgtgatagaggccgacatggccatcgcgatggctctgatgggaggtattggtttcattcaccacaactgcaccccagagttccaggccaacaaggtgcagaaggtcaagaagtttgaacagggcttcatcacagaccctgtggtactgagccccttgcacactgtgggtgatgtgctggaggccaagatgcggcatggcttctctggcatccccattactgagaccggcaccatcggcagcaagctggtgggcatcctcacctcccgagacatcgacttccttgctgagaaggaccacacaccctcctcagtgaggtgatgacgccaaggatggagctagtggtggctccagcaggcgtgacgttcaaagaggcaaatgagatcctgcagcgtagcaagaaagggaagctgcctgttgtcaatgatcatgatgagctggtggccatcatcgcccgcacggacctgaagaagaaccgagactaccctctggcctccaaggattcccacaagcagctgctgtgcggggcagttgtgggcacctgtgaagatgacaaattccgcctgggcctgctcacccaggcgggcgtcgatgtcatagtcttggactcgtcccaagggaactcggtgtatcagattgccatggtgcgttacatcaaacagaagtacccccacctccaggtgattgggaggaatgtggtgacagcagcccaggccaagaacctgattgacgctggtgtggatgggctgcacgtgggcatgggctgcggctccatctgcatcaccctggaaatgatggcctgtggtcggacccacggcactgctgtgtacaaggtggccgagtatgcctggcgttttggtgtgcccatcatagctgatggtrgcatccagaccgtggggcacgtggtcaaggccctggcccttggagcctccacagtgatgatgggctccctgctggccaccaccacggaggcctccggtgaatacttsttctcagacggggtgccgctcaagaagtatcagggcatgggctctgtggatgccatggagaagagcagtagcagccagaaacgatacttcagcgaggcggataaggtgaagttctcgcagggtatcttgggctccatccaggacaaagggtccattcagaagttcgtgccctacctcatagcgggcatccagcacagttgccaggatatcggggcccgaagcctggctgtccttcggtccatgatgtactcaggagagctcaagtttgagaaggggaccgtgtcggcccagatcgagggtggcgttcatggcctgcactcttacgagaggtggctgtactgaggagagtggtggaggccgaggtggttgaaggggcgtgccccgctttccccctttgggcacagcctccctccttaactgagtgatccacagatttacactatgggttccccagctcctttccagggagagaggacgggaggccctgagggtactgttgcccctcgctgggcatctcccacaaagtcaggaccgctccctgggccaggctgccctgggaagcccagcccagccagccaggctctcaggccctgcgcctgcctcaggtctttcttgctgcagcctgctccagcccggcccccaccccaggggcaggccgcccctcctggcttctcctgtaggacacctccctgccccccagctccccaagaaatggcactctcctggccctgcctctggcccttcccaggctgctgccccctcagccatgtggcacttctgagctcctgacctaggccagcgggaggtctctgcccgcttctccggcactgggctccaattgagtcctgctcctcaggccactcccctgtccctggccctggggaggacactgccctggtcatggccacctgcccatcgttcctgactcaccaccgtccccaggtgtgccattcctgccctctcctcagctgcagtttaaggctttaactttgcacactttgggatcacagttgcgacattgtgggtattaaataattggaataaatcaagcagatctcaacgcctccaaaaaaaaaaaatctagaataggcaaattcatagagacaaagccaaatagaagttactaaagagacaaagccgaataaaacttaccaaaggctagggagaggggagaatggggagttaatgcttaatgggtaccgagtttctgtttgggtttatgaagttttggaagcaggtagtgtgaaggttgcacaacattgtgaatgtacttaatgcaattgaattgtatgctgaaaatggttaaaatggcaaattttctgtggtatatatgttttactacaatttcaaaaaattaataatttaatataccaaatgccagagacttgtaccgtttaaatgggtgaattataccttaataaagctgttaaaaataaaattgtaaaacataattgtacagtttagtgagttatcatgaagcaaacacttgtgtaatgaccactctataatcaagaaccagaaaaattttgagactactctggccaacatagtgagaccccatctctaatttttctttaaaaacttatttttgaaaaagtaaaaaaaaaagaaccataacattgccagcaccaccaaagcacccccctgtatcccacccattcccactcttctccccactaacctaacttcttggtagtaatttcttagcattctcttatacttttacagcctagttaggcatccctaaacatactagttcagttttgcctgtttttgaattttatataaatgagataacatagaaagtgttcttttgtgtctggtttcatttgctcatcattatgtttccgagattcaactatgttgttggatataagctacaggtggttcatttgcattgctgtacactagtgttccattgcattattttttcttttgagatggagtctctctctattgcccaggctggagtgcagtagcacaatctcggctccctgccacttctgcctcccgggttcaagagattctcgtgcctcagcctcccaggtagttggattacaggtgcccaccaccttgccggttaattttgtattttcagcagacagggtttcaccatattggccaggctggtctcgaactcctgacctcaggggatccgccatcctcggcctcccaaagtgctgggattacaggtatgagccaccacgcccggccgcatttgtatattaaaatgtacttacccattctattgttaatgagtatttgctgctatgagcagtttatgcgtgtacatgcatttctgactgatataaaccttggagtggaatttttggttctcagcgttatgcatatcctccactttggtagataatgctcaattatttttgaaaatgttctatttcacactcccactagcagtgtgaaagttcctgttgttccatatccttgcaaagacttagtattgtcactcttaaactttagccattctagtgggagtataatggtatctccttgtggttttcatttccatttcctttctcactaataagattgagcccctttttgtcatttatttgcactcttttcctaaatgcttgttcaaatctcttgcccacttttctactgtgtttgtccgtcttttgcttaatgatttgtaggagtgtttgtttgtttgtttgtttgagacggagtttcactcttgttgcccaggctggagtgcagtggcacgatcccggctcactgcaacctctgcctcccggtttcaagtgattcacccaccttagcctcctgagtagctggaattacaggcacgcatcatgacaccctgctaatttttgtatttttaacacagacgggctttcaccctgttggccaggctggtctccaactcctgacctcaggtcagccaagtttcatttttgcaaatacaggtatccctttatccctgtaccatttattgaaaagatcattctttttccactgtcttacaaggttacctttgttgtaaatcaaatttccatatacgcaaagatttgtttctggaccctctattatgccatgctggtttatttttatttcaattattttcagttgtatatactgtcagtttataagtcttaatacagagtagagcaagtctcaatcttcaagcatgtcacagttcttgggactttgaattccacaaactttcagtatggaatttccataaacttttaatttgtcaagttccacaaacagacaaataaaaacaccttttcagattttgattatgattgcattgaatctgaagatcaatttgggaagtatttatatctctatagtattgaaccttccaattctggaacatggtatatttctctctctctctttttttttttttgtttatttttgaatatttctctcagtaatgtttaatagttttctgcaggacagcttgtgctttttttaaaaaaagtcattcctgagtagttgatattttttggtgccgtggtaaatagcactgaatttcagtttctgttggttattctattctatgtacccagtaacattatctacaaataattcattttactttgtcttgtctacttcttttacttttactttctttttctttttcttgttttgctggaatagctggcaccattgtagggatctttctctttctcctgatctcaaagaaaaggtttctatatttcaccatttctatatttcaccactaagtataatttttgctgtaagttttttgcagataacttccatcagaatagagaagtttgccaagagttcgtatctataaatgaatgttacttttataaaacattttttctggctgggcgcggtagctcacgcctgtaatcccagcactttgggaggccgaggcaggcggatcacgaggtcaggagctcgagaccagcctggccaatatggtgaaaccccgtctctactaaaaatacaaaaattagccaggcatggtggcacacgcctatagtcccagctactcgggaagctgaggcagaagaattgcttgaacccgggaggcggaggttgcagtgagccgagaacgcgccactgcactccagcctgggcgacagagcaagactctgtttcaaaaaaaaaaaaaaaaaaaaaaccaaacaccaaaaaaacacacactttttctgcatttttaaggaggattgtatatttcttgcctttcctgttaatgtggcaaattctattggttgattttctactatcaaaataactgtatttctgaaaaaaatcttacatggtaaaagtatattatctttttatttttccccatgttctattgctaggttcggtctgctaataatttgttagtgtagtttgtatctatgttcttgagacagacaggccagtaatttttcttattcataatgctcttgttgtgtttccttatctaggtaatgtgggctttaccagaggagtgcaaggagtggtccctcatttttactgtctagaagagttttataatattggtaatattttgcctctaaatgtttggtagaattcttaggggaaattatctagaactagagcttctgtggtgtgatgggtgaygcactgggagagatgtgggggagttttaaaagattcagtttattcagtatttctagaactattcagattttctatttcttcttgcatcttttttaaaatttttgtggagatggggcctcgctatgtttcccaggttggtcttgaactcctaggctcaagcaatctgaccacctcagcctcccaaagtgctgggattataaatgtgagccaccatgcctggccgcatctttttgatatgttttatttttctaaaactttgctcatttcatctaattttaaagtttattgcaataaaactgatcaaaatatcattttagtatctttgtcacatcagaaggatctatagtgatatcttttttaaaattcctgacactaataagtttgtgtcttctctcattttttctctatcagcgttgacatggatttatcaatttcatcaatctttttagagaaccaacttttggttttgttgaacttctctattacatctttgttttttatttcatgatttctactctttggtatttcattccttctacttcctttggtttaagtttgctgttctttttctagcttcttgatatggatgcttagctcattaattttttttgagacagagtctcgctctgttacccgggctatagtgcagtggtgtgatctcggctcactgcaagctccgcctcccgggttcacgcctttcttctgcctcagcctccgagtagctgggactacaggcgcgtgccaccacgcccggctaattttttgtatttttagtagagacggggtttcaccatgttagccaggatggtctcaatctcctgacctcgtgatccaccctcctcggcctcccaaagtgctgggattacaggcataagccaccgtgcccggcctcaggctttctcctttttccaatacatacatttaagggtataaatttcttaacgaatgctgctttatctgtgtcccacaagttttggtatatagaattttcattgtcattcagttcaaaatattgtcttattttcactattcacaatagcaaagacatggaattggcctaggtgcccatcaatggtggactggataaatgaaatatggtacatatacaccatgaaatactatgcagccacaaaaaaagaataaaatcaatgtcctttgcagcaacatggatgcagctggagatcataataacaggaatggaatatcaaatactgcatgttttcacttatgggaacaatagacactgtggactactggggaaagatggggatgtgggtgtgggttgaataactacctatttggtactatgcttactacctgagtgagggaatctgtaccccaaacctcagccccatgcaatatacccgcataacaaacctgcacatgtgccccctgaatctaaaataaaagttgaaattattattattagttatttttaaagccaaacacaaagagacttttacattatctttttagtattgatttttagcttattggcattgaggtagagaccatgcaccattttttgaaatttgttgaaacttgctttatggcccaatctacagttaatcttttgtaactatcttattggaattgataaagaagttattttctatacttgttggctacattattctttctatgcctattaggtcatgtttgttagttgagttgtacaaatgttctatatccttactgatacctttgtctgtttgtactatcagttactgagcaaggtttgtcaaaatctcccctatgggct

SEQ ID NO: 93323 - DNA, 62529 bp, Homo sapiens
  misc_feature (1)...(62529): n = A,T,C or G
ttgtttttgttttctagagacaggtattgctctgtcacccaggctggagtacagtggcatgatcatagctcaacacatcctcaacctcctatgctcaagggatcctcctgcctcagtctccagagtagctaggactacaggtgcataccatagggactggccaagtttgaatttttttagtagagatgaagccttgctatgttgcccagactggtcttgaactcctgggatcacgcaagccttctgcctcggcttcccaaagtgctgggattacacgcatgagtcaccaagcccagccataatttaacctttctagatcacaacttcctcaatcgcaaagtgagattaaaagtaattgtatcttttttaaaaaaagttcccagcacaatatatttactccctttcttccttctgccttcacattccctatcctttggtttgggagccagctccttcctggcaaccaaaccccaagatgtcatgaactgtgctcagcccaccatgccctgcccccactcccccccgccccccaaggattcaaaggtatcagagcatcccttgccctctatgctgccagcccagcctttgtctcccatatagggtccaggtctgtctgtaaattggaactagacttgtcttcacgtctattgctcagggtagtagaaaacactgagagatgttttctgccatgccaaataggaatcctcaataaatattccccataaactctgttataattggtggctagagtcyatattgccatggacactcttctatagttacattaaggactaaattgattttgcagactgatctgagagtttaaccaccatttgtaccacagtctctgtgggaaaatatattccatgttccgaacaattgaccctttggagttggtccagttcctgagctggggacggcatgtacaatattatgttacattttgggttttatttgtatgtcttagaatcagagacttgtttgagctagaagaagctttggaaatcatttattaatgggcacattttgtaggtaatgaatccaaggttcagaaagattgaattgtctaaggttattcagctgctttgttctcccacctccaagccaatgcttttcccactatccaagtcattttgtggtcattttcccacatagtcattaaacaacttgaaagttgggaagtcatgccttcttcaacacagactcaaactcactaagtgtttcataaatacttaattggttcattattctttttgcttcagaggtctattcactgtaaggttttcttaaataacaagtaccatagagcatttcaattaagaacttattatgatagactggatttggtttaaatcaagatttaaataataattaataaatattctatttaaccagtgtttcctatataaaagacctattggtgttggatgtaactctgatgaatatatttcacagctcacaaatagtttggctttagttttaacagacatatgctattaattttaatgtggtcttatatattatgagaagctactcattttataactacataaaaaaagtaatgctttccttgtcttatctaccaaaacccaattgaaacagagacataaaaaccagttagggccaggtgcggtggctcatgcctgtaatcccagcactttgggaggccgaggtgggaggattgcttgagcccaggagttcgagaccagcctgacacagcgagaccctgtctctactaaaaataaaaaaaaatagccgggcatggtggcacatgcctatggtctcagctactacggaggctgaggcagaaggattgcttgagcctgagatgtcaaagctgcagttagctgtgaatgagccactgtattccagcctgagtgaggctctgtctcaaaaaaagaaaaaaaattaagccatttagcggtaaacctccaactgaaaaggtgaattatatgtgatttggatatactacaggagaaacagagcaacaagaaacaaaacatttacagtacactgtttcatttgaaacaaatattcacatattgtatactttccctcatcaaacagttatttcctggtatccatttcagtgagcaggatggggggaggggggagcaataaaagagaaacattcttacctgtgtagatgacttgcttttattgtaacaaaggcaactggccctgtaatctaattacaagaaaaaaaggccacagataaactcttcaacaattaaatagtcattacttgtggtagctgttcacctagctttaattgccttatagttaacagttctaaatagccagttaactccttcaattactagacatttatttttcaatcactttatcttgaaagatacggatgtactatggagttagcttaagacaaactgagagagagagaagagagagttggttggggccaccggggaggttactgaccaagggcagggaaggaggcatttatttatatttgccttataattctgggggactaaactggctgaggacatgccttatggcttagctataattttggctattctcatatgtataatgaaatgaaaccaaaactaaatcttaagaacaaatcttggccctgcctggctgtaccacctaggcctggctctgtattgagagaggtggcctcctaatgatgcatatatgtccttgtctggttttccaattttcttgaattgagctgactataaaagcttaatgcatgcgatataaagaatggctgacctccagatacaactagtaaaatttcaacttaccactacttaagacttattaaacacttgattgagaagaatcatatttatggaaggacagcccaatgaatgttgattcattcatttaaaagtcatcttggattaagccagagcagcaaaaaactatatatcaccccctccacattttgctacctaaacttactcactttcacaccagattggctactggctaatactgacaggcatataagaaaaacatccctatgaaagtctttgctgcgtttactaaccggagtcaccaggctgctgtttactgtgttccgaaatgccttctctaaggacaatccatagagacagctctctggtctcaattcagagatggttgggttcctctgagcactggtttgcctttatctgataggcacagacattatctattagtaaaaataaaataataattttattaagacccctaaatcatgatgcccaaaccccttgcaatcaggaagtctagataaataacaggagtttcccttcatagagatttctggaattacccaaggatattaacatgcatgacccagatgcctccctaagccttatggtgtgctggcaaatgtttaacaaccattattcagaaataagacaggaaaactgccatctatgactggtaagattataggtgatttttgtattttttttcttcattttcccaacttccttcaggaaacacattttactctgaagggggtgagggtggtggctaatacttgggattatggtgagctgccctagaaactatcgggttattaagtaacacttaatatatgtaccagtttcacttcaaaatctgaagcattctgaactcttaattattttggagggatatcccacagaaaagttggctgaggccctagtgataaagctctttcttacagtggcccattcctgcccaagactccaggcactggaaaacctggtgggggtggagaaggtaacatcagcaggcaagtactcggaaccactctcctatctcctacctcttcttctcacgacctccaaaactctgctgagaccggcctccctctgcctcacttgtggtgattttctctcggatgctcactttctctctgtgcaatctttcctttgggtgtcccttgtctttaaacatgtctgcgtatacytgaactctaattgtggacagggttcaaagttctttttcatgggattcatgggccccatgaaaattagaggctaagtaggcatctaagtaggagcatttacgtgctcccaggcattctgttacacttaaagaggctcatggaagagatttgggcaagtggtataactctacaagctgctatattcaagtcctagttccagcttagccaaaacacctactccgattgcaactgatctttttcttggttgctagaaaactgagagtcatatgtgtagcctacctccagcaaaccaataggaccttacaccatgcattttgcatacaaaactgctggcttaatcttatctttcacactcacggttttcttttgtcctatttttctctgtacttatttttaatttaccctgatgtacacatttatgtaaactacgttaaatcctttcctctggaataaagtagggtgtaaataaatttaacaaaacaacaaagagtgatgatgagccaggtcttcactcctgaaggcctcaaaacgaactggcagtgatctgtgaaaactacagagaactgcccgttcatctccacagattactgaagtctgtgaaaactactccagccaggaccaccattatagcctgctgcctgttgtgttcacaatcgatgcacaaactcaaccctgaaatggagagaaaaatagggggaaaaagacattaggaaatcctagctctatgtcatctggacattagaaagcacttggttggacaaagctttttctcccccacagcacatgcctgtttcagcatctcagcccacattcacggagagggagaatatagcaattgttaagaatgcagactctagcactgcatgctctgctgtttatttgtgttatttgggctaggttttttaaccgtctgtgcctcggtgaatcccatctacaaagtagagataataatagtacctacctcacagggcagttgtaaggattaaatgaggtaacccgggtgtaacatttaaaacagtggcagagtacatacagggatctgaacaaatgttagctactattagtgatatgtgagtgggggaagcacactgccttggacttgaggcaatatcaagtctgagtttctggaaaaacacttgtggaataagtaagggctggccacctcctaaaaccggacaaaagatctggcttgcctagatccttagcgtgactgcttctcctcctgcctttctagaggcagtattacgtgatggaaatacttggtgggtgctgtgggcacaaagataagttaatgtgtttttatcccctaggagctgagtcgagagtaggagaaaaatgcataaataattaccaggtaggatgattaagcaatatactggaggcagcaacagaaacacaccgtggaaaaaaaatacccacggcgtggatgaagatatgagatgtgtgaaagcgctagacacaggcagccacctgcacccatgtaaaattggattattgctgactcctacaaggcccactttaacgcttctttcaaccagaatccctgcagaactaattttttagaaccgccggggataaagacctttatttgcaatgtcgaactccagcagagtaaccccttttgctttccacacgcgcaaacccgggtcccaaacgctgcagttcgcgtttcccggctaacggaagaaacacgaggaactgtttgcagatctaggggatgaagccaaaaaacggaaagcgaggccgaaagggcgcaaccaccacgtctggaggaggccagtgaagtagagaaaggggaaggtcagccctgccccagcgcgctctgcgtaaccgggacttcctccgcgcggcaaagccggggaacctccctggcgcctgcgccaccgtggcgagactcggcgccgtggacgtggagagagggcgacgcacctgcgcgaagacggcagcgggagaagccgctccagtgcggttgcgcggcggcccaggcgtcgaggggagcctcggcggggagcgcaccgcgcgcctgcgcggagagctgcgtgacgcggcggcgcgcaagggacgtgcggagtgagtggcgctgcgggtggggccgtcggcggcgctggtgagctttgcggagctgggcggtgccgaggaggaggaggtggcggcctgggtctgacgcggccctgttcgagggggcctctcttgtttatttatttattttccgtgggtgcctccgagtgtgcgcgcgctctcgctacccggcggggagggggtggggggagggcccgggaaaagggggagttggagccggggtcgaaacgccgcgtgacttgtaggtgagagaacgccgagccgtcgccgcagcctccgccgccgagaagcccttgttcccgctgctgggaaggagagtctgtgccgacaagatggcggacggggagctgaacgtggacagcctcatcacccggctgctggagggtgagtgcgcgcctggccgcgggacagagggaggtcgggcaccgccgccgacccctgcgtccccktctgccgccggaacgcgaggggacccctttcccgccccgagacgagtctctgggagcgcggcgcggcggacgaaccgaggagggggcgaggaggctctgggcgcgggggagcggcctctgggagcgcggtcaggggagatcgggggagagggggccgttcccgcggaccctcgggggccaggcccgccggccgaaggctgtgcggagcgggtctgcgggagacagcctttcggaaaggccgccgggctccgcgcgccgtggtgctcgcctccggtgacccgaggatggggagaggatgcctgccactgggctttgtgcgtccgtggaatcactgttcttctctgttctctttgtgcattgcccttggctgcctccgattgtcgttccgggagtgaattttacgtatatatatataaacctgtccttaacaggactgcttcgtctgctctgcatttttacacaatgctatatagaatggattcttcttaaagagaggataaaattagcgggaattaatctaccgtttgttacttggcctaaaaaaattgtaagacaagatatttgatcaggttgaagatgcacgtaagaaatgtgatgtatgtagatgggtttgctgaagggattggcttttgcatttgatttgagcagagcttaatttctgcacaaacttagtgaaaatctatttttaaagcctgtcttgtattcgaaaggtatttgtaggtctacgcagcatttgaactttccgggctcaagtgttcttattgaatagttttatgttggtgggaaggcaaggggggaaaacgaagaggtggactagccgggagttaaatgtattgattcattgcaggatattattcaaagttaaatgcagtcttctgccaaacagtccctctaccctaaagttttcgtcatcaataattgttttgtgagtgtgtagaaaagcctttaatcctttttaaacaatttagaggcctcctttgttagccgccgtccagcgattgcatatgtactgtttgctttcaaattaccttaagataattgctagagtgaagcagtatgtacttatatttggaaaatcatcaaagaatattgtaatgggggaggggtaattcctttttctcaaagtatgtgtcggtatctcaaacccaagttctgtgagtacctgttctgtaactaaatactgtgtatttgctccagatgtgaaagccatccagcagtcttaagactgaataggaagcaaaagttttaccaggaactcttatttaccttttcctttactatcaagttattcctgggrggccccctggtgcctgcagtcagtgttcactacctaagactttgtttcagatgtgaacatcttgctgggtctttgagaaatttgctttgaaaataattgtattttgtaactgttttatgagggaaatacagttaatttaaaaatgtgtatgtcttgtttacatttgggaagtagaggcctactcctttttattttttttttatttttattttttgagacggagtctcactctgtcgcccaggctggagtgcaatggcacggtctcagctcactgcaacctccgcctcccgggttcgagcgattcttccgcctcagcctcctgagtagctgggattacaggcaccccgccatcatgcccggctaattttttttgtatttttgtagagacggaggtttcaccatcttggcctggctggtcttgaactcctgacctcgtgatccacccgcttcagcctcccaaagggctgggattacaggcgtgagccatcgcgcccggcatatttttatatattttaaactttgcttgtaaatttaaatattttaaaaatatgtttgtatctcaatttatttatattttatttcattttccatatattttgtaggcataaaacagatttatgttttaaaatgtttgtatccttttaaattagacgcacctttatatgattacaggtacttaaacttcacgagtgggttgtgcaaggttactagaaaagacactgggggaaaaataagtgattccatttgtttttgtgaattcaaattaaatatttggtttgtacaatctgttttccttttttgggggggcggggggggcgggtaagaattgtagtccagacacgtttctctcttaatttagcaagcgttarcaagttgacctcctccttgccaggcaccagcaatcctaagataagacacagtctcttcactcaaggagctcccagtctaaacaagtgtctttcaggctttttcagcctcctctctgtcctatgttcagcacacattctatcagtacttcttcatcctacagaagcatatttagtttgacagtgcccccaagggattcttaaatattctaggtttttcagctccttcccagatccagacctgttgaaagacttgtccagagcagacttgaattttctagtaaataattatttttaatcttcaaagaaaattttgtccacctggattttcagtgatattagatgctagttagtgatattttgtaaagctgcctagcaagaataactatggttagtgtttttagtgtcaaatgaacgtgtaagtaaaaatttggcaagaatttctctgcattaggggaaaacattcagcaggacctgatctcattttaaaatgctgattgtagccccacaacatattcctgattgttttttcttttttactgtattaaatcgcagatcagctatacacacttctggtgactacattttatgagttgctttttgtttttcttttttaggtgggcgtattattgataagttttttttgttttttgtttttttgagacggarttttgcgcttgtcacccaggctggagtgcggtggggtgatgttggctcactgcaacctctgcccctgcaggtccaagcgattattctgcctcagcttcccaagtagctgggactacagcatgccaccacgcccyggctaattttgtatttttagtagtttcaccatgttggcctggctggtctcgaactttccatcctcaagtgatccacccgcctcggcctcccaaagtgctgggattacaggcatgtgccaccgcgcctgaccttgatatgatattttcaaagagtcctttaggtcattttaatacaaacatgccatttaatgtaaaacagaaatattgattttattatttggacggtgcatattctttcggtatgttttcttggattaacttttgcttagaactaaaaaccaaagacttctactttatcccctgtagtgaccctgttggccacattcttgtggcttaccatagtgttttgatcatttaaattgaagctagtttgtatgagtattctggaaaatccggtaaaagcttcttacttagatgagtggttctcaaagaggggtgggaaatgggagtatagcagaatcatctggggaacttcattcaaactataagtgctaagtttattttggaggaagtgaagtggaatgagtagaatctaatgcatttgggaggaggttagtatggaaaactgctgctgggtgaataagagtgccagctctgttcccaaccacagtcttgatccaggtatttaaaaactgggatgtgccagttgatatagtatgtctattatgtgtcatatatgtgataatatgaaactgtttagaatttgctttttcctgattatgaaagggcagcattctttcaagaagtcccctgtaattccacaatccagagataaccgttgttgaaattttgatatatttttgtttaaagatacttaacatactttgtaaaattcacatgctttacatcattagaatattctttacatagctttatgagttaatttttcatgtagtattacatcatgaacattttcccttgtcattgaaatgtcttcaaaaataccgaaaagcgatttgctgtgtgatagaaaagtttttcttaaagtattttttaacatattaccacgaagctgaacttgactattacaatatgagttgtagaatattagcactgtgtaaagttccatagcaaaatgtgattgtgttacatttttggcccacttacagttttatgaaaatcgtgggatgtgtttgtacctgttttgttttttaaattcatttttcatttaactttgacctgtcagatgtctgaatttgtgacactgcttgtgatctcttagtgcgtatctcccttttctttcttgtgaaacaggtatagtactcttaagatttagttaggctgacagactacacttttaacttttcctattcaagacaggctggaatgcagtggcttgatcatggctcactgcagcctcgacttcctggtctcaatcgatccttctgcctcaacctccctagtggatgggaccacaggcacatgacaccttggctggctaattttttttattttggtagagacggggtctccctatgttggttgcccagtctggtcttgaacccttgtgctcaagcaatcctccagccttggcttcccaaagtgttgggattacaggtgcgaggtgctgcgcccagcctgtagtgtccttttgaaggttaaaaaaatgaatggatttgaaaaatgaaatcgattaatgaaagcatattaaagccctccattttaaaatgacagctttatccagatataattcacataccatacagtttgcctatttagaggatatgatttttagtatactatagagttgtgcagccatcaccacagtgaactgtataatattttcaaacacatataccccccaaaaaaccctgttcccggtagcagacaccccatttctctccattccctcccggcccccactaatctacttttttttgtctcttagatttgcctattctggacgtttcatgcaagtgaaatcatacaatatgttgtcttttgtgactggtttcttttaatgtttttaacattcatctttgttgtagtatgtatcagtactttattccttttatggctgaataatattccattgtatgtatacaccacatttttaattcattcatcagttgatggacattttgttttctttcggctattgtgaatacttgtagtgctgctatcaacatttgtgtagaagtttttttttgtgggcatatactttcaattccgttgggtatatagctgggagtgagatttctaggtcatatggtagccctatgtttaactttttgatgagctgccaggttgtttaaggcctctttactgattaaattgtttaattctgacccagcaacctaaaggttaggtggttggaaagaagtgtcagttgttgccgacaacctccacttctgtagggaaggtgttttgtgtggatgtgcagctagacttgttagaaaaaagagcatgttggggagtgggggagatcacccgaggaatattttatctccttgattcttctggatgagatactagaggagacataaggtcgtggcatattttttaactgattcagagattaggtgtttgttttctctgaattaagttcagcaagtaagggaaactgacagtttgaagaagtagcccagaggtgtttttattttgctatctgaatgcagacctggagcttttctggtaaatatctaaatccaagatgaagattcgttgggatttaatacattatttaaattgagtctagagacaaagccacattaagagtcaggattagtggggaagatagttgcatctagtaggtctttttcttccttattctccacgtttattacttttaaaagagtatacattccaatgccatgcatttttaattttttttaattaattttttttttttttggaggcagggtctggctctgtcacccggttggagtgcagtggcatgaacatggctcacctgcagcctcaaccttctgggctcaagtgatccttctacctcagcctcacaagtagctgggaccacaggcatgcaccactaattaaaaaaaattggtagacacagaatcttactttgttgcccaggccagtctcagagttctgggattacaggcacccagccccattttcaaacatttctaacaggtaaagtaatacaggtatgaaggaatgttaagattcttagaaatactgacttaaattctgttatgtatttctgaaaggttattctcgaatgttggtggcatatagggaggcaaggggaagaaatagtttgtaaatgtcagtaggtttagcagtggtgtggtagatggggattcccagtggagtcttctaggatttgtgattggatacagattgatacccttaggcagcagccactgcttctagcagctttaaatagccatttcaaggcttattcaagtataaataaccagtagccagttttttcctgatttgatagaggaagtcagtccttggtctagatgggtacttgtcatacagtaggaaaaagggcgggggcagttgtcctttattctgcctctgcactattcacatgtggagcacagtgatttgtgagagtatgtataaccttcgtgaacatcactggcctcagaaccctcccttgccaaatttacctgcatctgtgcaaagacaagtggagatattgatgatatgtgcatatcccagagggaatagcgtttgctttttgatgcatgcccacccttgcataattgggaggttttaacatagcatatttcaccataaaggaattttattctaagaatgttaatcagaatatccctaagtaacagaagttcccatctggtcagttgcaaggtgaccaaaacactttcttggtttgagtatagtcatatgttctgtcaaatgatgttttggtcaacagtggacttcatgtaaggtagttagtggtcctgtaagattagaatggaactgaraaattcctgtcacttagtgacatcataggcataatgtcatagtgcartgcattactcttgtttgtggtagtgctggtgtaaacctattgcactgccagttgtgtaaaagtacaacaggccacgcgtggtggctcatgcctgtagtcccagcactttgggaggccaaggcaggtggaccacttgaggtcaggagttcgagaccagcctggccaacatggtgaaaccccatctctactaaaaatacaaaaattagctgggcttggtggcatgcatatgcctgtaatcccagttactcaggaggctgaggcaggagaatcacttgaacctgggaggtggaggttgcagtgagcaaagattgcaccactgctctccagcctgggcgaaagagtgagactgcatctccaaaaaaaaaaaaaaaagtataacacaattatatagagtacataatacttgataatggtaataaacagctatgttatatatttaccttttttttttnnnnnnnnnnnnnnnnnnnnnnnnnnnnnnnnnnnnnnnnnnnnnnnnnnnnntgtatttttagtagagacggggtttcaccgtgttagccaggatggtattgatctcccgacctcaggtgatccgcctgcctcggcctcccaaagtgttgggattacaggcttgagtcactacgcagggccctggaatatattcttattttaaaaaactagttaacttaaaaccgactcaggcatgtccttcaggtggcattccaggaaaaaaagcttcgttatcctgggaggtgatggctccatgcatgttactgcccctgaagaccttccagtgaagatgtggaggcggaatatagtgttactgatgatcctgactctgtaggcctaggctaatgtgtgtgtatatggcttagtttttaacaaaagtttaaaaagtgaaaaatatttttaaaaataggaaaaggcttaataggataaggatataaagaaaatattgtacagctgtatgatatgcttttgttttaagctaatcgttactagaaaattcaaaatgtttaaaaatttttttaagtttccaaagtaaaaaatgttaagtaagcaaaggttaatttattcttgaagaaagaaaaatatttttatctttattactgtatatacattgtgccttttctgtgtttagatatgtttagatatacaagcacattgtgttacagtagcctgcagtattcagtacagtaacatactgtgcatcatgctttgtagcctaagagcaatagactataccatctaggtttgtgtaagtccactctgtgatgtttgcacaacaacaaaatcacctcactgtgcatctctcaggaagtttccctttggtaaatgatgcataactggacttgtctgacaccattttaaccttccccctagtcctacctctcattctcaagatttggagaaatcaaaatctaagttttcataataaaaggttaggtatattgggtgttacatagctttcactaatgtcatatctagcagttgtaatcacgtattttaaaactttaaatagtaaattaagaaggaatctttataggtacttgtatgtttcctcaatgtggtttgaattgagcgttttatttaaattactatcaaatacttgagccaaactagcgagacaaaaagaccagaccttttcttttttccgagatggagtctcacactgttgtccaggctggagtgcagtggtgcagtctcggctcactgcagcctccgcctcctgggttctagcgattctcctgcctcagcctcctgagtagctgggattacaggcgcctgccaccatgcccagctaattttctgtatttttagtagtagagatgggatttcactaaatctcgaacacctgacctygtgatttgcccaccttggcctcccaaattgctgggattactggggtgagccaccgcgcccggccgagaccagacttctgagggggagaaacttgcaaacctgtcagtgagaaagagtgaggtctgattttagatgacagaaaggaatagcttttgtgaatttcggactcccaactactagaattatgtgaatcctgaatgataatcagatgtttactcagttaagtgtttactcaaatattaataagtattgatacattggkatgccatcttatataatgattaacgacacagattctgggtgtatttcagccccagtttcttctgcatatatgatagtaagtgccttcaaacaattcttgacacattaaaggtcagaaaatgttagccgtcattattgcttagtacaaacctgagctaggaaatamtaacagagagctctttgtgccactgagtcctggaacttccccatactaattttgagaaggctttcttgtaagtatgtgacagatactgtttcctccactttctgtttattgcatataaccactattcttgtatgtaagtacgtataacagtttctttactattcccattattcagcgtttataatctggtttgacatatcagtgttggtgctgagagggaaaggtatttctaggtaggataaaatggtgaaaagtgatttaacactgttgtatgcttgcttttggccaggaactatagggcagtgtatcttaaactttgagtcttgagaccctcttacactcaaattctccatatatgtaaagaattgaaaacgagcttttatttatgtgaggtatttaacaatattgcattagaagttaaaactgagaatttaaaaatttctgttctcggccgggcatggtagctcacacgtgtaatctcagcactttgggaggccgaggcgggtggaattgcttgaggccaggagttcaagaccagcctgggcaacatggtgaaaccccatctcctaaaaatataaaaaagttagctgggcgtgatgtcacatgcctgtattcccagctacttgggaggctgaggcacaagaattgcttgaatctgggaggcagaggttgcagtgagctgagattgcgccactgcactccagcctgggcgacagagtgagactgtgtctctaaataaataaataaatatctgttctttaagtagcaacatattacattttagcataaatgttttttatgaagataacttttctaaagcaaaaatgtgagaagtgccatcattttatgcaaatctaatgtctttttaacagaagacagctgaattcacatctctgttttgtttcagtcttttgataccttgttttagttgaatatgaagaaagtctgtagtcctacagatacgtagttagaaaaaggaggagtagtttaatagctgttctagataattgtgggtattctctgatgtttataccaaaaatcagcaagtggtggttttttaaaggtgaattttaaaagagatgtggaatctgaaattatatccatgaatttttatgttctcttacattaaaatccattgatctttcttgtactttaaatggatcttacacatgactttataatacgcgttgttcatttggataatattgattcagctgagttatgcagatgtccagatgttgaaacagcttattatstaatacagtatccagaaatgacatttgttaatgttacaagatctcatcagaagagtccttaattatggagaagctgtcagattcatggtgctgattacaaggtttctagaattttagtttgtaacttgaaagcttgaattttatcattggcaacaagtactgtcagttgttttccttgaaatgacagggtcactttgttcatgttcacgtgtatctgttgaatatctaagtctgaataaccatagtttgtcagttaatactttccagtaaaagtgtttagtgaaaaaaagtgtctaggtctgcttggaactaaaacagtcacmggagtgctttcctttgcgmcaaccattgtactttgggatggagcaggagtgctttgtgggcatttccattttatcatgtagattattaaagagatgtattcaaagattgaagtttaataaaattgatcatttgtactgctttaccaaagggcatacatgaagctgccttttttgtgtttcactgcatgtgtgttgcaatgaacaacacagtgactgactaccagtggggtttggtgccactgacttggtgtgtactgagacacttaacagttttacccatccttgcttttgtattatcaaagcagatgtcagtgcagtggaaaaaaaaaaaaagtcctttattcctgaaatgtctagccctcacctatatctgtcacttttcttcttcactcttttctcattatacttgctatttgtttaccaatgtacctgaaatgactttttacttatgctttgtgaattcatgaaagccatgggccttctcagaaaaatatttttacatatacacaatattacagacaatttgtggtactatacagagccactaaaggccattttggtctctgaatccacgttagttattcttttgttttgagacggagtctcactttgtcacccaggctggagtgcagtggcaccatctcagctcactgcaacctctgcctcccgggttgaagcgattctcctgcctcagcctcccgagtaatctgggattacaggtgcgcgccaccacacctggcttattttcgtatttttagtagagacggggtttcagcatgttggtcaggctggtcttgaactgacctcctgatccgcccaccttagcctcccagaatgctgggattacaggcatgagccaccatgcccggcccacattaattattgttaacaggcagtcctaagatgagagggaagtacagcagctgcctaattttttttcacttaaaaccgtgtgtgtgttgtgtgcatagagaaagatggggaggaaaggaagacagagtgggagagggagaagaaaagcaagagagaaagaatgaaaaagcaaagggggctggacgtggtggctcacgcctgtaatcccagcactttgggaggccgaggcaggcggatcacgaggtcaggagatcgagaccatcctagctaacatgctgaaatcccgtctctacttaaaatacaaaaaattagctgggcatagtagcacccacctataatcccagctactcgggaggctgaggcaggagaatggcgtgaacccgggaggcagagcttgcagtgagctgagattgtgccactgcactcgagcctaggcaacagggcgagactccatctcaaaaaaaaaaaaaaagagagactccacattttagccaattgtagaatttttatttttctgcctttttgttgcttaaaagcaggcttttgtgctaaatatggagaaaatgctaggaaaaaattaggatgtctagatttaactgccattaattagtatgtaatcttgggggtgggggttgagtaagagttagaataccagtggtcagtgaagattactaagattttatgaggccaaggcgagtggatcacttgaggtcaggagttcgagcctgggcacatggcgaaaccccgtctctactaaaaatacaaaaaattagctgggcatggtggcacacacctgtaatcccacctacccagtagattgaggtaggagattcacctgaagccaggaggtggaggtttcagtgagccaagatcatgccattatactccagcctgggtgacagagagaccctgtctcaaaaaaaaaaaatttatgagacaccgtgcataggtgttggaattagtgcttttttcttgccatcttttctgttttagagaggtaatgataagtaagaacttgctggggaaagtagcataaggttagtgaaaagtaaaatttagtatacacacaacacacagacacatatatatcacatacccttggatatgtgcgttggaaagacaaacctgcaatggaaaagtttttacactgatataaaatgtgaaatataatggttgagtaaaggacagaattcttttgggagaggatacacattttgcttaattgagattcaaagttaatgttctctgtcatcaaaactgattgcaagtggtcatctcttgatgctgatctgtagtgagattctatgtatttcatcttagaagatgtctttttacacagggacatactgcatattcatcacttggaaagcatttatagaattctcctgatacttgcctttcagcatgtcattacattgcagattaatcacttccagtagagggttaggtggaagctcctcggctgcacagttaaatggattttgatatatggaaattttttttgcgcttgagtcaaggtttgaagaatgctagtttgagtttgaaaaaatgtatctgctgcaaaattgtgtgggaatgaagatctcacttgtcttaacttggcagcacgggttatgtataaagcagtttgctgactgggtatggtggctcgcgcctttaatcccagcactttgggaggcggaggcaggaggatcacttgagttcagcagtttgagacctgcctgggcaacatagtgagaccttgtctttatagaaaattaaattagccaggtgtggtggcatgtgcctatagtcccagctacttgggaggctgaggcaggagaatgtcttgagccagtaggctgtagtgagcctcattacaccactgcactctggcctgggcaataaagcaagaccacatctcaaaaagtaaaaaattaaaaaataaagcaacttgctttaattcagacagtattagttgtcagaatgacttaccacaatggaagtttctcatatatttttttgccttataattttaggctgaatttattagaaaacatttaggggagctttcattctattttgtagaatagaggctacctcgaattaaaaggggaaaaattactagatctgccgcaaaatttaatttctaaaactcttctgtgtttggtaatagtgattgagggtggtggttcttgtttagaaaaaattcagtatcagccctgaatgcaaataaattacaataaagctgtcactgctaagccatcaaaatcctgtgtggttggccaaatgaggatattcagcttttattactaacaaatagtcatgtaactgacagtggttaagttcattagagcaaatgaagttgaccattgatgcctgtggttcagtaatacctgattaagatatttttccacaaaaaaactgcaccagacttcaaacatcctacattttctcagactttgtaaaatagtccaactaagtatttttctactttaccatcatcagttgtgacatatcttagcagattacacttcaggttgtactaaaatagtttttctcagctgctttgagaatattcttgcctctagttgttccacatagattatttatagagggtaacttttcagtcacttcgaatgaggattggctccccaaataacaagtattggtaatacctgtcatcgagagccaaggaacaccactcagaaccatttggcttgttttttaattgtttactaattttgctcccagtgttctcaactcttcaagcaccgtttttacagaaaggctaatggcgtttaaaagtttattgtctcagctggggtggtggctcacgcctgtaatcccagcactttgggaggccaaggcaggcagatcacgaggtcaggagattgagatcatcctggctaacatggtgaaaccccgtctctactaaaaatacaaaaaattagccgggcgtggtggcgggcacctgtggtcccagctacttgggaggctgaggcaggagaatcgcgtgaaccagggaggcagagcttgcagtgagccgagatcacaccactgcagtccagcctgggcaacagagcaagactccatctcaaaaaaaaaaaaaagtttattgtctcaaaaaatacatagttcttcagcttttccaatcagatacaatttaattaacccaccattgataaatgacttaacttggctaacaaatgggccacttggaaacttgagttgcagactcatttttatttttgtgaagaaattctgctgtgatgagatttcattttaattttttaaaaagttcccttaccattgctttactatgaattgggaatgctgtggtgagtgctccatctggtaacatcagtatatgttgtggttttttttttagcacagctacataatgactacaatgccttagcacccaattaaataacataatccacactttattgtgtcttaaaaacacaacattcaaagttcactttttttgctttgacatgatgagtatgcactggtagtaaaagtaaataaaatgttgcagtacagcaataatcgtgacacccatgacgctgccaggttgtaactgcatctgtataatttgtgatgcaccgaaaagcagtgtgaagtgatgagagtaccatatgtagtccatcacaactgctcagctctgccattgtagcatgaatgtgtccagtgataaataagtggctatgcttcattaaactttatggccaccaaaatttgagtttcatataatttttatatgtcacagaggattcttttgttttgcttttttgcaatcatttaaaaaatgtaaaaaattattcttaggcccctagccatgcaaacactggcattgggctagatttgaccccttggccttagtttgctgaatactggtgtagtttttctgcctttcctaatgtaaacatgattgtagaaagataaccttactggaagtcaggaaaccttggtgctcccaccaaagttgtgtgactgattaagtcaggtgaaataaattgggattaggagccatggtgtctagtccttgacaagtcattcctcaatttttttaatgtaatcacctgaatttctagtgtatgcataatcacattttgtgtgcctctcggcagccattccattgttgaagaggcagccaacacagaaaattgttgaggggttttgatctttgacaagggaagcgtatagtgtgagctcaccagtcaccctggcttttttccctggagacatttcctagtttgtggcataggggaaatagatcccaaataaaaagtgacggtctcactgggctaaggaagaaaggtggaagtttggggccactaaagcaattgaagcttaagtccaggagaggagagaaccacataaaatctaacctcaaaatctgcagtcaggtccctctaaagtcattgactgacttcagaggtacacataagcaagagaagaaacccagcagaaaacagtagctgaaaagctaaagatctgagcagacatttcagtatctaatgccagagaggcaaaaatggaagttcaaatcctgccaagttagaggggccttattacaccctgagttttccactgtggccccatcatgaccactgcctaagattgaaggcaaaactaaaacagaccagccctcaggaaaatgagttactgctgtgctgctgctaaaaggaaacagccttctttggagaaaggtattatctaaaacttctacaattttgtatccataattcagtatttcattcaccaaaataggatatgctgttttggacaagctaatgaaactgaattgaccaaaaaccaatagaaattatctagtgctgacagaaaaaaaaaagtgtacagaagaaagcatgagagacttatgtattgctgatagacagtggaaaggtctatcatgtataataggaatcccagaaagagaggagatagacatacaatgggatggaaatattgactaataattttccaaaacagagatatccaagcacatattaaagaagctgtgtgattccaagcagggtaaatagagagaaaaccatattgaacatagctgctagaaatccaagagaaagagaaaatgttaaatgctgtcagaagaaaaaattcattatcttcagggaacaataatacgaatgatggctgatcgatcacctgaaactgtggaagacagaagacaatagaatggtgttctctttaaagcactgaaagaaaaaaaatgacaacctagaattctttatttattttgagatggagttttgctcgtgtggccgaggcttggagtgcaatggcgtgatcttggctaactgcaacctctgcctcccgggttcaagcgattctcctgcttcagcctcccgagtagctgggattacaggcatgtgccaccacgcctggctaattttgtatttttagtagaggcagrgtttctccatcttggtcaggctggtctagaattctaaatctagaatatccttcaatagtaaagtaaaatgaagacaaactaaagctcagaaaatatattgctgatatgctggcactagagaatattaaagcaagttctttgtgttgcaagaaaataacagataaaagcaaagaactgcagaaagaaatgaacaatggtaaggataaatgtgagtaaatacaaattctgactgtttaaaataatagttgtggcttgtgggatttaaaatatgtggaaacaaaaatacgacaactgtagaacaaaaggctggaggggggtggtaatcagtcaaaagtgtatttgtaatctctagagcaacctctaaatgaaaaaagaatatataacgaaaagctaatagaggagaaaatggaatagtaaaaaaataactgattactccaaagaaatgcagggaaagagagaggaatgaagaacagatgggacaaacagaacagatgacagaatggtagacttaaactcaacttcgtcgatgattatattaaatgtaaaaggagcaaatattggctgggcaccgtggctcacacctgtaatcccagcactttgggaggccaaggcggacaggtcacttgaggtcaggagttcaagaccagcctggccaacatggtgaaaccctatctctactaaaaatacaaaaattggctgggcgtgggtgcctgtaatcccagctactcaggaggctgaggcaggagaatcgcttgaatctgggaggcaaaggtttcagtgagctgagatcatgccgctgcactccagcctgggtgacagagtgagactccatctcaaaaagaaaaggagcaaacattgaaattaatgcaaagctcagaagacctaactattatagatactgtttacaagggatgtattttaaatctaaggacacaaatgaggaagtaaaaaaaagggggggggaggggggtgtgggggagacgatatcatgcacacattaatcaaatgaaagctgacttggctatatttatgttggaaaaaagctctaaaaccagaaataacactagaggtaaagaagggcattatataatgctaaaaggataaatttaatggaaaaatatctaaaatttttatatatgtaatagtataggtctaaaactaaaaggaaaggttgacaactattataaaaagttaaaatagacaaaaccacaaccatagatcagtgcccctctttcagtaactagtagaacaaacaggaaaaaatcagcgaggataaagatttgaacaacacagccaccctgacctacttggcggacatagaacacttcactcaataatttcaggatatatatgcttttcaaatatgtatgaaacatttactaaaatataccatatgctataccataaagcacccctcagtacatttgaaagaaatgacatcacagatgtcagccaaaatccatttaatgaaaaacgtgaaagactgccatactagagtatataacattgctgagagaaataaataaaaggagagataccatatttgtggattggaagacttgaaattgtgaagataccaattctgtctagacttacctacttattccccgctccccccccccacccttttttttttttttttgaggcagagtttcactcttgttgcccaggctgcagtgcagtggcacgatcgtggctcactgccacctctgtctcttgggttcaagcgattctcctgcctcagcctcctgggtagctgggattacaggcacctgccatcacgcctggctaatttttgtatttttagtagaggcggagtttcaccatgttggccaggctggtctcttcctgacctcaggtgatccacccrcctcggcctcccaaagtgctgggattacaggcatgagccactgtactcggccttattcccaatttaacacctcacaagtttgggggtggaggggctagacacaagccaattttaaaacatttgaaagttcaaaaggaaaatctaaagaacaaaattgggatgtttatattactagataccgagactttataaaaagccatagtaattaagacattgtggtattgatgcaaaaatagacaaatggggtaatgagctatatagtggctaaaaacagacctgttcctgtatggtcacctgatttttctacaaagctgccattgcggttcagtggggaaaaggatgatctttatgataaatggtgctgaatcaactkggtatctgcttagataaaaaccttgacctttacatcaaaccatacacaaaattaatttgagatgggttatagaatgaagtgggctaaaacaataaaatatctggaaggaaacataaggaaatatgtttagagaaggcaagaatttcttgaataagatgcaaaaggccttaaccaaaaaaagattgactaagattttttaagatttaaattcattaaagaacttctgttcatcaaaagatagcatgaagagatggaaaaagtccagttttaaagaatgaacaaaagacttaaaacgaacttgtccaaaaaaaaaaaaaaaagataacctaaagggtctattaggcacatgaaaaagatactcaatggccaggtgcagtggctcacgcctgtaatcccagcactttgggaggccaaggcggggagattatttgaggttaggagttcgagatgagcctgagcaacatggtgaaaccctgtctctacaaaaattagctgggcatggtggtgtgcacctgtaatcccagctgctcaggaggcaggagaatccttgaacccgggaggtggaggttgcagtgagccatgatcttgccactacactccagcctgggtgacggagcgagactccatctcaaaaagaaaaaaaagggtacttgacaaccttggtcctcggggaaatcaaattaaatccaacgaataccaccatatacccaacaaaatgactaaaattaaaaatactgataatttgcagtatcagtaaagatatggaccaacagtgttaggaggattatgaattggtatagccactttgggaaactgatggtatctactacttaatgaaataaactgacccgagcagttctactgctttgttctatacatacctaagataaatatgcccatggatattcatagcatttgtaatagccccaaactggaaataatccaaatagagtagtaaagatwttgtcatatgttcatagaatggaatacaggttgaatattttttatccaaaatgcttgggaccccaagtgtttggaatttggatttttttcagatttttgagtatttgtattatacttaccagttaagcatccgtaatctgataatctgaaatctgaaatgctccaatgagcattttctttgagcatcatattagcactaaaaaaggtttcggttttggagcattttggatttcagattagggatactcagcctgtatttcaaatgactgttaaacacaattatatggatgtatctcacagatgcaataatgagcaaaagagcattcttatgtttctttttatctaaaagtctaattcacaaatacatcaaatcaatatatactgatagcaataaggatagtaacctcaggcattactgtcattagttagggtacaagggaatcttcagggttgcaggaagcattctgtaccttgatctggatgatggttactcaggtatatagatagtttaaaattcgttgagttacacccataaagttagtatactatatgtatgtaatatgttaaaatattttctaaacagtagtaagtatggtagatatttgctatcatgggattttatctggtctgaaattactacatgctgaaaatttctaggaaatttttgatccaaaaattttatgtggtgaagtggaaaaagtactggcctttaagttagaagactaagtctgaatccctctctgctgcttctcactcctatcagtcttataaaacctgggcactgtgatcttatgcaagttattgaatctctgtcattgtacagtggaaagaatagcttctcttttcagttcctggggtgtgaaaaggattaaatgaaatgattgatgtgaaggtgctttgcacctaatgaagtatgctgatttataatatttttataatccagcagcgttcagatatccaaacactggaatccctcatggatgctgtgatagcagtctagttgccctgtgtaacaggttgcccggatgatttcttccttttttcagaagtcttgagagtacataaaggagcaggacttttgaattggaagacagctgggattgccctgggacatctgccttattctgtccaacctttggctaatttatttctaatttctaaaactcttgtcagagttttaaacattgggaaaacctttagcttctctaactgcattcatcaactcttaagatgtgactgattattaaatgcacttttatgtgccactaagttggtggggggggctgccaattataattgtaagaagcttttaattgcaagagtctcacaacttcagagatattagttaagggagaaatgtgcatcctacagttagtgaaaatataaaaagtttctgtgcagtgtgtttttggtaaatttttagtttctgtggatttgcttgacttacaagttgaagcactttatagttctgtaaaaatgttacacaattacttgagaagtcaaaattatacagagggaataaaataaatactaggtaaaatattcaccactgtcatttgaatattttaaattgacatattgaagtgacccacattagtcttttgacttagtagtcaagttacaactaagttttgataatttactgttcttcttgttcattgctgttctctataaacaactaatacacagtagactctcaaacatttgttgaatgagttaatacagtttgtaagtacttttagctgtgtgtttgttatctgaaagcagtttgagacccttaattcttccaaggcgaatactttttttttgagacagaatttcgctcttgtctcccaggctggagtgctgtggtgcgatctcggctcactgcaacctccacctcctgggttcaaggagttctcctgcctcagcctcccaagtagctgagattacaggcacccgccaccactcccggctaattcttgtatttttagtaaagacagggtttcaccacgttggctaggctggtctcaaactcctgacctcaggtgatccacccacctcggcctcccaaagtgctgggattacaggcatgagccaccgcacctggtcacattttttttttcttaaactaaaatcttccacatttaaaactaaagctgagatgtctttttggtgttagaaaaacccaaatatgcatcagaagtaggtaattgatgtttgagaacaagcactaatgaagctatatcagttcccataataaaagcagttctgctgatcattgttttgaatttcagggatagtcttataaactagcatatttgctaaagcacatttgaatgttgtctgtgtctcctgtttattgcctcctttttacttttatattaatatattaatggaatatatagcttttgcatgtggaggcctttttttttttaaagcctcttattgacctggcaaaggaatcagcaatttttagcaagaaatatgtggaattttattttactttggagatggggtctcactctcacccaggctggagtgcagtggcacgatctcagctcactgtagcctctgccttctggggtcaagtgaacsttccacctcaacctctgccttgagtagctgggaccacaagcatgcaccatcatgcccagctaattttttgtattttgggtagagatggggtttcatcgtgttgcccagggcgatcttgcgctcctgagctcaagtgatccacccaccttggcctcccaatgtgctgggattacaggtgtgagccaccgtgcccggcctttatttttattttgcagagacagggtcttgctctgtcaccaagactgaaatgccctagtgccatcatagctcactgcagcctcaacctcttggcctcaagcaattctctactatgctaggctaattctgttttttaaaaacatcttttgttgacacagggccttgctttgctgcccaggctggtctcgaactcctggcttcaagcagtcctcccgctttgaccccctaaagtgctgggattacaggggcaagctactgctcccagcctattttcttttcttaaatgctctttcacttaagattaaatgagagctcagctgtaaatttaaggttaaagggagtcaggggagatggtgatgagaggaaatgattacaagttgagttcagtggggcaaataaggaactcttctgtctctccatgcaacattctgttccccttcatcccacaagttactggaaaccatattatcttatggctcagtaatgcaaagatgcctcactccatctaaatagcctttagaggttttaatataatgatctattgggaatgtaacgataagttaatttttaatacatagctgatatcttttttgtatttcttttgatcagaaagtagagataggagttgctaaaattttggggactgctggtaacattccaagaaagtgtgtgaagctaaatcacctactgacaattactatttaatctccctttcttcatagcacattgttcttaatgaggctgttttgacatcctactagatgcgagataagcaggccagaccttaaagggtgcgggctctgaaatgtttttttgtgtgtgttttttttgttgttgttttttttctgtttgtttgttttttttttatttgagacggagtctcgctcttgttgcccaggctggagtgcaatggggcgatctcagctcactgcaacctctgcccccgggttcaagcgattctcctaactcagcctcccaattagctgggattacaggcatgcgccaccacgcctggctaattttgtatttttggagagatggggtttctccatgttgatcargctggttttgaactcccgacctcaggtgatccacccacctcaacctcccaaggtgctgggattacaggcatgagccaccgtgcccggccctgaaatcttttaagtctctttggctactaggccccaggttggtcacaggacagcaaaaaacaggactgcatttcatcaacagcagacttgaggagcatcatcaggaaccagtaacaatgaaaatagaagtcagagatcatagaataacattattttaaaccatgggaccaaatagggtaatttgctgcctgtgtgacttttctgatttttaaagtatgggcatgactctttttgaaagattattatgagtaaattttagaaaactgactgttttatttatcgtttgtcagtacgaggatgtcgtccaggaaagattgtgcagatgactgaagcagaagttcgaggcttatgtatcaagtctcgggagatctttctcagccagcctattcttttggaattggaagcaccgctgaaaatttgtggtatgtaaatgggtaaagttggaaacaactcttttgaatcatgtttttcctcccatgtttaagatctagagaaaacattttttgaaatttttgtrtaaaacagatcartaggctttactaaataaaagtgtataaaaattgaaacttataaaaatgacaagttacagacaagatgaaaatacttgctrtatatcaacagataaaaggagttctatttataatatataaagagttcttataaataagagaaaggcgatacagtataaaaataacataggaagaggaaggtcttagaagaaattcaaatggccagtaaacataaggacgtcmgcttctttttttagtaatcagtgatgtgcaatttaaagcaagtctccaactctagtcagattataaaaaaataccaaagattgatgtttagtgttgtcaaggatgtcacgaaaagggcatcatagtacactggttagaaaaaaataggtgtataatttagagggtcaatatggcgatatctgtggtcttctaactttgatgttatttaaatttgttttgaagattatactactttataccttgtattcttttaagttttacagtgacttttttacagtcctttgtacagtgcccagcaaataagagatactcgctaagtaaatgtttgttttttgtttgtttggttggtttttctttgagacagagtttcactcttgttgcccaggctggagtacaatggcacaatcttggctcactgcaacctccacctcccgggctcaagtggttctcctgcctcagactcctgagtagctgggattacaggtgtgagccaccacgtctagctgactttttgtatttttagtagagacagggtttctccatgttggccaggctggttctgaattcctgacctcaggtgatccacctgtcttggcctcccaaaatgctgggattataggcatgagccaccgcagctggccaataaatgtttgttgaatggatcagttaacttagaatatcacaccttcaagtaagaggtagtagttcagaatttgggggaactaatcaatcccctgtataaacttaagcaaatgtagttacttagaggtgatcttaaaattattagaattaaagtattctttgaaggtgttctttaaaatgtaatatagaaataacttgaaggtaatggaagttatttgtactacatatttctaaaggtttactatttgtctccatatttggtgttaaaaagtgacgtaagttaaactaccagataataaaattgttttagttacctattgttgtataataaatcattccaaaactttgtggcttacagcaacattaatttaccatctcacaatttctgtgggtcaggaattcaggaacagcttagtgggtcctctggctctgggtctctcacaaggctccaattaaggcgtgatctcgggctgcagtcatctgaaggttgaactgtgaaaggattcagttccttatagactgatggactaagagcctcagttccaaatgagctgttggtcagaggcctccctcagttctttgctacgtgggatgcttcattagacagctggtttcatcagcgagcatggaagaaggtgagagagtgcaagcaagatgaaagtcacagtcttttgtaacttaatcttggaagtgacagcccatctcactttcgcttattagaagtaagtcaccaaatatagcccatactcaagggtaggggaggattacacaggatgtgaacattgggaatcatttcatagaagctgcttataacagtaaccaatttttctaaaactgactctttctctttttaggagatattcatggacartatacagatttactgagattatttgaatatggaggtttcccaccagaagccaactatcttttcttaggagattatgtggacagaggaaagcagtctttggaaaccatttgtttgctattggcttataaaatcaaatatccagagaacttctttctcttaagaggaaaccatgagtgtgctagcatcaatcgcatttatggattctatgatgaatgtaagtgaaaataaagacttagaaaagtaattcatggaaacattgcctaataattttctggttcagaagagttgctttgattcagmgttttttcaaaataagatctgtcaggcataggccaggaagaggaacctgaaactgggaaacatgttactaattaaattggttccttgagatctccttggtcatatttcagattgactgcagcttacttggctgaagaggctcttttaaaattagtttatctagtaaactatccaggtgaaacagaagtcactgtaggcagtggcccttggttttctagtgtccattaaggttttaactctcggcattcttgtggtatgacagcttttattagtcctgtgtcacaagaattattgagaagttctgtgaaactatttaaaagtcaaagtttaatattattagaatttaaatctatgtctgtaaaccttgaaagataaagatactgaatactctggggtatccttattttactctctttttcattagtaggaaatcaacgatttggtattgtatgtttccaagtgttattattaaaataccctactaggttcaaatatggtcttttggttttattagaatacgggagtaagtatttatttggttaattactacttagaatcaattataatcttcaaattgaattttttattgctgtcttccctattagaatctacttttgctttttttcaatccttaattatgttagagacctattcaaactcatatctccttgatttatataatgatttgacaaagtttgagggtatgttatatgtgcaggcactattgtgaacacagtgcgtgaagcaatacacaatacagatgatctctgttctcatggagcttacattttttttcccaagtgtttctccagcattgattggccttccctgtccagccaaatagcaggtcatcagcctagctgggactgtatgtccttgtagtgaaaaaaggctgtatcaggcttccaatgcttaatgaaaatagcctttcttttttcttttttcttttcttttctttctttctttttttttttttttttgagacggagtctcgctcttcttgcccaggctggagtgcaatggcacgatctcagctcactgcaacctccgcctcccgggttcaagcgattctcctgcctcagcctcccgattagctgggattacaggcatgtaccacgttccctggctaattttgtatatttagtagtagagatggggtttctctgtgttgatcaggctggtcttgaactcccaacctcaggtgatccacccgcctcggcctcccagagtgctgggattacaggtgtgagccacggcgcccagccatgagcttacattctaatagaaatgattctgtatttgattttgtattgtatttttatttctgagatgtagtgtgtggtttgaattatttaaatcagactagcagagagaaagtgggttggagtacatcaaactacaacattcttcctaaagctacatcagaaatggaggtatatttttaaaggataaaagataggcaagaatgtctttggggatagaaatgacatcaaatgaaataatgtatgggagagcaacttgtaaacagtgctttgagttatgtacttactcattaaggggcaggttgtggcataaaagcacaggaagttagtacttgtgtctttcatcccttccctagcttagtagttgtaccttattaccaaattcaggaaaatcgagtaactctaaaaaggtgaacatacacttgaggttgtctttgtcgtagctttttatgctaggctacaggaaaattatagcctttgtgcctctatttatacttgctatagygccaagttgtaattcacacaaaagaatactagttaaacacttggaaattttccttccttggcaataagtttatactgtgttaatcaatgcattagtgttaaaatggacagtttccagaggcaccttttcacttctgcttgcttatttggctaggtatttaactagtccacacactgaacggaaaaaaatgaactaagagcctattagactgtttaaaaattgctatattatactgatcttaaaagacaaaaattgtttgatgtatttcataaaacacctagcacaatttttgggattttttaagtgttaaatttgattaggtttattttatttgtcagaaattctatgtatttatgatgtacaacatgatgttttgaagtatatatacattgcagaatggttaaatcccgctgatttaacatatgcattacctcaaaaagttagcattttgggagaaaacaacacttaaaatttactcttagcattttacaaagatacaatatagtgttaactgtagtcactgttatacaatcgatcttcygtatttattcctactacccaactgatactttgtattctttgaccaacatcttcccatcccacccctacccccagcacaatctttgaagtcttggtaactttactgaaggtattgaatgtttattgtagttgttgcctttttgaaagtacgtaaataacatctttgcattgtagaaaaagttcttctttatagataaacatgaagaaatgaagaaaattgaaatcattcataatcctgcggctttgagataactgatgagaacagttttagattttttaatttattctatctgttctttttacaggcaaacgaagatttaatattaaattgtggaagaccttcactgattgttttaactgtctgcctatagcagccattgtggatgagaagatcttctgttgtcatggaggtagactagtaaatttgccttacagattttttttttcttctattattcggaaaatacctataataatcaagaggctgtgggaaaacaaagcagtgcttgtatgaaaactcaagtgattaaaactgttttaaacatggctaaacctcttttaaaaattagaaatttatttataaatgaaaacgtaatgcttctttaaatacagtttcacatataaagagtgtaactagagttgtttgagaaagtctcctttgcctcaagttttaacagaaagacacccctgctatttattagtaaaaatgagaggatatcttcctgcctatattgaaatctttcatcagaatccaaataaaattgagtttcatattcacatatatcaagaattctaggcttcatataatatatttgctttagtattaacaataaaataataaaataatctttggcagattggtaggttactctgtatggcttatgaaataagcttgaagttttttgaaagtttatttgaaaaattaatgtatatgtctaacacctagctagtagatagtgtatgatctgaccatcttgaagagttaaaaacctgttgctaagatacatttatgaaacagataattgagtaataaaaggtatttaatatgtcagaacttattaagacactatgagaagtcaggaggaggaaagactgggtacatgtgtgtatggaggcatgggttttagaggataaataggctttggagaagttaaaaggacttgagacactctttgttgtctagtttagggaatgtgtaagaactggcctgactagaaggtcaagtacatgctgggaaatgatggaatcagattatggagatttgactattgagcaacggagtttgttgagtgatttaataaccrtattgggtttttgtacagggaagtaatttaatggaaatagtgtaagaaaattagtttttcatcaatatacgggaagaattaaagtggaaaaacgctgaaaagatagatgcacttgcctaggcccgaggtaataaatggtttattctctggcagaacataattcactatattaattgaaatatgttttccagtagacattaaacacgtaatgaattgtagttcttgtacattagtgtagctaaggatagaagtgtagcagtatggataygaatgtttagcttcattccttgtgatgatacttggattgcctatcagagagaaataatagcttatataccacttcaaagattgcagagtatttttatgagcttttcctgttaatccttctgatcaatagtttatgacttcatgaagataatgaacatgttggagtgggatgtgaaaagaaggtcttagggaaccaagtgaggcactttcacttagaagttaaaatgtttaagattagtggtaagaactggcaaaagtggtaggaagggttgcagttgattatgtttctatgaaggccagggaatgattggaaaaaagaatggtagttttttttttccttgggaagtcttttgaaatataaaggaatttcatttccctggtagggaaaaatggaaaaaaacaattataatgctgtattatatcaaagtggaattcctaataactctgtgttgccctttaagacattaaaaggggcagggcgcggtggcccacgcctgtaatctcagcactttgggaggccaaggtggttggatcatgaggtcaagagatcgagaccagcctggccaacatggtgaaaccccgtctctactaaaaatacaaaaaattagctggatgtggtggcgcgcgtctgtagtcccagctactcgggagactgaggcaggagaatcgctcgaacccgggaggtggaggttgcagtgagctgagatcacgctactgcactccagcctgggtgacagagtaagattctgtctcgaaaaaaaaaaaagacgttaaaaggaacacttttcagtatctttaatttcacatagtgaatctattttgattaaatgctttttattcggtgactgttaaaatattaaaatttttagctgttagtactatgtctcatctttttatttataggattgtcaccagacctgcaatctatggagcagattcggagaattatgagacctactgatgtccctgatacaggtaagtgtagagagaagtttaattgttttgtgtaaagtgttttcatatttgaacttgattacatttagtggaagtaggattggcttatgtaataaataaaagagcttttttcatagtcaataagccagctacagattactttatttgcagtaatacacaatttttcactttgcactgatcctcaaaatgcggaacctttttatttatagtcataatgtagttatttgatcacaaaaaagattttgctgttgagtccttatacctatttttctaaattccctcattcatactagcattggttatgttcttcaaaaatttgttaaattagacaaaagttttttaattaaaataatctattctttgcttcttaggcaaggatacaactaccttcttttcaaatgtctagtagttttttgttattttctatgtcctctatttgaaatttttagagctttttttcaagggggtgtgggagggatttcaatctgttgcccaggctggcctygaattcctaggctcaagcaatcctcctgcctcttctgagtagctaggggactccaggcatgtgccatacctggcttaaatttttagagctcttaaggctctagagacctgtggtcagttttgtgaaaattacattggaaatctctgggaaggctgggagcagtggcactcacgcctgtagtcccagcgctttgggaggctgaggtgggcaggatcacttgaggtcgggagttccagaccagcctggccaacgtgatgaaaccccatctctactaaaaataacaaaaattagctgggcatggtggtgcgttcctgtaatcctagctactcaagaggctgaggcacgagaattgcttgaacctgggagacagaggttgcagtgagccgagatcacaccactgcactccagcctgggtgacagagtgaaactgtctcaaaaaaaaaaaaaaaaaagaaaaaagaaacaacaatcaccacaaaaaatgctgctcagaactacacatcaacgattataaatggtatagatcctctgatgtnnnnnnnnnnnnnnnnnnnnnnnnnnnnnnnnnnnnnnnnnnnnnnnnnnnnnnnnnnnnnnnnnnnnnnnnnnnnnnnnnnnnnnnnnnnnnnnnnnnnnnnnnnnnnnnnnnnnnnnnnnnnnnnnnnnnnnnnnnnnnnnnnnnnnnnnnnnnnnnnnnnnnnnnnnnnnnnnnnnnnnnnnnnnnnnnnnnnnnnnnnnnnnnnnnnnnnnnnnnnnnnnnnnnnnnnnnnnnnnnnnnnnnnnnnnnnnnnnnnnnnnnnnnnnnnnnnnnnnnnnnnnnnnnnnnnnnnnnnnnnnnnnnnnnnnnnnnnnnnnnnnnnnnnnnnnnnnnnnnnnnnnnnnnnnnnnnnnnnnnnnnnnnnnnnnnnnnnnnnnnnnnnnnnnnnnnnnnccacccaccttggcctcccaaagtgctgggattacaggcgtgagccaccacacctggcctgtgttatgagcttttttacataacacgacttgttgtgttgattattttttaaagtatgcattttatcacagtttttgattgtaattatagaatacatttgactaaacctaacaaactggtatttaaatagtattttatttaaaatgctgtttttaggcctggtgcactagttcatgcttgtaataccaacagtttgggaggccaaggcaggaagatcacttgaggtgaggagtcgagaccagcctgggcaacataacacccatctctacagagaaaaaaaaaatttttttttttaattagccacatgtcgcagcaccgcggctactcaggaggctgaggcaggaggatcacttcagcctgggaagttgaggctgcggtgacctgtgattgtgctcctgcattctagcctgggtgacacagtgagaccctctctttcaaaaaacacccaaagtgctatttttaaaataaggtataatataaatatgtattactggtcattcttcagaatatctgtttatagttcagatgtaaactgatctagtgtgatatgctaggcttctgtttttagcatgttttatttattttagcgtattttaatgagaagttttcaagatgctgaaaacagttattttgatctttgatagtgtctgcaacattcagaaatttaatttataagttaatacattatttgaagcagcctagttgattgtgatgctagctcattaaacaataaatcttgactctgaaattctttttgagacagaatttcactcttgtcgcccaggctggagtgcaatggcctgatctcrgctcactgcaacctccacctcccaggttcaagcagttctmttgcttcagcctcccaagtagctagaataacaggttcctgccactgtgcccagctaatttttgtatgtttaatagagacagggtttcaccatgttggccaggctggtcttgaactcctgacctctggtgatccgcccacctcggcctcccaaagtgctgggattacaggcgtgagccaccatacctggcctgaaattcttatctagaccctgttaaggttaaagaattccagattgttgttgctaccattatttgatttttttaatgcatccagagtgtcatgtttcctaaacctcaaactctattctaattttatacagttttattgtctcactgaaattatagattcttgagatcgagaccatcctggctaacacggtgaaaccccatctctactaaaaattcgctgggtgtggcagtgggcgcctgtagtcccagctactcgggaggctgaggcaggagaatggcatgaacccgggaggtggagcttgcagtgagccgagatcgtgccactgcactccagcctgggtaacagagcgagactccgtctcaaaaaaaaaaaaaaaaaaagaaattatagattcttaataccttagctttctactggaaagaggctggaaagtatgaaagcattattaagcactgggtgggtgtatattttcgaagagtcagcttcaaccagaaagggcttaagaattgagactgactattccagtggattttgtgtgctagtgaatttcttaaaacatcatacagggagcttgggatatatcaatgatagagattgaatacattgccactaattctacaaatggttttataatgcctctatcaagatatgatgtactgtaactgaaaatgaagatgccctttcctcctaaaccatactatgatgtttatggattatttaaaattcttaaaactgacttaactctttaaaaattatcttcttggctgggcgcggtggctcacacytgtaatcccagcactctgggaggccgaagcgggcggatcacgaggttaggagatcgagaccatcctggctaacacagtgaaaccccatctctactaaaaatacaaaaaattagccgggcgtggtagcgggcacctgtagtcccagctactcgggaggctgaggcaggagaatggcgtgaacccgggaggcagagtttgcagtgagcagagattgcaccactgcatcccagcctgggcaacagagcgagactccgtctcaaaaaaatatatatrtatcttctcttagccactgcaattcttagaaaatcaccatcaccatctcaacatccacccttcttttaatatcactacagttggacttttacccactccgttaccctcaatcaccaagaaacttgcattgaggtctgatgatttaattgtaagtggcacatttttggtcttcgtcctrctgcccttgttcatggcacatttcctactttaggacgattgtttcccctttcgggatacgtttactatactaagccctttgtcttgatcattccttctcaatacctaatgttcattctccctcatctacctgcctattaaatgtttgaattcctcagaattcatttgctggtcttctcactttgtattcctaaggtggtctgagtccctcttaagatttccactaccattaatatgatgacaatactcaagtaaatatttttaaccctgacctcttttccagggctccaaacattaccaaagtcaaggrtctgatctgattttgttcttccacatttaaaaaaaaatcctcagggtctcagtagaaaatgtttttttttcgctcaagtgatctgtagatcaaatacaattccagtgaaatcacaattgagttttttatggaattaggcaattgtttttaatgtttatgtggaagaacaaaagatcaaaaagtaaccaagacaatcctgaaaaaaaaatggaggatactagccctaccaaatataaagacttattaaaaagctctagtctgttattggctcagggataagtaaaatagactaacagaatagactgtggtgctcagcagtggaaccgtaaggaaaggatgaactgttgaggaaataccactgggttgtttggttattcatatggagaaactacccaaaagatgaacagccttttccatgtattgttgtgctgtaagtgccatgcacatatttcctatatgtggaaagggttggaaagtactaccttaagaggccatggaagattatatttggtttgtatggttgctttaacaaaagtataagttacataggctggaatacttaggcaagtgatggtcattgtttagtaaaaggtaagagggcaagaaaggaactgaaatttgatgtagatgtgctatattctataaatctgtaaattttgttcttaattgctgtatttctgtcctttaaaggtttgctctgtgatttgctatggtctgatccagataaggatgtgcaaggctggggagaaaatgatcgtggtgtttcctttacttttggagctgatgtagtcagtaaatttctgaatcgtcatgatttagatttgatttgtcgagctcatcaggtatgaaatataaaactcttaagctttttcttttttctttcttttttttgggggcagacggaggggcagacagattcttgttctgtcacccaggctggagtgcaatggcgcaatctctgctcactgcaacctgtgcctcccgggttcaggcagttcttgtgcctcagcctyccaagtagctgggacgatagccgtgtgccaccacacctggactcttaaacatttattatttgttaacttcacataagccctctcattttgttttgaggaaacatatccaagaaagctaaatgagttgtacaaggaaagcagtaggagaggtggcagagccagttcctggatctcacacttaacaatctagtgatttgttaaccttttatcaccctaaaagaggaaatgtttagaaatattttggggctgggcatggtggctcacatctataatcccagcactttggcaagctgagatgggtggattgcttaagtacaggagtttgagaccagcctgggcaacaaaatgagattccatctctacaaaaaaaatcaaaaatttagctgggtgtggtggtgcgtgcctgtggtcccagctacgtgggaggctgaggtgggaggatcgcttgagcctaggagatcaaggctgcagtgagccatgtttatgtcactgctctccagcccttgtgaaagagctagacccagtctcaaaaaaaagaatgtatttttgtagtatacagcaaacctaacaaaattttcagtgcttctttgaagctttgtagatatgatttagattttttttttttttttttttttgagatggagtctcactctgtcacccaggctggagtgcagtggcacaatctctgctcactgtaacctccgcctcccaggctcaagcgattctcctgcctcagcctccggagcagctgggattacaggcacgcaccaccacgcctggctcatttttgtatttttagtagagacagggtttcaccatgttggccaggctgcccttgaactcctgagctcaagtgatctgcgcctcagcctcccaaagtgctgagatgacaggcgtgagcgtgaaccactgtgcccagcctcatttttatataatctttgtgcataatggcgattttgataagagcaaaccacactttaaaaaagtatttttgagaccattgaagaatttgattgtggctcagtgcagtggctcatgtctgtaattccagcactttgggaggctgaggcaggcagatcctttgagccccaggagctggagaccaggctgggcaacatgacaaaactctgtctccacagaagatacaaaacagccagatgtggtggtgtgcacctgtagtcccagcttgcttgggaggctgtggcaggaaagtcgcttgagctcaggaggcagaggttgcagtgagtgtagatcgtaccatttcactcctgcctgtgcaatgggtgtgaaactcagtctcaaaaaaagagaacatttgattgtagacttggtaataggtatgaattatttaatcttttaattttttgtttttgtttgaggccgagtctcactctgtcacctaggctggagtgcagtggcatgatctcggctcactgcaacttccgcctcccaggttcaagtgattctcctgcctcagcctcccgagtagctgggactacaggcgcctgccaccacgcctggctaatttttgtatttttagtagagacggggtttcactatactggccaggctgatctcaaactcctgaccccaggtgatctgcccacctcagcctcccaaagtgctgggattacaggtgtgagccactgctcctggccggtatcaattattttagctgtttcataatcattaattgttatgtaagaagaatgtctgtgtttttccaggaatgcatacttgagtgtgtagaggtaaaatgacatgcctgggatttgctttaaaataatatcagcaaagagaaaaggagagggagaagataaacaaatgtagcaaaatcatgaaaagtattgaattaggctgatgagttaatgggagttaattcaagtcgtctttatctacttttgtgtatatttgaaatttttcattataaaaacatttatacagttcagggtttttggttgtcttttatgtccgccaccactaactagattgtgtactctaaggaagggattacaacttgtttttgaatctctgttgctttatatagttgctgacattgtagcatagtgtatcatgcacatacagtgttgaataaattaataaaagcgtatttaattaagtatatgctgtcccacagtacttccctttctttctggagctttactccccatgacacttactactgctgcctctttctttgatcctaagtgataaaaatgactggctttttattctttgcttattgtatattacatgccacttttatttagcaggatttcttggtggttccattgaaatgaggtcatgttcccacatcctttgattttggcaaagtagtttttttttgttgttgtttgttttttttgtgagacagagtctcacactgtttcccgggctggtgtgcagtggcaccatctcggctcgctgcaacctccacctcccgggttcaagtgattctcctgccttagcctcccgagtagctgggactacaggtgtatgccactagcctggctagtttttgtatttttagtagagacggggtttcactatgttggcctggctggtctcgaactcctgacctcgtgatctgcccgcctcggcctcccaaagtgctgggattataggcacgagccacctcgcccggcctgacaaatagttttttaaatcagtaaaactgtgtttatgattttgataaatatgccttctattaaataacaaggcagaattgctaagtttcctaactaaaatgacccctgataatcagtttttttcagccatagatcttcattcactggtcttttcaaaaataaatgatgatttttaaaaatcaggtttctgaactacgctagtttgcatggtcttttgttttccagaaactgccaaaatccttctattgtgyttattttcaaataattgtctctaaaattctagaaatattccctttaaaaaagaaaatttgaaagaatgaacaagtaagcaaactaaaaaaccaagaactaaaaacatggagtccatgaccagcctgggcaacacagtgaaacacgaaaccctgtctctacaaaaaaatacaaaaaactggctgggcaccgtggctcacgcctgaagtcccagcattttgggaggctgaggcgagtggatcacctgaggtcaggagttcgaggccagcctgaaaaacatggagaaaccccatctctactaaaaatataaaattagctgggcacggtggcacatgcctgtaatcccagctacatgggaggctgaggcaggagaatcgcttgaacctgggaggcagaggttgccgtgagccgagatcgcgccgttgcactccagcctgggcaacaagagcaaaactccatctcgaaaaaaaaaaagaaaagaaatacaaaaaaattagccaggcatggtggcacacacctgtggtctcagctactcaggaggctgaggtgggaagatctcttgagccccaggaagttgtgactgcagtaagccaagattgcaccactacactccagcctaggcagcagagcgagaccctgtctccacacaagcacatacacagagaaacaactaaaaacatgagtgccatttgctatgtggagcaggggtcacagggattagataaggtggctatggtcttaggagaaaaggttcatctaaattgtaccawaaggtaatttcagcagaagcatgttcctagtactgargtaggagttattttaataagtaaatgccttcgtaattgcttttttatattagcaagtggtgtcggataattttgctaattaaaagatacctaaaataaatttaaaagtaatcttgcccaccgtaaataaatataaaatatttacatattattgtgttcctcaaatttgtagactgagagaaaaattgtttaaattactcagaaattgacaactggttctagaaatgttaactcatcaaggccaggcacggtggctcacgcctgtaatcccagcactttgggaggccgaggcgggcagatgacctgaggtcaggagtttgagatcagcctggccaacatgacaaaacctcatctctactaaaaatacaaaaattcatcgggcttgctggtgggtgcgtgtagtcccagctatttgggaggctgaggcaggasaatggcttgatctgggaggcagaggttgtagtgagcygagatcatgccactgcactccagcctgggttgacagagcaatattccatctcaaaaaataaaaaataaaaataaaaatacagtctgttggcagttaatttaaggagcatgatccatgtaaattaaactcaacttagtaatgttttcagtgtgtagccagtagtgttttcagtgtgtagccatgtaataataatacatattttaaaatcaaagcaagaagtaagctcttcgcaaagtcgttcatkggttgttgctcatttaattaaggattctgtagttggattataatgccctcatcaaagtaataattgatgtccctctgaaaaacacgtagattaattaaaataaaattaaatttaaaacttaaaaacaaaaaaagtacttagtgtcccagctccctgtagtcatgatgcctattagtatgttttgtttcatggggagccttgcaaatggcatgatwtttaagctttcaggagtggtgaatttattattccaattaagctaaattgtttccattatagaaaaggcacaccagttttaatgttctaagcaaagtttaagaataaaaatcacaacttccaaaacaaaacagggtggtttgggggtgaggtggggcacagtctttgccaccttaaccttaattagtatagatggttcagaattacccaccaataaatgttttttcttctgacatttcctttgacaggtggtggaagatggatatgaattttttgctaaacgacagttggtaaccttattttcagccccaaattactgtggcgagtttgataatgctggtggaatgatgagtgtggatgaaactttgatgtgttcatttcaggtatgaygtaaacataaatatataagaactagaaatctaataaaaactattatcagaattcgttttagatttgtgaagtttccttgagcaagtgttgaaagtctgtttaattcagaagtgattaccactcaaactcattagatatttctattttcagtcacaaagtttccagcatttgtggtatatatcaaatatgaccgttttagggaacctaagttacgtcagtcattcttgattcagatgttttaattgttaaaattcctctatgaccttttgaatagtggcttactaaaagaatgtgaatgtaatgaatagtttaggcttttgttttcttttgcaaagtaaatgggtggaacagacactgggaaaagaattacaaactcagatgaaaataaagtaaaatagttccctggctgggcacggtggctcactcctgtaatcccagcacttcgggaggctgaggtgggcggatcatgaggtcaggtgatcaagactgtcctggctaacactgtgaaaccccatctctactaaaaatacaaaaaaattagccgggcgtggtagcatgcacctatagtcccagctacttgggaggctgaggcaggagaatgtcatgaacccgggaggcagaggttgcagtgagccgagattgcaccactgcacgctagcctgggcgacagagcgagacttggcccccaaaaaaaaatagtttcctgaggaaaaaaaactttcaaaataatactaaactacccgtttatgtcacaggaacatttatttatttatttttttcttttgaggaagcacattgtataccatgtacggggggttgtttgctcacttttattataatatttttattaatttatgtacgtactaggttcagggggtacatgtgcaggtttgttccatgtgtaaattacatattgctgaggtttggtgtatgaatgatcttatctcccaggtagtgagcatagagtttttcatttcacattccccctcaccctttccactctagtagtccccagtgtctattgttgccatctttatgtccatgtttacccagtgtttagctcctgcttatgagtgagaatatgtggtatttgattttctcttcctgcattaattggcttaggataaaggcctccagctgcatccatgttgctgcaaaggacctgatttccttccttaattttatggtcgcatagtattccatggtgtatatgtaccacattttctttatccagttcactgttgatggacatctaggttgattacatgtctttgctattgtgaatagtgctgtgattaacatacaagtgcttgtctttttttgtacatacccaaagtagtgggattgctgggtcgaatggtggttgttttaagttctttgagaaatctacacactgctttccacggtggctgaactaatttacactcccaccagcaatgtttgaacattcctttttctccacaaccttgctgacatctattatcttttaactttttattaatggccattctgactggygtgagacagtatcttgtggtttgatttacattaatagtgatgatgagcattttttcatatatttgttggctgcacgtttgttttttgagaagtgtctgttcatgtcctttgcccatttttaatggggttgttttttgattgttgaattaaatgccttatagagtctggatattagacctttgttggatgcatagtttgtattttctctcattctataggttgtctgtttattctgttgatagtttattttgctgtgcagaagctctttagtttattttggtcccacttgtcaatcattgttttggttgcagttgcttttggggacttggtcataaattatttcccaaggacagtgtccagaatggtatttcctaggttttcttctagggtttttatagtgtgaggtcttatatttaaatctttaatccatcttgagttaatttttgtgtatggtgaaaggggtccagtttcagtcttctgcatatggctagccagttatcctagcaccatttatcaaataggcagtctcttctccattgcttgttattgttgactttgttcaagatcagatggttgcaggagtacagctttatttctggctcctccatcctgttccattggtttatatgtctgttttggtaccagtaccatgctgttttggttactgtagccttataatgtaccttgaagtttggtagtgtgacgcttctggctttgttctttttgcttaggatgctttggctattcgggctctttttcaatttcatatgaattttagaaaagttcttttctaatgctgtgaaaaatgacattggtagtttgataagaagagcattgaatctgtaaactactttgggcagtatggagattttaacaatattgattcttctatccatgagcatggaatgtttttccatttgtttgcatcacctctgatttctttcagcagtgctttgtagttgtagagatctttcacctccctggttagctgtattccttgatattctttttgtggctattgtaaatgcagttcttgatttggctctcagcttggatgtttttgatgtatagaaatgctactggtttttatacattgattttgtatcctgaaactgattaacaaagttgttcatcagttccaggcacgttttggcggagtctatggggttttctgtgtatagaatcattatcgtcagtaaagattgtttatcttcctctcttcttatttggatgccttttatttctttatcttgcctgattactctggcagggactttcagtactctgttgaataggggtggtgagaatggtcatcctagtctcttgttccagttctcaaggggaatgcttccagcatttcccttttcagtacgatgttggctgtgggtttgtcagatggctcttactattttgaggtatgttcctaatttttcagtgcctaatttgttgagggtttttaacatgaaagggtgttgaattgtattgaaagcctttctgcatctattgagatgatcatatggtgtttgtttttaattttatgaggtgaatcacatttattgatttgcatatgttgaaaccttgcaccccaggaataaacccttcttgattgtggtgagttaactttttgatgtgttgctggattcggttttagtattttgttgacgattttgcatctgtgttcatcagggatattggcctgaggttttcttttttccttgtgcctctgctaggttttggtattacaatgatgctcacttcgtagactgagttaggggggaggtcctcttcctggattgtttggaatagtttcagtaggattggtactagctctttgtacatctgatataattcagctgtgaatctttctgggccagggctttttttggtttataggtttttttattactgattcagttttggaacttgttattgttctgttcaggattttaatttcctcctggttcagtcttcggagtttgtgtgtgtttctatgaatttattcatttcttaggaggtcatgtgtgtttctatgaattcatttcttgggagcgcatgtgtgtttttgtgaatgtattcatttattctaggtttcctagtttgtgtgcacaggtgtttataatctctaggtattttgtatgtctgtggggttggttgtaatgtcacctttctcatttcagattgtgcttatttggatcttttcttaatctagctagcagtctatcttgtttattcttttgaagaaccaacttttggtttcaacatttacatttttaaaagaggccagttttagctttagtgtgctcctacaaatcattcttgttcactgagtaaaacagcttcagtactttgcttttgcaaaggctattctatgtctttgatgtacacacactgtatttctcttaaaatgcattggggctttcccattcctctttctctttatcataatatactgtttccaycaattagtacaattgaatggtaaatggttgattgctcatttacaaattaaatatagtaaccataccttatccttccagcagttgtcatagtggtgttggattaatatattctcttcactaaggcactattatgttctaaatagtttttaaaaaatactttgtacatatttctatactgttttagttttggaaaatcatgacttttttatgtataatgtaggttaaagctctatttacatccaccagaatgagtgtagtaaaaaagccagactgtatcaagttttggcaaggatttggaggcattagaatcttcatacattaatggtgggaatagagttctcatatgatgcagcagttttacctctaggtatatacccaagatatatgaaaacatgttcacacaaaaactgttacataaatgtgcattattccttatagccgaaaaagtcacacaattcagatgtccatcagctactgaatagataaactgtggtacatccatacaatggactgtacaatgtacaactcagcaataaaaaggaatgaaggactgatacttcaaaactggttttgaaaacctgagtgaaagaagccagtcacaaaagaccacatattatatgatgccagttatatgaaatgttcagaataggcaattctatagagacatagtagattagtagttggttagagttagaggatgtggagagcaggaatggggagtgactgctgatgggaacaagctttctttttggggtgacaaatgttctaaaattagatttatatcaataaagctgttttttaagtaaaaagatctatttatacataaataaataaggtctgaagggtttgtgacttgtaggttagttaccctcctaagttactgtatcagaattatgatgacaacatagatcttctgactcttaaaccagtgttcttttcctcacaacagagatacactaagttcaaaagttttttacttaaatctaaggattggatagttgatagagttagtgtacttttgttattaaaatatgagtggaatgacaaagttcagacatttgcacactttaagaaatgtttatggaactttgctattctacatttttattgcatttttgcagtttatgccatttattgaaaatcacaattgtaacaatkttcttaacttctgtacatgaaaaaataacattatttgttaataatttactttaagatattgaaaccatctgaaaagaaagctaaataccagtatggtggactgaattctggacgtcctgtcactccacctcgaacagctaatccgccgaagaaaaggtgaagaaaggaattctgtaaagaaaccatcagatttgttaaggacatacttcataatatataagtgtgcactgtaaaaccatccagccatttgacaccctttatgatgtcacacctttaacttaaggagacgggtaaaggatcttaaatttttttctaatagaaagatgtgctacactgtattgtaataagtatactctgttatagtcaacaaagttaaatccaaattcaaaattatccattaaagttacatcttcatgtatcacaatttttaaagttgaaaagcatcccagttaaactagatgtgatagttaaaccagatgaaagcatgatgatccatctgtgtaatgtggttttagtgttgcttggttgtttaattattttgagcttgttttgtttttgtttgttttcactagaataatggcaaatacttctaatttttttccctaaacatttttaaaagtgaaatatgggaagagctttacagacattcaccaactattattttcccttgtttatctacttagatatctgtttaatcttactaagaaaactttcgcctcattacattaaaaaggaattttagagattgattgttttaaaaaaaaatacgcacattgtccaatccagtgattttaatcatacagtttgactgggcaaactttacagctgatagtgaatattttgctttatacaggaattgacactgatttggatttgtgcactctaatttttaacttattgatgctctattgtgcagtagcatttcatttaagataaggctcatatagtaytacccaactagttggtaatgtgattatgtggtaccttggctttaggttttcattcgcacggaacaccttttggcatgcttaacttcctggtaacaccttcacctgcattggttttctttttcttttttctttcttttttttttttttttttttttgagttgttgtttgtttttagatccacagtacatgagaatccttttttgacaagccttggaaagctgacactgtctcyttttcctccctctatacgaaggatgtatttaaatgaatgctggtcagtgggacattttgtcaactatgggtattgggtgcttaactgtctaatattgccatgtgaatgttgtatacgattgtaaggcttatgtcactaaagatttttattctgattttttcataatcaaaggtcatatgatactgtatagacaagctttgtagtgaagtatagtagcaataatttctgtacctgatcaagtttattgcagcctttcttttcctatttcttttttttaagggttagtattaacaaatggcaatgagtagaaaagttaacatgaagattttagaaggagagaacttacaggacacagatttgtgattctttgactgtgacactattggatgtgattctaaaagcttttattgagcattgtcaaatttgtaagcttcatagggatggacatcatatctataatgcccttctatatgtgctaccatagatgtgacatttttgaccttaatatcgtctttgaaaatgttaaattgagaaacctgttaacttacattttatgrattggcacattgtattacttactgcaagagatatttcattttcagcacagtgcaaaagttctttaaaatgcatatgtctttttttctaattccgttttgttttaaagcacattttaaatgtagttttctcatttagtaaaagttgtctaattgatatgaagcctgactgattttttttttccttacagtgagacatttaagcacacattttattcacatagatactatgtccttgacatattgaaatgattcttttctgaaagtattcatgatctgcatatgatgtattaggttaggtcacaaaggttttatctgaggtgatttaaataacttcctgattggagtgtgtaagctgagcgatttctaataaaattttagttgtacacttttagtagtcatagtgaagcaggtctagaaaataagcctttggcagggaaaaagggcaatgttgattaatctcagtattaaaccacattaatctgtatcccattgtctggcttttgtaaattcatccaggtcaagactaagtatgttggttaataggaatccttttttttttttttaaagactaaatgtgaaaaaataatcmctacttaagctaattaatattggtcattaaatttaaaggatggaaatttatcatgtttaaaaattattcaagcactcttaaaaccacttaaacagcctccagtcataaaaatgtgttctttacaaatatttgcttggcaacacgacttgaaataaataaaactttgtttcttaggagaaaatgattctgtaattccagtgtcactaatttatattgttctttcctctgatttttttcaggttagtgatttttttgtatacaatttaatccaaatgttatgacattcagaaatcatgaaacacagtagatatctgttataatgtggtgtatcacatggattataaagcaaagttatggtcgatttctattcttgaaagaatcaactacagtgaatcctwtgcatttgaagccttaacatgcattgctttaattttgcccagggacaaattttaataatcagcaagactggtttgtgcaaagcgttgagtcatcaggtatttagagcctagccagctacccagtatccatgctgccatatcccttcattgtaaaaagtacctaaacattcgtgaaatgattttttttagctgaaaaatgctggcaagaagaattttaaagcttaaaataggtggtaaatttgaagtatgagtgtgttcacgagaaacataggcttttcaaaaaaatttttattcaaggcaaagcaaggaacatcttgagatatgtctcaagaatataaagatgtattattttaagccaaggagctgaaatatatctcagtttataaattcaggtatattctttttgtctccatggcaaccataacttttgaaccaaaaaaaattgtttttacatctttatgctgaaaatgtgtttagattaggaatatggtcgggctgaatttgctgttgctccctaaccaaatccacctcttgttttccttgtgagtccatggctaaatcaaagctgcccctgagaagagacttaatccaagcctgattgtactagtggcatcacttagaagtaggctttccctcttcctagtagatctcaatgttttataattccttaaaacagctgaaaattgggacaacatactttacgcaatgaacagtagttaaataggaaataaactagttccatgtaagtatacacctagagttttaattacctttataatgtttcttaaaagtgaaacttagatacaattgtgattggatacttagatactaagtgaaacttagtgtaacaattttgatctgttaaattggattttacatgtacatttgaatgccagaatttctaaataaatcccctggttaggaaattttaaaagtcaaagcttgttttcttcaaccactaccttctacattggttgacttagaccgtaagctttttaagtttctcattgtaatttaccttctcatgcagattgctgatgttttattaaaccttatttttacaaaaatgaccataaatctttgcttctttcctcttagggatctttgctagtttatgtgattatgaaatcttacttacaacaccacattgtttggggtatacagggtggaagatagcaagtgaacagggggtgcgggtggggagggtttgtgtgtgtgtgtgtgtgtgtgtgtgtgtgtgtaagagagaacaaactaacggcctgaggctaataggttcagcattcctttcagatactatatgcaaaaaggtgggaacctaaggtctgttcctggaggcttttcagtgaagcctggcataggatcggcaagttaaaatatgtattaatttttacagctgcctaatcagaatgattcagcagatttacaggccaaatttttcctacaaaaccagtgacatcacagctaaacatctagaactttcatagattattgtacaaatttattaaaaggcacagtaatttatggtctatcatgtaaacactgattctcgacaaaaccacaaaggcaagtaatacagtgcaacagaaaaaagtagtccagaggagtttctttttttctttttttctttttttttttttgagagagagtcttgctcttgtctcccaggctggagtgcaatggcatgatcttggctcactgcaacctccacctcccaggttcaagcgattctccagcctcagcctcctgagtagttgggattacaggagcctgccaccacacccagctaatttttgtatttttagtagagacggggtttcaccatgttggccaggctggtctctaattcctgacctcatgatctgcctgcctcggcctcccaaagtgctgggattacaggcgtgagccacctcctccggccaagagtgttttcttaatgtaacaagtttaatctgaagtaagtcttaaatctcctagtatattttttggaaaaaaaaaaagccaaagaaacaaaaccagagtgttgaaatgctacctccaatatatgtataactcaaactgataattggcatggtttctgacagtgctgctgtttaccagcaggttattgacagactgacacctgttccattcttgaataaatataaactttgtctctctagctcttagtttaataaaaatccctgagaaggaggatgtgcagggtggagttgctggagaaaacttaatgtcttgtagaactcataactactcaatttaccaacttaaaaattaagctacatattaggaaatgtagtttatcacatgtaataaggaattgagattatcaggaaatcttgggtgaggctcaggatccaacatataactgggcccagcacataaaactgttacctgacttcaataagaaattttagccgggcgcagcggctcatgcctgtaatcccagcactttgggaggctgaggcaggcagatcatgatgtcaggagatcgagaccatcctggcgaacatggtgaaaccctgtctctactaaaaacataaaaaattagctgggcgtggtggcgggcgcctgtagtcccagctacttgggaggctgaggcaggagaatggcgtgaatccgggaggtggagcttgcagtgagctgagatcacgccactgcactccagcctgggcgacagagcgagactccatctcaaaaaaaaaaaaaaaaaattttagaaacacagatctctgcctcccagtgtaattgcctcagattttgtagcacatctcttaactgcagcttgataattccactgaaattaattctattggtcatattaaagaacaggttaaaaagtctttattgctgtactgtaaagcctgttttgagtggaagaccctaatcttcttttagtgaattccccaaactctgggtatgctcactgacaacacaagttgtaatcccttttttttttttttttgagacagggtctcactctctcgcccaggctggagtgcagtagcctgatcacagctcactgaagcctcagcctcccaggctcaagtgatcctgccgccttggcctcccaaagtgctgggagaattataggcatgagccatcatgcccagcccattttatttttaatatatcatcaattatttcttatacagatccattaggatgttgaatgctcctttaaaactttgttgtatttgtcggccaggcgcggtggctcatgcctgtaatcccagcactttgggaggccgaggcgggccgatcacgaggttaagagatcgaaaccatcctggccaacatggtgaaaccccgtctctactaaaaaaaaaatacaaaaattagctagatgtggtgcgcacctgtagtcccagctcctcgggaggctggggcaggagaatcacttgaacctgggaggtggagattgcagtgatccaagatggcaccattgcactccagcctgggcaacaagggaaactccgtctcaaaaaaaaaaaaactttgttacatttgtctttaaaagtcataaggcctagatcagtcttgtatgtgactagaatgtagctctatgggcagggttttttgtttttttttttttttgagacagggtcttgctatggtgcccaggctggagcacagtggcacaatctcagctcactgcaacctcctgggctcaagccatccttccaccttagcctgcgtagtaggtgggactacaggcatgtgccaccatacctgctaatttttgtagagtggggggttttaccatgttccctaggatggtctccaactcctgagctcaagtgatccgcccacctcagcctcgcaaagtgttgggattacaggcatgagccattgcgcccatgcaggtattttttttctcttttgttcactgattcgtatctccttatcgtagagtggcgcctgccacataggaggcctgcagatacttgcttaatgaatggcaagtgggtgtcaaaaatctctacttgtattactgttttgacaccttgacctgaagaagttaaccacaaataataaaattccagtttttctttatcctcatgtaactgcttttgtctcttatgacaagaatgctgaagtttcaaggagaaaattgatttgagtctgtactgccaaaataaatggtttgtcaaaactctggcccctactttgtaaactattggtaagtttaagaagtcagccaggcacggtggctcacgcctgtaatcccagcagtttgggaggccaaggctggcaggtcacttgagatcaggagttcgagaccagcctggccaacatgggaaaaccctgtctctactaaaagtacaaaaattagccaggcctggtggcacacacctgtaatcccagctactcgggaggctgagtttcttgaaggagcattttgcagctagcacctgacaggcatagtggagaagttgcctgttactgagaacaaacatcgcaagatcctcaggattactttctttcctcccctttctatagtctctattctgttttcttgatcttaatgtcacctttgtagtgagccacctcacatattttaggaaagttgtataatttgtgtaatattttgtctttcagaattcatccagtaagtatgagcacttaaaactaggaatcgaacttggagaggctgttgcctcatctagcacaagtatgtcataggcagtatggagaaagatcaactatcttttcagtaaggaacaaaaaagtctgatacagtggagaaaactattctagacagaaatttaatacagttatgttgttagaatgattgttctatttcttttgttgttgcttttgttttgttttctgagacggggtcttgctctgtcatccaggctggagtgcagtggcgccatcttggctcactgcagcctccacctcctgggtccaagcaggtctcccacctcagcctctcgagtagctgggataacaggagcgtgccactgcgcccggctaatttttgcatttttagtagagacggggtttcacctgatctcaggtgatccacccacttcggcctcccaaagtgtgctgagattacaggcatgagccaccgtgcccggccaattgttctatttttgatacttctcagagcttttaatctctttaacttaaaagaacagtcacccaggctgaatacgtggtctcagtgcagaattacacgaaagaaatnnnnnnnnnnnnnnnnnnnnnnnnnnnnnnnnnnnnnnnnnnnnnnnnnnnnnnnnnnnnnnnnnnnnnnnnnnnnnnnnnnnnnnnnnnnnnacttagggaggccgaggcgggcggatcacaaggtcaggagatggagaccatcctgactaacacggtgaaacctcgtttctactaaaaatacaaaaaattagccgggtgtggtggcgggcacctgtagtcccagctactcgggaggctgaggtagaatggcgtgaacccgggaggcggggcttgcagtgagccgatatcgcgccactgcactcctgcctgggtgacagaacgagactccgtctcaaaaaaaaaaaaaaaaaaaaatcatctagtcacagaaaacctgaaaataagttgacaagatgtaaactaatgggaactcttaaaattggtaacactgcttggaaaatgaatttagcatttataaccttttaaaactgaacatgtgcatgccctacaacccatcaatttcactttaaagcatttatggaaaaagtgcaccatggtgcattaacaagcaaagtagtcaaaatacttgattttaagtcgtagacattcaccaatcagaccaccagttaatcggaacttgaaccagctgtaaacaatatggccttgcagaggcgttccccatggcattcacagtagcaaaaggatccaaatgcccaaaaaaatgacccaaatgcccattgacaggagcattggtatattatggtatatttctagaacagaaagcaacaatgaaaatgattcacagtgttatgcattagcatggctaaatctatgaggaatactgaggttgaatagttcacaaataaaacttgtgttttaggatacgcaaagaaaagagaatgggaaacagtcgcctcctggggatcataatgggagaaggaggagcatacagaatctcaacagtattgttgatgtcctgtctcttggatgttaggttcatgtgttttggtaggcggtggcttcacaagtttttattatgtctcagcctccatatatgctacatgtattgttttgtacatttttaaagtatgtatatgatccgattcatatataattgtatctgtatacacaaacatttttattttaaaaagctggttaataagattacataaatgataatttcagaaaatgctacaggaattcaagcatggcacacagcctgcacttactaagcactcaaatgatgatgagctgattaatttaagctgggtctcaaaggatggataccagacagaaattttaaatgagagt

SEQ ID NO: 93324 - DNA, 19372 bp, Homo sapiens
  misc_feature (1)...(19372): n = A,T,C or G
atgcaccactatacctggctaattttttatatttttggtagatagggttttgccatgttgcccaggctggtcttgaactcctgagctcaaggaatctgcccatcttggcctctcaaagtgctaggattacaggtatgagccaccacgccagcctatatatatatgtattttttaagttattgtagagatgaggccttgctatgttgcccagagtggtcttggactcctgggctcaagccattctcctgtctcttcctcacaaagtgctggaattacaggcatgaggcaccacactcaaccaaaataaatcttttctctgttttttctttttttagtgacaaggtcttgctctgtcacctaggctgaagtgcagtggcacaatcatagtttattgcagccttgaactcctgggctcaagcaatcctcccgcctcaccctcccaagtagctaggatgtgcctggctaatttttttttaattttttgtagagatctctatattgtccaagctggtcttgaactcctaggctcatgtgattctcgactcttggcatcccaaaatgaagggattacaggtgtgagctgctgcacctggtcaacattagttgtctttttttttcttttgagacagagtctcgctctgtcacccaggctggagtgccgtggtgtgatctcagctcactgcaacttctgcctcccaggttgaagcaattctcctgcctcagcctcctgagtagctgggattacaggtgcccaccaccatgcccagttaatttttgtatttttcgtagagatggggtttcaccatgttggtcagtctgttcttgaacctttgacctcaagtgatctgcccatcttggcctcccaaagtgctgggattacaggcgtgagccactgtgcccagccccaacattagttgtcttaatggcatgttcttagccaagagctggaggtaacttccccgctattgaccataacctaccaaaggaccagacacaagttccctggctgggatggattgccttgtggctaggccttgacattagattttatttcctttatcctaaaggtcacacaactgttgcaggacacagaggactagagagactagtatgggtgaatacaggaggatatttattaggtgtgtaccagctcagtggactcacagctaaaaagctgagcactgaacaaagacagagtttagcttatacaggctagtacacagaaacaggacaaaggcagtaaactatgtagtgacaagtcacataatctatagcataactgttgacttggcataacttgtaaaacagaaacttataaattttactgaatacaagtgttggcaaacatagtcataattaattatttaaaggggagacagcaaaggaatttgttcttcttttaactttgctcgggggtgtctggagcctatttctgcaggctaggtcaccatgacctgtctatagccttgcctacagtagaagaaaacttctgtttttcatttaacctttacttttcttggagtgaatacatacagtatttattttctttaaatttctgattcacaacctgtttccaatgaccctttcctgccttagttacagtaattccattgtctgtcttgacttcaagaagctttctagttcttcatctccatgttactgctcattgatgggaatattgggtgtgagttttactctccaacattcgggcgtaagtattaaatgtcacttttctttttgtttctttttctgagatagcatcctcctctgttgcccaggctgaaatgtgatggcatgatcatgccttacagcagctaattcttttttttttttttttttttaaacttttttgtagagatgtgggtcttgctatggtgcccaggctgatcttgaacttctgggctcaagcaatcctcccacctcaccttcccaaagtgctgggattacagatgtgagccaccatgcccggttaccttcctttctttcttttttctttctttcttttttttttttttttgagacggagtcttgctctgtggcccaggctggagtgcagtggcatgatctcggctcactgcaacctctgcctcccgggttcaagcaattctcctgtctcagcctccccagtagctgggactacaggcgcctgccaccacacccagctaatttttgtatttttagtagagacagggtttcaccatatcggtcaggctggtctcaaactcctgacctcaggtgatccgcccgcttcagcctcccaaagtgctgggattacaggcatgagccaccgtgcctggcttgcttgcttgcttgcttgcttgcttgcttgctttccttccttccttctttctttctttctttttcttgtctttctctctctctcttccttccttcccttgccttccctttctttccttccttcctttcttccctccttccttcttttcttccttcctttcctccctccttcccttcctccctccctctctctctccttccttccttccctctgtctctcctttcctttccttcctttcccttcccttctccttccttccttccttccttcctttctttctttctttctttctttctttctttctttctttctttctttctttctttctttcttttcttctttttctctcttcctttctttcctcttactttttttctgagatagagtctagctctgtcacccaggctggagtgtagtggcacaatcttgcctcactgcaaactgcacctcccaggttcaagtgattcttgtgcctcagcctcccaagtagctgggattacagacgtgggccaccacgcccagctaatttttgtatttttagtagagacggggtttcaccatgttggccaggctggtcatgaactcccaacctcaggtgatccgcccacctcagcctcccaaagtgctaggattacaagcatgagccaccactcctggtctttttttttttaatgttcaataaccagctctgtgccctcagctactcggctggcaggaaattaaactccaggcatgtttgttgagggtgcttatctttagggttaggtaagactctggaatctgggaattttggggactgtcagctagtcttcagtggacagtgatcactgctgttaaactcactttccactgccttgccaagtcttgccaaggcggggacagaggaggggcctaggcatgagttccactctgaggctatcacttccctaaggccttgctgggcgggagagtgggctctagccattctttccctccatacacacacacacgcatacacacacagacagacacacacacacacactccctacttgtgaatcccacaaaattccccgaatatctgccctcactctgtaggggatctctcaaaaaccttcctccttcccaagttgatccagggagctgtcatctgtaatccaagagcttagagaggctgcagcgggaagactgcttgagcccaggaatttgaggctgctgtgagctatatatgacatcactgcactccatgcacgctagcctgggtgacagagcgagaccatgtctcaaaaacaaaacaaaacaaaacaaaacaaaaaaaaccaactttttttaaaacagtttttttcatgaagagcttctacagagcataaaaaccagatcagcaagagaaaatgtggttcttggtttccctgaggacaagaagggctcacatgcctggagggaggagttgttatattgaaattccatcccgcaggaaaggggagccctacttttcttacagccttgaaatgagccccactacttctacagctttaaataacaagaggccgggctcggtggctacgcctgtaatcccagcactttgggaggctgaggcgggtggatcacttggggtcaggagtttgagaccagcctggccacatggtgaaactccatctctattaaaaatacaaaattagtcaggtgtggtgactcgcgtctgtaatcccagctacttgggaggctgaggcaggagaattgcttgaacccgagaggtggaggttgcagtgagctgagattgagccactgcactccagcctggacgacagagcaagactccatctaaaataaaataaaataaagatacaaaaagtagccgggtgtggtggcatacgcctgtaatcccaactactctgcaggctgaggcaggaaaattgcttgaacctgggagacggagcttgtagtgagctgagattgcaccattgcactccagcctgggcaacagagcaagactgtctcaaaaaaaataaagtcaaataaaagaacaagaggcaggaaaaccaggcaagtttccttatcaaaatacaaccaatggcataaacatttctggatagcctgacccttctggtgttgatttatctggagggtcctggtctctgtgtggtgctgccagtcaagaggaatgatggatattgtgaaaaacccaagggcagaggggtcgggggtggagctagaggggactaggaatcaggtcgtgttcaggaggtggggcagagttaaactttgactttaaatgacccacataagcctccgtcctcctgttccaaataaaacaacgcactcagggtcagggtcaatgacctggtctaggtttccaggtgtctgtctcactgtctttctgcaatgactaccttgctgaaaacatgcgccacgcgtcttcatgatcttacctcctctgcttactcccctcctccccaactcccaccaaataggctgatccttggctgttccctgcttgtgctgagctgtttcaggtttctgtgcctttgctggaatatccttcctcttctctgccaggtgaatgcatcatcttcaaggtcggctcgaacatctcttcctgagaagtcttcctagatgtgtccaggttggagaggattcttccccaggtacacgagggaagcacatcccccttctggaaccctcagtctcttccagttcccctcaggacctggctgcccaaatgacagtggctttccacatgtttgtcacctggaaaagaagccgctcagccattggctgtgaaggacagaggtggcttcactctccatgtcggcaccattttggaaaaggattttcaggcccgagataagtccacagccagtttcccagccccacctgacctctgccctggcctatccctcagtccagtacaaggggaggcatgaaggtctcggttatactctggttcctgcccccacactcacccccaccccaatgaaccaggcagcttctagcttgttctgcaccctgcacactcccctacagtgacttagggcacttggggcctccacaaagctgacctggctcagcctctcagccccccagctccctgctagatgctttgctttctcatcattaccctcaggcttccctcaggctgctgctaggattctagtggatggatggaggcaggagagagaggtgggaggcagagcctggaggacatcaaaaactagaggagggaaggagggaatctggctgtggaggtgtggccaggtgattttcccttgcagccttgcagccaggagaaaagttccacctggagggaaaagaaaggagagccgcaggacagtcggcgccccccacttcctcttgcaccttgctagctcttatctccaaaacacacctctctgcctacttggttcattgaccctgaccctgagtacgttgtttgatttggaacaggaggacagaggcttacgtgggtcatttaaaatcaaagtttaactctgccccacctccttaacacgacctgattcctagtcacctctagctccacccctgacccctctgcccttggggtttttcacaatatccatcattcctcttgaccagcagcaccacaccaggaccctccagaggctgtgagaaacatcctgcacccaggtcctctctatctgtttatcattgtctattttgtattctgcattcagaaccaagagcctgaagacgacccaggagctttagctatggctgtcttcattattttgtccctgtttagtgttctggtgacaggcatgggtgaaggtggggctgggagtgagaaaggaggtgagagggaatgtaagctgaaccagcttccccattgcccctccgtatctcccagtgcccagccttggacacaccctggccagagccagctgtttgcagacctgagccgagaggagctgacggctgtgatgcgctttctgacccagcagctggggccagggctggtggatgcagcccaggcccagccctcggacaactgtgtcttctcagtggagttgcagctgcctcccaaggctgcagccctggctcacttggacagggggagccccccacctgcccgggaggcactggccatcgtcttctttggcaggcaaccccagcccaacgtgagtgagctggtggtggggccactgcctcacccctcctacatgcgggacgtgactgtggagcgtcatggaggccccctgccctatcaccgacgccccatgttgttccaagagtacctggacatagaccagatgatcttcgacagagagctgccccaggcttctgggcttctccatcactgttgcttctacaagcgccggggacggaacctggtgacaatgaccacggctccccgtggtctgcaatcaggggaccgggccacctagtttggcctctactacaacatctcgggcgctgggttcttcctgcaccacgtgggcttggagctgctagtgaaccacaaggcccttgaccctgcccgctggactatccagaaggtgttctatcaaggccgctactatgacagcctggcccagctggaggcccagtttgaggccggcctggtgaatgtggtgctgatcccagacaatggcacaggtgggtcctggtccctgaagtcccctgtgcccccgggtccagctccccctctrcagttccatccccaaggcccccgcttcagtgtccagggaagtcgagtggcctcctcactgtggactttctcctttggcctcggagcattcagtggcccaaggatctttgacgttcccttccaaggggagagggtggcctatgaagtcagtgtccaggcggccttggccatctatggaggcaattctccttctgctctacgaagccggtacatagatagtggctttggcttgggccacttctccacgcccctgacycatggggtggactgcccctacctggccacctacgtggactggcacttcctttttgagtcccaggccgccaagacaatacgygatgccttttgtatatttgaacagaaccagggcctccccctgcggcgacaccactcagatctctactcccactactttgggggccttgcggaaacggtgctggtcatcagatctgtgtctactatgctcaactatgactatgtgtgggatatggtcttccaccctaatggggccatagaaatcagactccacaccaccggctacatcagctcagcattcccctttggtgctgcccagaggtatggaaacaaagtttcagagcacaccctgggcacggtccacacccacagcgcccacttcaaggtggacctggatgtagcaggtaaggcatcctggcagaggcaaaagtgctggaggggtgagctgaagtctccatgcctagctttaaaagttttcgttgggctgggagcagtagcttatgcctgtaagcccaacactttgggagactgaggggggtggatcacttgaggtcaggagttcaaaaccagcctggccaacatggcgaaatcctgtctgtactaaaaatacaaaaattagctgggcatgggtatgctgtaatcctagctactcgggaggctgaggcaggagaatcacttgaatctgggagtcagaggttgcagtgagctgagattgagccactgcactccatcctgcgtgactgaacaagactttgtctcaaaaaaaaaaagtattccatgctttaaaaaattacctctgtgattatagaatttattatattgtatactatgtataaatatgatatattgatataagtatttagatttctatattcaaatgttatcataatgtacctacgttttgccacttctgttttttcatataacaacattattcaagcaagcaacaaaaatgtatgaatgcacacttgtgccaagcacccaactatgcaatttaacaaaagaaacaacattgttgctctcagatggtttacattctttttttcttaccttttgttttttcttttttcttttttgagacagggtctcactctatcacccaggctggaatgaggtagtgtgataatagctcactgcaatctccaactcctgggctcatgtggtcctctcacctcgatctcccaaaatgctgggattacaggtgtgaaccaccatgctcagcccttatcattttttcgtggtgagaacacttaaaatctactcttagcagttttcaagaatatataacatattaactgtagtcaccatgttgtacaatagatctctttggggtttttgttgttgtttgaaacagggtcttactctgtcacccaggctggagtgcaatggtgtgattacagctcactgcagcctcaacttactgggctcaagcaatcctcccacttcagcctcctgagtcactgggactatgggcacatgccaccatgctcaggtaatttaaaattttttttatagagatggggatctcgctatgtttcccaggctggtcttgaactcctgggctcaagcgatcctccctcctcagcctcccaaagtgctgggattacaggcatgagccaccatgcccagtccaatagatctcttgaacttctgaaattttttattcattgagctacatcttcccaactccaccctccttaaggccctgataaccaccattctatttcctactgctatgagttcaactttttttagattccacatataagtgagatcatatagtattgtcctgctgtatctgacttatttaattaacataatgtcccctaggttcatccatgttgttgcaatgagattttattcttttaaggctgaatagtatttcattatgtatatataggacattttctttatccttaaaattttttccttattccttatacatttattaattggaattttccataaggaagagttgtccttcctttttatttctgttttcaattatttattcaaattgtatagactcatggttttttattgtactctaagggttataacccagtacttcatttattttgttccttacatttttccaactttggccattgggagatccttcagattagttcctatgtccttttcacatacctccacacgtttttgagcacttctttactttctggcacccaaaaatgtttcaatttcatctggcattttccctgcttctaccctggaatcaaccttgtctccagggagatcgggttcactttattggagaatggtatttagaaaccaatatctgggcaccaagtgtgctcattattactgggatgtcattgcttttaggccctctcagtggacttagctagaaaatttaagcatatattccaaccaacccatacacacacatctatctttatctctgttattaaatgatgacaacttttaaaacacttggaacagtgcctgacacatagtgggcccttgagaaatactaggtattgttgtgattagccacaggagcctacttgtgtgtgtggaccataaagaactcttagtctctggccgggcacagtggctcacgcctgtaatcccagcagtctgggagactgaggtgggtggatcttctgaggtcaggagatcgagaccagcctggccaacatggtgaaaccccgtctctattaaaaatacaaaaattagctgggcatgctggtgtgcacctgtaatcccagctacttggaggctgaggcaaaataatcacttgaacctgggaggcagaggttgcagtgagccaagatcatgcgactgtactccagcctgggcaacgagagcgaaactctgtctcaaaaaaaccaaaaaaacaaaaaaaactcttagtcggcaattgtcacctaagggtggaaacactgggatatggagtaggggcagtgaatctacaaaaggaaactaagggtttgctgaatcagtctctcctctctcctggtctttggaaggtgcagagggagctaccagcatgttttgatttattgctccttgtctcagatcacttaacttgactcctaatatgggacctagttagactcaaataaaatcattcagactccaaaagttcaggaaacagattgtgtcttaagccccgctccctgctccctgccaaatttcaaactgcgaaaggtatctccaagccccaacagcgtcgggcccagtattggttttccttccccttggtccccatgtctgctgttctgttgtggtgtctctctgtgctgtcttcctctatgtgctgatgtgtgggcagtgtaaggccagactaagaaccaggtccccagcactgccatgatattaaccgtgtgtccttgctgaccaaccagggtacattattgaatgctctaagactcagttgtcccatctgtaagatggagacaatgatagttcctcctttttgagattgttgtagaagtgaaagcatgaatacacagaaggcactcggcatgctccctacacagctccttcaggttgagtcaatgtgaggcttattttcatgataaggcagtcctggcaatgccacagggcttcacatgtgaggagaagtcttcaggtcagagggagtgccacctgcctattgcccacaggattgttccaacctcaggtaaacaccctcccatgcagcccctcagagggaggacattggtggaggcccagtcgcaaggcatctgggattattaccagagaagacagmagggagaaagccctcctccaaatccctggactgggactatcttggggagagggaagagaagcaggggcacactcagttctgggctgctctttggcccccactctgcccccactctgaagccaggtgggggcagagtccagaggggccagggcaattgcatgactggccctccccgatcccaccctgagcmggactrgagaactgggtctgggccgaggatatggcctttgtccccatggctgtgccctggagccctgagcaccagatgcagaggctgcrggtgacccggaagctgctggagacagaggagcaagccaccttccccatgggaggcgccacccctcgctacctgtacctggscagcaaccacagcaacaagtggggtcacccccggggctaccgcatccaggtgcgcagcttttytggggagccactgccccagaacagctccgtggagagaggcttcagctgggggaggtgagtggtcggcggtcaggagggagtggggcaagtagaatgtatgaagggctccacactgctccacctcccacaggtacacacaaacacacacacacattcctgtggccgcaatctgtaggcactcaaaacaaagcctaatgggtgggtggaggaatgctgagatatgaggcattgaagaaaatctaggaaaatgttaatggtagacgctagacttgagtatgtggatgttcactatacaattcttccaatttttctgtatgtttaaaatgttcacattaaaggttggaggaaaaaaacagtgagatgggaacacagatcggagggaggattccctgaaatctaggtatttgagatactgaacttgacctaggatgggaaacaggccatgtccatatgtatggttccaaggcccaggctcaacatcatgctctgatccagatggatggatgagcaacatttctacctgaagcctggtgggccagttgatgtttaaggtacaggacagtggacaagtgggggaagtctgcagaggagagagagagagacagagacaggcaaggagaactggacaaagaatgatacagaggctcaatactccaagactttggggctcatttccccctagtgttcactcttcagtgcagcttcaggcagtgggacagttgacgaacttgtaggtctaataaaaaactcctgtaggtaccagctggtggtaacccagcggaaggaggaggaacctagtagcaccagcatctacaatttgaatgacccttggacacccactgtggacttcactgrcttcatcaacaatgagaccattgcagggcaggttagttgcgcggaggggtgagcaggcagctggagaggaggggaggagtcagggggacaagatgagccacttcactgcctcagaagcgagattcctcagggatcttcagaaaccactaacaatgaaactttggccgggtgcagtggctcatgcctataatcccagcactttagaaggctgaggcaggtggatatcttgagctcaggagttcgagaccagcctgggcaacatggtgaaactccatctctactaaaaatacaaaaatgagcagagtgtggtggcgcgtgcctgtaattccagctattcgggtgcctgaggcttgaacccaggaggtggtgattgcaatgagtcgagatcacaccactgcactccagcctaggtgacagagcgagactctgtctcaaaaaaaaaaaaaaagaaagaaagaaactttatgatttcagatttttcctgagaaactaagaacatacaggtgggtgagctgactccctatctgcaaggtcactgtgggaggcagggcatgtcctcagcaaagccagacctcgtgatcctctttcttctcccctgctaggayttggtggcctgggtgacagctggttttctgcatatcccacatgcagaggacattcctaacacagtgactgtggggaacrgcgtgggcttcttcctccgaccctayaacttctttgacgaagacccctccttctactctgccgactccatctacttccgaggggaccaggatgctggggcctgcgaggtcaaccccctagcttgcctgccccaggctgctgcctgtgcccccgacctccctgccttctcccacgggggcttctctcacaactaggcggtcctgggatggggcatgtggccaagggctccagggccagggtgtgagggatggggagcagctgggcactgggccggcagcctggttccctcttycctgtgccaggactctcttccctccactgccctccttcrcatccccctctgagccaggagcctcctgaccctgtgatgcctgacacaggggacagtcagctttgttgatgccagctgtgctgagttcccatccagagaggtgaggcatggcccagcctggagcctggagccgtggctaagcatttctccagaccactcctggttttcttaacagtttgttttttttaatgagacataattcacataccataaaattcatccctttaaagtatacaatttcagccgggtgcagtggctcacgcctgtaatcccagcactttgggaggccaaggcgggtggatcacgacttcaggagattgagaccatcctggctaacacggtgaaaccccgtctctactaaaaatacaaaaacaaaattagccaggtgtggtggtgggcgcctttagtcccagctacctgggaagctgaggcaggagaatggcgtgaacccaggaggcagagcttgcagtgagccgagatcgcgccactgcactccagcctgggcgagagagtgagacttcatctcaaaataaaataaaataaaataaaactaaatatacaatgtcatgatttttttttttcctgagacacagcctcgctcttgttgtcctaggctggagccccgcgctgccttcnnnnnnnnnnnnnnnnnnnntttcgctcttgttgcctaggctggagtgcaagggtgcgttctcagcttactgcaacatctgcctcctcagttcaagtgattctcctgcctcagcctcccgagtagctaagattacaggtgcccaccaccacgcctggctaattttttgttttttcttttgtatttttagtagagatggggtttcaccatgttggccaggctggtctcaatctcctgacctcaggtgatccacctgactcggcctcccaaagtgctgggattacaggcatgagccactgtgcctggcccaatttcatgttttttagtatacccacaaagttttgcaaccattgccactaattccagaacattttttatcaccccagaaggaaaccctgtatgtgttagcagtcactttctatttccccccaatccctctccatttctagataaccacttccctactttctgtcccactgggcttgcctgtattctggcatgaaaagattcaaacaatacgttgtcttctgtgattggcttctttcacttagcgtaatgtttgtgagatacatccatgttgtagtgtatgtcagtgcctcacttcttcatggttaaatgatatctcattgtatcaatatatctcattgtgattatccattcatccgttggtgggtatttgagttgtttccacttttttggtcattatagataatgctgttataaacattcatgcacaagttttcttgtggatatgtgttttcacttctcttgggtatatgcctaggagtagaatttctgggttatgcggtaattctatgtttagccttttgggaaactgccagattgttttccaaagtgactatacttttttccttcttttaaaattgtataaaatatatgtaacataaaatttgccaccttggcccaggcgagtggcccacacctgtaatcccagcactttgggaggctgaggcaggcggatcaactgaggttgggagatcgagaccagcctggccaatgtggtgaaaccccatctctactaaaaatacaaaattagctgggtacggtggcatgcgcctgtaatcccagctacttgggaggctaaggcaggagaatcacttgaacccgagaggcagaggttgcagtgagcccagattgcaccattgcactccagcctgggcaaaaatagcaaaacccagtctcaaaaaaaaaaaaaaaaaattggccactttaaccatttttaagtgagagtttagtggcattcagtaaatttggaagctcttttgggccaccttagctctcctctgtcctgttttgtttgtttgtttgttttttgttttttaagatagattctcactcttgttgctcaggctggagtgcagtggcatgatctcggctcactgcaatctctgccactcaggttcaggcgattctcctgcctcagcctcccaggtagctgggattacaggtgcccgccaccacgcctggctaatttttgtatttttaggggagacagagtttcatcatgttggccaggctggtctcgaactcctgacctcaagtgatccacctgtcttggcttcccaaagtgctgggattacaggcgtgagccaccatgcctggactgccctgggtcttaaaggtgaatagggagcctctagagaccagactgttctcccaaagccccagagcaggttccccagtagatgtgcatctcagttttgggccttgaatagcaggtccttctctctgtctgttccctctcatgctgacaaagtcctcctcctctcggttttcctgctacttcagcttctattccctgctggtttttgttttttggtttttgtttgagatggagtctctctctgtcacccaggctgaagtgcagtggtgtgatcccggctcactgcaacttccacctcccaggttcaagtgattctccagcctcagcctcccaagtagctgggactacaggcgtgcgccaccacgtcaggctaatttttgtattttttggtacagacagggtttcgccatttggccaggctggtctcaaactcctgacctcaagtgatcctccggcctcggcctctcaacgtgctgggattacaggtgtgagcccctgcgcctggcctgttccctgctgtttgtagcggaggtcctgtgggagcgtccctgctgcctcaggtcttgtagttccttcctgcattccttacttctggtgtcctcctctgcccctgggctgggttagccttggatctgcaggtactgtcttgtttgaagaaggacaatgcttggttatctccttctgggggacctatgtctctgaacagctttcttcatcttgcctctctgcatttcattgtcataaaaaaatgtttctcctgtcatcttgtcatctgcctatactaataatcctcttacaagttcctgccatttacacaggccatgcggaatatgcatttgtgagggggaaggatggtcaagtgtcagcagcagcccaggggttttgtgggtggaaggatgaaaaagatgaagggtcatctggtcccagggccctggtgacagtagcctctgttactctgcagcagtcagcataggtgaccagaaagtcactgagggtaggcactaaaaagcctcaggagtggccaggtgcagtggctcacacctgtattcccagcactttgggaggctgaggtgggcagatcacgaggtcgggagttcaagaccagccggaccagggctgcccctcatgggctgtggactttggactttggattggcataaataagaaccgggacaattcccaggaagggatttgggggtgggagtaaggtggggaggaggtagggctcaaacaccaagctttctcaggtgtgtcaaggcaagagaaacttacgcagtatgaggcgtccacacctctgctccttcagtgtcttttctgggagtgagatcaagaagagagggtgtcccgtcccagcagatggtgaaaccccgtctgtagcaaaaatacaaaaattagccgggcgtggtggtgcgtgcctgcaatcccagctactcaggaggctgaggcaggagaatttcttgagcctgggaggcggaggttgcagtcagccgagatcgcaccactgcactccagcctgggcaacagagtgaggctccgtctcaaaaaaaaaaaaaaaaaagtctcaggagctcgggcagccaggtggggagctggcccatcaggagttggcatgcaaatgagccacgtgcctcccagcgggggaccagaggccaggtcagggcaacagcctccagggctgcccgtcatgggctgtggactttgtataggcataaataagaaccgggacaatttccaggaggggatttgggagtgggagtaaggtaagggggaggtagggctcaaacaccaagctttctcaggtgtgtcaaggcaagagaaacttacccagtatgtggcgtccacacctctgctccttcagtgtctttcctgggagtgagatcaagaagagaggggggggtcccgtctcagcaggaagcccaggctgcccacccagtctgaggggacggcactgactgggcaggatctggcaagaggggagtttagggtgcagatttgggtccaattcagcttgtgaccagaagagggatcatcaactgggatcccagatcacatggaatcctgtggttcccttgagaactgcctggacccccaggtcaaccatatgggctggaaaggaagtaagttctagcaaaaggaccttcatacaaggactaaagccgtgggaaccacacttcaattcatgactttcagcatatcttgaaagcacttagatagggaaggtttggaaaggcagaactgctactgccgctgctgctgcctcttctttccattttgtgtctcagctcaaagatagagcttctctttaccctctcagcccagataaatatcttgttttgcctttcttgcatttttttttgtttaaagaaatttggaggctgaattgggaggatcacttgaccccagaaggtcgaggctgcagtgagccatgattgcgccaccgcactccagcctgggcaacagagtgagaccctgtctcaaaaaaaaaaaaaaaaggccgggggggggagcataatagtggaaatgctctgtcttgccctgaaaatgaatgctgtagagagccagggctgccactcttggctgctccacaggttgcttctccagatgcggagatggggagaagggacctgtggccccaggctgaggtctgtgaggggcctgctgctgtggctcacttgctgaccaaggaggatgccatacggccccccactggggtctgagggcgcaacccaagccaccctgaaggggtgtgtgcacaaggagctctcaggagaagcccccaaggtggcctgttggaaggctctgatgggaacatttccttccaccttcaagaaagaagcaatgggaccctgaagaatgcagcccagagagatccaaagggtcagaagctctggggcaaatctggtaaacttcctgggggtgccacagactcatctccaccttgccctgtggtctggccccgccttctggtggagcctgcccccgccttctggtggagcctgccccgtccccaccctgacacttgacctgtggctgacagtgggccacctctgctccactcaggctccgtggccggagagtctgcagcttctctggcattcctcctccccgtctgggtcctgtgatggaaacagtctcattcagctgccccagagactcacaagtcctttactcattcagcaagtattttccagtccctgccatgtgttgggcccctgttaattctatagtaatatttgttgtggtaaataaaattgccttcatagtgatgtcatggtggagggaggaacactcaggagaagagggtgtctctgagcccacagagctcccactgctatttctaagaggccagcaatacatctttgcatttcagaaaactgggtctattcaagaaataaagatggatggaggtcaaaatgggaatggatttggagaacagagtgggggtggggatggagcaggatggaaatgagagggggtggagagggaataggggggaggttggtgatggggaggggacaggataaggaacaagatgaggaagggggaaggtggagttggagtggagatgaggatcaaagtgaggagggctgggtcatcctctggcctctcctaccatgccccatctacacggatgcaaagaaaacttcattcactcatcgaacgtttctgggactcttcctgaatgccagacttgcattggtacagaaaaatgactctcttcatacttgccttcaaagagctcagagtctgggctgcggagaggtctttttataaacaaaaacactggccgggcacagtggctcacacctataatttcagcactttgggaggccaaggcgggtggatcacatgaggtcaggagtttgagaccagcctggcca

SEQ ID NO: 93325 - DNA, 30309 bp, Homo sapiens
tctctttgcatgcttattgcttttgcctttcttcttcactgtctctgaaaaaaagaaatctagtgaactagacttgagccccaagaggttgttacagcccaagaatgtaactaagcttaatgagtggaggagaagccaacaaatgggtgcctgggatgcaaggaactcagggtgcttcaccttagaaagtacatgacgatagtcaactaccacatgaaagttccaggatatcagagattttagcttttcttttccagaaactagaatggtgcttggcacatagtaggtgcataacttttgtggaaagaaagaaggaaagtgagatagcaagcaagggaaggaagaccgcagtctctaatacaatgacccttaaatcctttactagagtttgagcccatgaggccatttttggatttttataataaaagcccagggaactgccagaatcttcttaccattcttttctttgccactacctgagaaactgttataggtgctgagaacacctttccctgagtcctgcagctccctctacactgtcaaaccaggtgtgtgcacttggaccagcatcttcaaatctttaaatgcatcacgaatggctttaactacaacagtgaggacgggaagagaccagcaaccagagcagagcaaaaactccattaagttgcatcaaaggcccaggtgaagcaagagaacatagattgatgagagctatgtgattactccaaaaatactctgcaacctggagaaagagcaggggaaagggacaaataagtttcccaaggttaggagtcagccaagtagatgcaacatgagctcaagaggaaaaaggaatgggtagaaccagaaaaaaatgtgggattcaggctgtaaacagaggtggaagaaaccaagggctgcatgggctctgttagcatttggtctacaagttttattttatatttggaaatatataaatcattgatgagatgttttattttctagccatttgggcatcaattacacacatcgcaattttctttgtcctcccaaggagaaaactgaatggagccaggcagagctgccattcgcatcacacacctttggaggctacccacacagtgtgacagttgcatcccaggactctagagcagtaagcctcacttgtgagacaaagagacagatgtcacttctacagtgtgatttgaagggcaacaggaaatctgtgtagcctccctaccccatgccttctgtcagccttccattgtgcctaaaatttccctattattcactgcttagatttactgtacagaaatactaataaagcacaaatgttacctggagatgtcacgcagctgaagcagtacaaaaaacttgaaagtcggaccaagctagggtcagatcccagctctcactccatagcagtgggatacctggcaaattacttagcatcgcaaagactctctatccttatttataaaaatctgaactctacctacattatagggtcatcataaggataatttgactgacatgtatagagcaactaccacagaaactgacacctactgggggcccaagagatgttccttctttttatctttatctatgaaaactggcatggtgggaaaagcactggacaagagtcaagggtcatgggttctagtccatgctgttccactaaggagctgtgtgaccttgttaaggtcacttttcttctctgggcttgagtttcccaggggcttgaactgaatttattcattcaaaaaatgttattgagctcccagtatgtgccaggagctgttaatctgcttgcatgatgaataaatgaataaacatgtatgtgaaatcatggtaagcaatagacagataattaaaacgtagtcttatgatggagaggtcctgggtagctatttcagatggagcactcagggaagacctgtgtgagggggtgaattttatactgagatctccaatgacaagaaggagctagccatcgaaatctcaaggggagatgctacgatgctgtgctggcagaggaaacagcaaatgcagagtctccctcaaaagaagcaagcttggatgacttccaaagtcttttctaggcccaatagcctttatcttgtgttcgctgtggtcaggatgtgacttttgggtatgatactaggataagtcaaatggcagtccttttatgggctgatcactgtcagtaagaggtagatcgtgatgcagttagactagttatgctaggggccagctgagcaagggaaaatcataacccagactggaaagagaaaagtacagctaaaaaagcaaagacgtcattgggctataaagaatattgtagagactggggccaatttcctttcaaagcacccagcaggatcttatcataagacagtgacagagaaacaatgacagaagtttgcttcttggacagttggacacttttttgaagctcctttacagcagctgaagaagggcagaactaagtcaggaagaacattcctaggtgaacttagaaataagcgtctgggctagaaacattctggtctcagatgacagaattgagatattcattcatttccctcactcattcactcattcaacaaatatttattgagggcccactcttctaggccatgcttttatagctggagctacggcattgaagaaagcagacaaaaacccctagaaaagtccttacattctagcagggaagatagaaattgagaggtcaagatctttaacctgaacaagcttagactttttatttgctctaaatactgagtgcccagtctgtgcctagtggtgggttagttgctgggtactgtgctgaccacacctggtcacgcaaacacataataacgtacattgatagaaagttttactgccctcaaaccactgatctcctttcatcctcatgccaccctacaagctctgaaaggcaaaggggtttgctcaggctcaccatactgagcatctggactgcatcccaggtcatcttgcagtctagagctctttcaattatatcattttgttgcttactatagcagatgttttccttctgttgaactaacctataggcaccttcccagacattatattggaagcaagaattgtgaagaggcaggacctgagagaattcactctgttgatgtgtagcagcagctactcccaggttcccagggcagcatccagtgtcggaggtgtctgcagggcaatcacagcatcagtgctggactgcagcaacaatggtgtcttcactgccttagttttgttgcatgattaggaacattgcttccaggtgtgtagcccacaatgcaggtactctaggcctcctgaagatattctgaactaccaatactcattttaataaattcttttttgtgcgttcttaaatcaaccagatttggtttatgttgcctgaaatacacactgtgactgctatacttacaaaatcctttgtcctcatttaccagcaggataggctaagttttctacagtttaaaaaaaaaaaaatccctagtggcttaaaacaatatggcttctctcctgctcatagttctattgcatcccaggttgactggatttttccaaataaatgtttaaatattttgaactaaatgaaaatgaaaatacaactgatcaaaatttatgggatgcagcaaaagtggggttttgaagaaattttctaacattgaatcacacattaaaaaagaaaaaagatctaaaatcaatcatttaagcttctaccttaggaaattaaggaaaaaatagaaacataaacccaaagaagcataatacaaaataataatattagagcagaaatcaatggaagttgaaacaagaagtcaatagagaaaaatcaacaaaatcaaaagctagttttttcacaagatcagtaaaattgataaacctctagtcaagttacaaattactaatattggaaataaaagaggagctacttctactgatctcatgatcattaaaagcataataaaggctagtttaaaagtataatcataagcgcctctgcccagctgcccactgtctgggaagtgaggagcacctctgcccagcttctgccctgtctgggaagtgaggagcgtctctgcccagctgcccaccgtataggaagtgaggagcgtctctgcccggccgccgccccatctgggaagtgaggagcgcctcttaccggccaccccatctgggaagtcaggagcgcctctgcccggccgccgccccatctgggaaatgaggagtgcctctgcccggccgccgccccatctgggaactcaggagcacctctgtccagccgccgtcccgcctgggaagtgaggagcgcctcttaccggccaccccatctgggaagtcaggagcgcctctgcccggccgccgccccgtctgggaagtgaggagcgcctctgcccggccgctgtgcaaccttccaagtgtgaagtgacaaccttgtgtgtgatcttttctgtcctccccaggtttgcactttcgacattaaagtttactttttagttaaaaaaaaaaaaagtataatcaaaagctaatttttttcaaaagatgagtaaaattgataaacctctagttaaactgcaaattactaatattagaaattaaagaagagctatttctactgatcccataaacattaaaggtataataaaggaatataaacaactctatgcctacaaatttgataaaatatatgaaataggccaatcccttgatgggaataaattaccaaaactcacacgaggagacatagaatatgaataaacctatatctattaaagaaactgactcaataattaataaccttccaaaaaaagaaaataccaggtccagatggttttactagtgaattctaccaaacatttaagggagaaatcataccaattctctattatctctttcagaaaatagaagcaaacagaacattttctaactcattctatgaggtcagcattgtcctaatatcaaaacaaaccagtgaaagtcattataagaaagaaaaactgccgggcgcagtggctcacgcctgtaatcccaggactttggtaggctaaggcgggcggatcacgaggtcaggagatcaagaccatcctggctaacacagtgaaaccccgactctactaaaaatacaaaaaattagccgggcgcggtggcgggcgcctgtactcccagctactccggaggctgaggcaggagaatggcgtgaacccgggaggcggagtttgcagtgagcagagatcgtgccactgcactccagcctgggcaatagagcaagactctgtctcaaaaaaaaaaaaaaaagaaaagaaagaaagaaagaaaaactacaggccaatatttttcatgaacccagatgtaaaaattctcagccaaatattggtaaatcaaatccaacaatgtagaaaaagaattatacaccacgacaaatgagatttattccaggtatgcaaggctggctcaacattcaaaaattacttcaggccgggcatggtagctcacgcctgtaatcccagcactttgggaggctgaggcgggcggattgcttgaggtcaggagttcaaaatcagcctggccaacgtggtgaaactccgtctctactaaaatacaaaaattagccgggcgtggtggtgtgtgcctttaattccagctattcgggaggctgaggcaagagaatcgcttgaacctggggtgcagaggttgcagtgagccgagattgcactgctgcactccagcttgggcgacagagtgagactcagtctcaaaaaataaataaataaacaaaaatcacttcatgcaatccatcacctcaacaggctaaagaagaaaaatatataatcatatcaatagatgcagaaaaaacatttgacaaaatcaaacacccattcatgatttaaggaaaaaaatcagtggactaggaatagaaagaaacttccttaccttaataaagaaagtcgcctggctaccctcgaggccgctgaaggtcagcgcagtcgtggcgttctccacgccggctgcctgcctgacccatcagcagaaggtgttgaggctttaaaagtgggtgctgtgccacctcgagttgtgttgcatccacagggacaaataccgatactttgcttgtttgatgagagcccrgtctgaagaacatacgaacgaaaaggatatgatgaaggccatccggctgctgaaggaggctgaggaagaattctggtaccatcagcatccacagccatgcatcttccctgactctcctaggggtacctcctatgtgacacacgagtgctacaaggtcccagaatggtgcttagatgactggcatccttctgagaaggcaatgtatcctgattactttgccaagagaaaacagtggaagaaactgcggagggaaagctggaaaagagaggttaagcagctgcaggaggaaacgccacctgccggaaaggaaggtgatttgcccccactgtggtggcatattgtgaccagaccctgggagcagcccgtggagagagagagagagagagagagacctcctctttcatgcttgctagtgaaatacgttacagaacatacacttgctctaataaaaaatcagtgaaatggaaaaaaaaaaaaaaagaaagcttgccaacccctacagctaatattatatttaatgatgaaactagatggtttcccctgaaaatcagaaacaaggaaaggaggtttcctctcaccaccctattcagcatcatactagaagtcctagctaagacagtaagataagaaaagaacaaaaaaattaaacagataaagaaggaagaaataaaactgtctttgtttgcaaatgtgatgattgtcaawgttgaaaattccaaagaactgaccaaaaaacaaaaaaaaagtcttgaaatcaaaaagcagttacagcaagattgtcgatacaaggctaatatacaaaatttaattgctttcctatatacccacaaggaaaaaatggattataaaattaaaaattcatcacttatgtcagcaccaaaaaattgaaatacttaggttctaatctaacaaaataaatatagaatctatttggggaaaacaatacaagtctgataaaaaatcaaatatctaaataaatggaaatgtgttccatgttcatagataggaagacccaatattgttaagatgtcaattttttccaactgatctatagattgaatgcagtcttaatcaaaatcctaacaagttattttgtgaagatcaaaaaaagatttaaagtttatatggaaaggcaaaagacaaaataatcaacacaatactgaagaagcacaaagtcaaaaggctgatattacctgactttaacactgctaataaaggtacagtaatcaagacaacatgatattggaggaacaatagaagaataaatcagtggaacataaaagagtccaaaacagacccacataatacagaccacctatctttgacaaaggagcaaaggagattcaatgaggaaatagtagatttttaggccaagcgtggtggctcacacctgtaatcccagcactttgggaggctgaggtaggaagatggcttgagcccaggagtttgagaccagcctgggcaatatagtgagaccgtgtatctacaaggttttttaattagccaggcatggtagtacacacctgtagtcccagctactcaggaggctgatttgagagaatcacttgagcctgggaggcagaggctgcagtgagccgacaccacaccactgcactccagcctgggcgacagactgagaatctgtctcaaaaaaaaaagaaaaaaaaaaaaagatatcgtagatttttaaataaatggtactaaaacattggatatccttagaaaaagaataatctagacayagaccttccttctacttttcacaaaaaattaactcaaagtggatcatagacctgaatgtaaaactataaaacttctagaagataatgtagaagaaaatctaggtgaccttgggtttggagattagttttcagattaaaaaaaaaaaagaggaatacagaaaagaaaaaatattggcaacttagattttattaaaattcaaaacttctgctctgcaaaagaaacttttaagagaatgaaaagacaagccacagactggaaaaatatattcacaaaacacatatctgataaaggccttgtagccaaaaggggaaaaaaatccttaaaactcaataataagaaaataaacaactcattttaaaaactggcaaaagacccgaacagataccccaccaaaaaagatacacagatggcaaacaagtatatgaatagatgytcaacatcatatgccattagagaagtgcaagttaaaacaacgagataccactaaaaacctattctaatggaaaaacaaacctgacaataccaaatattggcaggaatattattcagtggcaatgcaaaatggtgtggccactttgaaagataatctggtggtttcttacaaggcttaaacatagtgttgccatacaatccaacaatcacactcctaggtatttacccaactgacttgaaaactttgcccacataaaacctaaaaacaaatgtttatagaagtttattcataactgcaaaaactggaagcaaccaaggtgtaactcaataggtgaatggataagcaaaccatattctatacaatgaatattattcagtgacaggaagaaagtcctatcaacccatgaaaatatataaaagaaatttaaatgtgtattgctaagtgaagccagtctgaaggggacacatactgtatgattccaactatatgacgctctggaaaatggaatactatatagacattaaaaagtcagtggttgccaggggttctgggtaggggagggattagctagtgaagcacagaagatttttaaagcagcaataggattctgtatactataattatgggtatatgacatgcatttgttgagactcacagaattgtacaatgcaaagagtgaacctctatgtaaactatgaactctagttaataataatatatcagtattggttcattaattgtgacaaatatactacactaatgtatgaagttaataatagggaatatgtcagtaggggagatacatggaaacactgaactgtctgctcaattcttctgtaaatcttttttttaagacaaaatcacactgttattcgtgttagagtgcaaatgaagcagcatgatcataactcactataactcaaactcctgatctcaagcaatcttcctgcctcaccctcctgaatagctaggactacaggcacatgccaccacatccagctaattttctttctattttttgtacagatgggtctcactattttgcccaggctggtcttaaacccctggcctcaagggatcctcctamctcagcctcccaaagcactggaattataggcatgagccgctgtgcctggccattctgtaaatctaaaactgtgctaaaaaataaagttcattaatttaaaaaaaaaaacttaatggtttaaaataacaatggtttatttcttgatcacactttatgttcatgccaaaattggctgctttttccttattcaggaaactggtacagacttattcaggggcagcctggttgatgaaaatctcgtcttgaatatcaccagtcttcatgaaagagtggagaaatcgttcaatcattcttaaatatgatgcaccagagaaggcacattgcttctgctcacatttcattatgagtaagtcatccagccacacctagctttaaaagtggtaggaatgcaattttatcatgtgcccagaaaaagaaaaatccaaattctagtcattagtcctaatgactaccaccccttgtttcctagttccttctcctggtccaacatcatcacgaggacacttgtgcacaggacacttttgcgccagcacatagaaacacattctggctgctcagaggcaaaggctctccaagcccactgatccttgctagtgtcattgatatatctcgagcaagctccacctgcttaattgcttcttcactctgaaatccctcctgaaaaacctagcgcttttatgaagttcttccttggcttcataccctcagtatcaatttacaagagggaaaaagtccaaagagaaacagaagaaacattgggaaaagtatgcctcaaaaagcctttgtaggtaagcagatcaaggacctctgtaccagctttcactccattgagtgttgctcagcaaggggcttgacctgtctcttcacctgccaccacaaaggcagatggcaggctacaaaggacacattcattgtaaagaattataaagtctcattctgttcacagtggccaagaatgccttgagcattcaaaacctgagatgtgtggaagaaaaagtgtgacaaggactacttgatttgcatgtgacaaatttaactcaaaccagcttaagcacaaagagaatgccaagaattcctgtccagattcagaattaaggaattaatttgaaaaatatcattagatctcttctctctctmtctctctctctctctctctctctctctctctcgcttttctgagttgattttattctcaggcaattttctcccgcatgctaaaaaattcgcttagggtgtgatatggtttggctgtgtccccacccaaatctcatcttgaattgtagctcccataatccccatgggtcatgggaggtacctggtgggaggtaattgaatcatgcaggcaggtttttcccatgctgatttcatgatagtgaatatgtctcatgggatctgatggtgttataaagagcagttcccctgcacatgctctcttgcctgctgccatgtaaaacgtgtttctgttcttccttcaccttccaccatgattgggaggccttcccagtcatgtgaaactgcaagtccactaaacctctttttctttataaattatccagtctcaggtatttcttgagaacaatatgaaaatggactaatacagggagttaaatctatcccaaactttcagaaagttagctctttcaggaagagagagacagagacagaagcacagagagaaaaagaatacctctgccactggtcccagcaaagtcctggaagaatgctgaggattctagttgatcaaccccaggtcacataggcctccttgaactgattgcatggtcactgtagcttggtcctatagcatcaatatggaatagacttcttgttggaaaaagatgtttctgtttccagagaaaaggaggagaggagagctacaactaccagagccaacaacagtaaggggacagaatcaagtaagcacacaatcatgtgcaagcacgtacatactcgcattcaggcagcccttccatcatcagactgcccatcttagaaacgggttatggttccaggattgtctaaggctgaagacgatagaaccgctcctccagagctatagccctgctgccttcctccacgaagatgggacttgcctgtgctcgctcttccagtgtctccctggttgaacacctcccttagtaatttgcataccaacctcgcaccccacaagagcctgtggttatcttgaggaaaataatggtttctgtttttctttgcattctatcacatggtccagggatagtcwttcagccagtattgaatgaatgtctgtatctctggatgcataaatggacagaataaagagcttctaagaaagtagaatatacagtccctgactctgggatctttttactctgtcaaggacaattagaatacctcttaacataacagaacagatttaaataaaagccacaagaataaattaactccataagatttgaatcagataatgatcagaggatgccaagtaaaagtgtaaacaaagtcaggcttccacagttatcaagtgcacttggagacagctcttctttcttattatttgtgctcaaatcttattcgtgtcagtaatgtgattctcaaatgggagggacacatggtgaatgcagagagcagcttggattggaagagcccatggtgctttattagtacagaggaacaaaccctagggttctgattcctgcccaggcctagaaaagtctacccctctttcctggccaccagtatcccactaatcccaacagtcctccatctgggagtaggtaatttctccatttgcagagaataagagtccttcccatccttcctcctctgacatatgcagactacacattagcatggtaatgtctcatgccattagtgagtaacgtgctgaataattaggctatgaaaatctaamggcagggatttttgttttattagcaattttccatcctattgtgttaatttcatctcatgtcagctggctttctaagtaaacaatgatcacaggcagacatcagttctcagcacattgtgctgccgtgggtgacttaacagaccaggaaatggcttaagttgccttttgtcttgcagtctctgccttctgttgatgtcacaagatctctagtccctggtttcttatgaccctagaatattcatttcctctttgtgtgtgtctttctctgcctgtctgttctcaatctatctcaatatccttcttgctcatctttgtttttcttctccctcttttatgccatctcctctccaatacctctgtgtgcctacctgtaatgacattgcacttttcaataccattttattttcaaataattctcacatccatcttgcatcttctgcccccacttcatttttccatatamcttctttaatgtctctcactttcctccccaattcatctgcttttctttccacttgactatcttctcagcattccttccttcacctcctgtactcttcatttggcctagctcctggagtgctatctttcagcctctcaccaccctccatcccccacccctccatacacacacacacacacacacacacacacacacacacacacctcattttctccttcctgctcaccaagattcctggctgacaggtgattaatattgggcccaggcatgctggaaagtttaatgctttttctgtgatatccccacagtcatgaaacatctgcaagtttctcccagagctgagaaaaagttctgttacttaatacattgttgttgtccaaattacaaaagcacctgccaagtctctaagaaagatcatggagaaaggtattggcagcatttwcctgggtcaccacatggacagagttgatgaagaagggtcattcttgatcaaaagctcttctttcattctgttcctttctrtctgattccaggagaggaggaacctggattcccccaaggcaggatcatgtttactgactctatccaaatatccaggccaaagaactagaacaatgaggtaatatctccttcaaaaaaagatatggctaaatgtcaataactcaagcactcaaactatgcatccacagaagaccaataacccaacaggctgctgtctggggcagcagttggggacaagccaaagcaatgtataatttttataattaacccacaaaatgtaacatagttgcccttcctgctaagggccataaatattgtccctttgattttattcacccttgcctcctcatcattcagccacatatccccacccctcctctataatgctcaacatatagatggctatttgatgtctcaaaaaatcaaccggcttaataaatgagattttagccctgaaaatactgtcatgactccgatgaaaaagagatccagaagaggatacaagaagcttttgaaaagcgccaaggcccaaaatgatctgagatatttgcaaatcggtcccgtacccacaactgtgcagcagtgagaattacaaaagagattggagaataatttctgtgatctcaagaaaacgttgattagacaagaaaataggattaactcttagattgtgtgaaataagctacacatataacacatgcattttaaaaaagatagctaatgtagctccatgaaatcaaaggtgatttaaggcagattttaaacattcctgcgtagagaaataaaacaatcaaagcacaaatgtggaaatgtgaatggcctgggatcacagaaaaggcagctttgctgctatgagcaatggacactactccactcctgggcacttccagctgctgccccggcacagcgacctctccagcatcacgccaggactgaaccactgaaaccattatgcttagtgcacagtgaaccaaccttagaacgagaaatgggcaagccaatctcacttctgccacaccttcttcctctcagctctcatcgcctgtccataccaatatcctgcatcagacatacagacacccgccatactgactgctgcactagcgaggatcaccttgcacagacgagttcaccctgcattcagcacatcagcattcagcaccacggccagtgcctacggcagcagaagggagcgaaacccagaaggggcagcagaaaatataatcattctctcagtagtcagccacagggctcctatttctttctcttgtttctgaagctttttccctctgggtccacgcagggctactgcatctgggtatccataaaaattgactgtgttgtactaacatattctctgattaactggtaggagaagagaagggaaagcacccctcccctccactacatatgtgcatagatccctccctctctaagaagctggctgcatttgacaaatactggaaactccttcccacctcctgccttttaatgactaagagagcaagacctgtagtcaagctgtcttctctaagctcgaccgcatggtagctgtataaccttaggcaagtcacctgcaaaatgaagataaaaatagtacctatctcatcggctttgctgttattattgtcatgatcggtgctgtcatctggccacactggtcaccttgctgttgcttgaacatactgctgcctcaaagtctttgcatttgctatttcctatgcttagaagctttctccaaaatagccatgtggcttgctccctcactttcttctaattatcagtaagactttccctgattataccctatagtacctctctctccaccactccctacctcccattcctgctttatttttttttcctaaaatgtattactttctgatrtactaaatattatttttatgtttgtgttttctctatcctcttttagaatgtaagctccatgaaggcatgaattatgttgtgctcacttgtatccctggtgccattaaacagtacctggcatgtagcaggtattcaaaaacaccaggtgaatgcagtgttattattattatcaaaatgattattctgggatgattttctctattttatacaggagcaaactgagacatttaaaaaatgtggcccacctataaaatgcaagcaagtagaagagcagaaaataatgaattgagagccaacctttcaatctactccaccagagcagcccataagctaatgaagtgttcaaaatgcagcttgagagaagttccccataccttgaagagagcccttggataaccattttcaatctcctccacccctcctcagagcccagcctgggaccctgtggagactgctgaaggttggcaaagctctaaatcttccctggtccaatgtacatcccagaaggatcctactcccatgggtctacctggcttcaggcctttgacatgggtcttggtgaaagctaggcacactcagcactgagaaggccatgccaccagtgttctaatacatcagagttcatctcagcttcttctcctcccaacagagtctcatgctcagactcatgctcttccctcagccaggaggttagcaaggtgaagggcacagggcagggatcattctgaatctcctgcaaaaagactttgcttccaaagtggccaaagtccccagtggaatctgccratgaagtccttgccttagmgtcaggattgagggaggagattagcccgatcccaggatgaagtcacatgaaaacctcctgcaccacgactgtgccaatgaagaagggccccactggggcacagaaaattccagatttgtgctggcaaagcccacctgaacagctatttttttcccaacactgaggcttgcgggtgaaataagaacactcgggacaatacaggttaaggaataaatgagagatagaaaactctggttctgctacaagaaggcctttaaaaccaagctcaattccataaaagtgagtcctgtgagaaacatgaagacagagtcacaaaccaggtcactatgcgctaatgaggaagtcaaaggagaacctccatgacccaaaagtcacaggctccacatcacacaaaagaatggcacactgcaatttgtgcagcaccaaccggagagcttgttaaaaatgcagaatccctgagctccaccccagacctgctgaatcaggatctctggggctgggcctgggaatgggcattttaacatcctgcccaaacaagttttgtgcaggatgagttttgtttgttgttgttgttgttgttgttgtttgagacagagtctcactctgtcacccaggctgaagtgcaatggcatgatctcacctcaccacaacctctgcctctcaagttcaagccattcttctgcctcagcctcctgagtagctgggattacaggcacctgctaccacacatggctaatgttttatatttttggtagagatggggtttcaccatgttggccaggctgatctcaaactcctgacctcaagtgatctgttcacttcagcctcccaaagtgctgggattacaggattgagccaccacacccagcccatgctgagttttggaagcataaatgcattgccctgtcgaggcacagcaattcaaatcactccagcaaacctttgtgagaccttccatgttttggactctctgatagtggctggacttcctggcagtttggttgggaagagggggtgacttgggtatcctcttatccatacaatggtcaaacaacaacaaaaaactttgggaaggttgggaagagcagctgaaaagcttcatggattggggcaaaagaagagaggagatgctgcgtggtgtagcagagaggcctgcagagttagaaattggcaaattatctggccttggcccttaggtcagacttggatctcatcctcagagaactagggtaccctcagcgtgggtgacaggtgggtgggagggagaggccaggtcactctgggagattggtaccaacctcgtcccacatctcaacatgtacatcgctttcaaatttatctctttcttccttcctactcagctatgtagagaatcacagatgcacagaaacttctgtgtgaaaggaacttagaggtcagccagctcaggcctcatccaatatagtcctgatgtttgtctctgttgtccttttctttcctgctagtgtgaggtctacccaggtcatccaaataagatacacacttgtttgcattacttagcagcaaaaaggtgttgagccatattctagaggcagtaaaatccacagtgaggacctgaatctatccaaggtctggcacctaaatggctgatagagctcccccacttccccaggaaggactaaaaggactgtgtggaagtacagcttcccccagagtgtcctagggacatactgtgtttctttggattattttgatgtcctttaagcatgcttttaaactttgcttcccaaaaggtactaacactacaagtgaagtcatttctgattttagctcatcacctctagccackgtcatgaacccaagaggcctaaattcaagatcctgtatagttaagaaatttcaatgaagaagcaatggcttgggattaagaaacctgctttagccattgacatactatgatctccccagcctctgtatgtgaatctggaaaatagggcgggtatggcagctccaagtttgtcggcaacagtacatgaaaccatgcrttctctaccatcagagctcccagaagagagtgcaatatgcatgccaggtggtgttattagtgacatactcaggtgctttctacagtttgtgattactactaaagggtaatagttaactgtgtcaccttctcaagacaacaccaagcagaatgtcctggcattaaaggaatgagctgctgctcccatctttatctggattttcagcatttgcattggcttgctgatgacagcagatagtgctcagagagtttgttccaagaatattaattggcttccctattcagtgatgctcacttgctcaccccactccctctcactcttgttctttctgtttctctctctttgttgagctgacacaggcaacaactcctcaaaagctgtttcctcaaagccacagcagcaacaggcaacagcagcctcaagagcctcagaagaggcagcagtgagcagcatcaagagctttccttcccttcatttcaggaggtgagaggagctatgccaaggaatgtggagggaactggctgctctagaatctcagctcttctccaggagcctggcactgggcacagagttaccatgagcacacacaccaaatagggtgacttccagctggcacagggagtcgtaccctcagcactgttgggaggagctgaggaaggatggggcagagccagcttctggctagaactgagatgcagccgtgacaggagtaggggattggaaagccataaggcagcaccatggaattggacgcaatctctagcaaggaaatccatctgtccttgagactcagggagggaggatgctttactgaaggtcgcagaaagatggaaagtaaaggccaaatgtttccaaaggactcaggctctgcttcagagagttgaaaaaagagcccataaataaggacaagatatcaaagtcaacagatttcttcagctctctaggcactgcctacctgagctgtacttctggacaaagcactcaatcaatgttacagtatattataacattatagtatataatatttggatactgcattaagatttggaaaagcctctggaaaatgctttaagtcttagtagctttatgcaagactgcagaccctgctccccactgatgcatcgcctctcagtgcaagtcccaccaccatatccctggaacacagggccccaggagaagaagctcggcccctcctccagcccaaacctggccaaggttccccgtctcccctctcccagcaggcactctgttaaaatgcctgagactctggcacccagagcaagaggcagaaagagagcagtgaaagtgtctctgataagcaagcatagcaggcagggtgaacagcaaaccccctggaaccagacagcctgggttcaagagctggccccatctcctgctagctagtgattcttggacacaagacttaacctctgttcctcaacttccccatccagaaaacagagctagtaacagcagcacctatcctctgactgtgttgaggggattcagtgacagagtagaaagagtccttagtatggtgcctgacccctagtgactattcwgtaaaaaaaagtgactaataccatgggggaaggcatggtatttctatgggacaggtggaggactgtggtcaaggcagctgctttgaactgtagaagttcaaacccactcaatacaacttggcaaggacaagcacatactatacaaattggctaatttcctgcaaagaaatatccctgtttgcagagaaaaggaattcttacacagtattggtacgtaaatttgtacaaccattatggaaaacagtatggaggttcctcaaaaagctaaaacagaactaccataagatccagcaatcccactaccaatatatatccaaaggaaagaaaatcagtagaccaaagagatatctacagccccatgtttactgccactctagtcacaatagcaaagatatggaatcagcctaagtgtccatcagcagattaatggataaagaaaatatggtatatatccacaaatagaatattattcagctatcaaaaaacaatgaaatcttgtcatttgcagcaacatggatgagcctggagtacattgttggtgaaataaaccaggcacagaaagataaatactccrtgttctcactcatgtgaaagctaaaagaaaaagttgatctcatagcagagagtagaagagagtttaccagacactgagaagggtgaggaggaggtgtggataggaagaggttggttataggttacaaaatgactgctagatgggaggaataagttctagtgttccataccactgtagagggaccatagttaacaataatttattggatagtttcaaatagaggtgaggcttttgagtgtacccaacacagagaaattatcaatgtttaagatgatggatatgctaattaccctgatttgatcattacacattatatgtatccaaatattactatgcaccccataaatatatgcaatgactatgtgtcaatttttacttcaatactttttggggtacaggtggtttttggttacatagataagttctttggtggtgatttctgagattttggtgtacccatcacccgagcagtgtacactgtacccaatatgtagtcttttatccctcgccttcctcccatccttccctgcgagtcagtaaagtccattatattattcttatgcctctgcatcctcatagcttagctcccacttataagtgagaatatatgacacttacttttccattcctgagttacttcacttagaataatggcctccaactccagccaagttggtgcaaaggtcattatttcatttcattttatggttgagtagtactctatggtgtatatataccacattttccttatccactcattggttgatctctctgatcaaccaaggagtgagataaggtctctttctgtcactcaggctggagtacaggggcgcaatcacaactcactgcagcctcgaccttctgggactcaagcaatcctcccacctcagtctcccaagtagctgggaacacaggtgcatgccactatacctagttaatttttctcattttttgtaaagatgacatctcaccacattccccaggctggaaaaatgtttttcaggctgggcacagtagctcacacctgtaatcccagcactttgggagttggagaccagcctgagcaacatggtaagaccctgtctctacaaaaaatttaaaaattagccaggagtggtggtgcatgcctgtagtccctgctactccagaggctgaggtgggaggatcacttgaacccaggaggtcaaggctacagtgagccatgattgggccactgcactccaacctgggcaacatagcaagaccctgtctctaaaaataaaaataaataaaatttaaaatgttttttaaaattgctgtggacacacaacacccactgattcggggctcccattctcttgctgacatgtcccttcttcctctggtcatccctctctctctctctyttttttttttaatttttgttgtttgtttgtttggtttttcttttgagacatggtctcaccctgttgcccaagttgtagtgaagtggtgcartctcagctcacggcaacctccccstcccgggttcaagcckcagcctcccaagtagctgagaatacgggtgcccaccactacgcctggctaatttttgtatttttttctgtagagacggcgtttcaccatgttggtcaggctgatctcgaactcctgacctgaagtgatacacccacctcggcctcccaaagtgctgggattacaggcatgagccaccgtgcccggccatctggtcatctcttctaaagtccctgactcctaggccagaggggccctctgtgttctcataaccccttggctccttcgtggaatgagacttgaggaaatgcaggcaggagaggcagggggcctgcgtctgccctcactcctccttcccccaccctgcgactcttccttccccacctcccacaggtccccgcgacagctgttggggtgagagccaagtcttctgcagcccccgcccctcccccgcaggtgcycctccttccgtcctgggatatccctcctgagcgcatcccgcacctgtatttgttaatcaagccgcggaggacacagtaattgcccagcagaaaacacgggtgcagatattagggagcgccggggcaaaggcactaaatgagattcttgttttccaaacagagccggagatttaattacagcctttccaagtgcttattaaaaacccttatttttttccttattgttttcctgcatggcgcatattgaatcagccgctgctgttgtcttgtttttggagcgttcataaaaagaaccgatgtggaaaattgcaaacacagattgtacccaaacaataccttctccctttgcttttcttcctcttctttcttcccgctgaataacaacatgggagagtgttttccgtgcacatccgagccctctcaaacagctaaagggcgtctttttggcactcagagaccatcctccaccttcctgagaaatacgaacaggccagggggagcaggaacccacgtcctgtgggaaacaggaggagataggtgctctgcagacctgcaatcatagaccatcaaggccaagagggccctccgcagagtggcctcaccaccccatcacgggtgaggaatctacttgcacaaagaggtgaaatgatggagcccagacacaaccagttccttcgcctactcgaccagagcgtcttctactgaggtggcccccttcatgcttctggcatttgcacccggaaggatctgtggactcttctcttaacccacacagttcctcctctggcaagagggttggtctctccatgccttccccttctcaatggcagcatcccatattgataatcagccatgctacctccaagtagcaaccctgctccaagaagactaggtccagggtcccagccagatgcaatatcaaccaggggctcaagtttttaactacctgcttacctctgaatgatgctgcctctcagacaaacaagactgtttcctggcctttctcagaaagtctccataagacaaagtcctaaggaggcaccttagggactccttaggggaaagagactggacccctttgggtgtcctcaggtccccaccagagcctcctcrccacgcgccatcctcactgccctcccatgcttgcccagtttggatctagaatccacgctctagaggagaggcagctcctctccccatgccatctttcctccctgctgctcaattggcaggaatggtgggrgggcaccaattactkccawtttggaggagtgatgccagcatggggaawgtgtcttactgaataatggttaaaattgtattcttccttcctgtcccccactcctcataccccacaccagcacccagtctcccagcttccattctgctcattagctcaagttgcccttgttgggaaggaagggcagagcaggggtgatggagctggcaccctctattccagctccctgatagaaaccctgctgaacccacagcctgccaccctcttcttgagttcctccctggtgaggaagggtacctgtacttagattatgaagccaagaccttggccatgtgattccagagaagaacttttggtttcctcctaaacttcatttttctctgtccttccaattctatttttcaagtttatacaaagttgagagttgaggtgggaggaactttccaaagagaaggcaattggcagattccttcatggctctcccacccccacacagagtggatgtctaaagtagacctcaaggagcctcaaaaccccactgctccagcatgcaggcaacctcaccccttgggctgtgarccacacacaggaggctgggtgaagtgtggcaagaccaatgaaaacctgaaaaagctgatatttctgctgaaactccccaagtctactctctccagcaaaatcatggaactccagagcaaaaaaactacgtcaaatgccgaggttgattctcaatttcaatttcacccttccgtctccagagctggcaaagctaaaaatgacacttcccagagcttctcatagctcaacttaggttctgctcattagctgcatttgtgccagatttggggactgggacccaaaggacgccatcatctctctgcagaggtgcagtcggacaatcaatgttggtggtggctggattccggggcccatggtcttgtcaccagcttcaagggtgtgatgatgacagtggaggctaccaccatggcagcagttttctgactttgtggccttcaacttccttctgctggctctcccagtgaattttgtaaagatttcattctctgtataaaattccattctgttcaaaacaccttgagatatttctgttttcctgttttaaatcttgactgatacagtgtctctgtaaccatttggcagatgaagttcaaagaaatgaaggtcccacagcaacttagaaggcagacctgggaccagattcgactttcctcactctagcccagagttcattccacagaagagtgaagaacagagtagctgtccttttaaaactccctttcctttctcccagaagtctgcctccccacccctggctcagcaaatgtgtgtgcatgtgaatgtgtgtgtaaacacacacaggcatagccatacatgtgtcctggcacagactaatgcagtgtatcccaacattgaggtgttctgtcactggtaccaccaaaagtccaagtggctcagatgtgaccttggtgttgtggctctattaaacttcttttggggaacaagcttttatttcatggacgattcagaatctccgttcagaggaaattgatgttttgccaggcattttcccacttgggagatggccagaactcacagtaagagcagacaaatacgatgtaagtcagcagcttcaaacaacaaataaaaaagctgagcctgagaaaggtctctgaaggtgatgctgctaaaaactgtgtctcctggagaagctgttaataacctatcacgtgggtccccagggagtgatccaccagccgaagtaaacttacagaaagtaagtttctgtcaacttacagaaagtgcttcactttcactggatcctgggagttctagacttgggcttcccagctgaactctgcttgagcctgatgaagttatgtctaggcctttgagttggacagagcttctttgtgaagggaaaattcagtccacctttatggagggggcagtggtcattggctcagcaaacagtgagggctatatgaaggaagagggggaaatggaagaaaagtccactggaaagcagagtaattgaccttcagagagtctgttattattcccccttgctcccgttctttcctgaatctaaaatgtgttgcattaaaagaatcggcctggcctgcttttagaagattcccccactctaccagcctctggagtagggcagaccatctctcagccatttcttccatctaagccctccactgtcctctcttcacaccccacacttggtgagccccagagtcatttgtcccctaagccaacttatctagcaggcctatttatgagacagttttcatcagacccacacaagatgaaaaataaaaacaaggataattcaggtgtgtgtgtgtgtgtttgtgtgtgtgtgtgtgtgtgtgcgcgcgcgcgcgcgcgcgtgcgtgcaaggtagccaaccttcctttcttgggaaaattgtcctttattccaagaatattccactcctaggaatagtcctttttcatgttaaaatatcccttctttcacgaattggtaatagtagtaacagtgggttttgctgttgttgctgctactgttctttctgttcttttaaggtggggagcaggttgtttcttttctaacattcttgcttgacaaaaggtatcagctccctcctgttagtcacggtttgtttgatttttttactggtcagtgccatgtaaagacctatagtaacccccacctgtccccctcgcctttgcaagacccatgcaaaggccccaggcaggttcctccttcttctccccttccctcaaattactttttcacaatacagcagatgaaccagaacttggaggctaggggctccaggctggcaaccaacccttcctaagataattgtggggacctgacatcccgttatgctcaggggagctgctttgatgtcagcccattgaaaatcacatcagtctctgacccagggaagcttcaaattgtttttaaaaggctactggtaagtatatgaaatatggcgttccatctcaaaaccaagcctgtcctctcttaaaaaggctctcagctccaaatgaggcaagcgccagcccagcagatacaacacacgcttaggactagcttcctctttgcctctgcccaagcctcccactgcctgcaagtttacctcggaagcttccttctgcctccagctttatcctgcttgtgattcaaatgcaaaatcagccaaagagaggaccactgtgacagctgctcccttcctgggaccaccactgccccaaatcggtgctcactgccgcccagttcatgtgcaggctgcagcctcaaaccctgcaggcctcctccccaacaggactttacccatcacccaggcacctcagggctacaggaatagggtctccatatagaggagtccctgtcgtctcaatgagtttttcctaccttcatcttgtgcccaaccatgccagcaagctgcagggtcccccactatatacttttgtgattccctaggaggtgaattcggctgctagatcttctggccccagtttcttttaatctcacatacatattaactcatttaatgtgtactattattattgacattttatagataggaaaataaggtacggaaaggtcaggccgcacaactagtagctcgaggagctgggatttgaacccagcaatctggcttgagagtccacgcccttaacctcatagtgtcacccctgtgcctggcacacaagggtatcctgagacccagaggtttggacagaggtaggatccagggagaacagagatcaagaacttatctcctgccaggccccatataagtcctgccaagagacctcttagagtctcaggaatgtggaaacagctctgaagctctatgaaagctgcttgcctgacccaggaagctgtgctaagcccctattcattcaacaccctcttgtagtcagtaagagcttcagaaggacactaggaaaacctctagaggcagtttaaggcaagaccctgacaccttcctcaccgtcaaggccaccttcccagacccacctcctgccttaactcactctccagggcacccctagatgtctctgaggcccacagagtttaggggtccacatgacaagcagtggcccatagcaagcccctgtgcaaattacaaaaagaagccttttgagagtggacaaacccctgtggaagcaccatgcggtaagcagaatgaaatctgcattcgagcccccactaaccccccaaataggtgccttcatgcagtaaacaactgtgtactgctttgggggaagaacactccaggtggagggaacagcaagagcaaaatcccggaggtgggaaagtgcttggcacctccaaggaacagcaagaggccctggtggctggagcagagggagctgggagagcagtgagaggtgctggggctgagtcatrctgggctttgaaaaccatcacgaaggcttcggctgttccctgagtgagatgggcccattggaagctactgggcagagaaataatgtcatctgagttacatatttttaaaggtcactcaggctactgtgttgaaaattgacatgggaggaagacaggaaagctgggaagcttgtgcagtgtctggccatgaaatgggcatggcccaggccaggcaagtggaaaagatgggaaagtggttggaatctgaacctggatgatgggatgtggaggatgagaaaaggagttgaggaagaatcgaagattttggggtctttgcaataaaaagatggagttgccatttattgaaatcaggaaattgcaggaggagctggtttggaatggaagattaggaatttgagtttggacgtgttaactttggggtccccttagatacctaaatggaggtgtcaaatagtcagttggataaaattgacaactgataaaatatggaagtggtcagcgtagagatgatacttaaagccatgacactagacgaagtcaccaagggagtaagcacagggagagatgagaacaggaactgagccttcaatggctagaagttgggaagaggaggaggaactaacaagagtctgaaaaggaaaggccaggcgtggtggctcatacctataatcccagcactttggggtgccaaggtgggaggatcacttgaggccagaagtttgagatcagcctgggcaacatagtgagaccccatctctacaaaaatgtttgaggctgcagtgggctatgattgcaccatctgctccaggctgggtgacaaagtaagaccctatctccaaaaaaaaaaaaaacaagagtctgaaaagaagccaccagcaaggcaggaggtgtcccgaagccaagtaaagtgttttgaggaggagaagtcagcagtgcccaatgctgctgacaggtcaagatgaagatgaggaagaacacctgccattggacttagctaatttcctgccacttattctctgaatagccttggatgaattcatgtaactctgtaggcaccattttctccatggtgataacatagtacctgccttgttggatggttgtgatgagctgctatattgaaaatagaaaataaagtacctgtcaccatgcccagcccatggcaaacactcaacaaatggtggctatgagtagaattagatattccactcactgttctgctcttctattcttaagatatcgaaagaaagaaagaaatgaagaggaaggcagattatctgtggaaagagcttcagagatcttttctagcttctttttctcaggctttgaaacatcggtctaatgctttcacaccaggatgtcaccaaagtcctacaaggtgtccgatgattaatagggagacaagcagggtataatgcaacagggagaattccaacagtgtccgagaatctcaccaccacagaaggcaccactggagcagagcagtcatgaataagaatcaaggtggatatggagggagggggcggggaagaggctgccctggactctatcctggaagtttactactgaagctcccgatgatatatgaagccctcacaaacacttatacaccattggtgcgaatgtaaattagttcagcccctgtggaaagcagtttggagatttctcaaaaaaaattaaaaatagctaccattcaagctagcaatcccattaccgggtatctacccaaaggaaaataaattgttctaccaaaaagacctgcactctatgttcattgcagcactactcataatagcaaaggcatggaatcaacctaggtgcccatcaacagaagactggataaagcaaatgtggtacatatatgccatggagtacaactcagccataaaagataatgaaatcatatgttttgcaaccattgcaacatggatatagctggaggccattatcctaagccaattaacatagaaatggaaaacaatacctcacatgttcccacttataagtgggagctaaacattggctacacatgaacataaagatgggaacaaaagacatcaagggctccaaaagcagggaggaagggaggggagccagggctgtcaagaagcctcctactgtgtattatgcttactatttaggcgatggaatcaacagaagcccaaacctcagcagcatgcaacatacccttgtaacaaacctgcacatgcaccccctgaatctaaaatttaaatttaaaaaaaagaagccctcacagagctgagagccccatgagttaccatgacattctcaagggcagcactgaggtatccctcataagccccccagcccctcccagaaaactccctcctgggtgacaaagcccatctgcctgggatctgcctgctgcccacccctccatgactgcagcacctccctgccctttggatctcagatggcaaggccaccatatacatcccccacgggccataagacttccagttaccttagtcaccatgaccctcctactggctcccaccaggtcagaactcagacctgcctcctcccagggctgcctg

SEQ ID NO: 93326 - DNA, 36774 bp, Homo sapiens
attgtggctgtgtaggtgaaaccagaatcttttttttttttaatctgtaaataggtgtactttttccaatgctgctccaagttacttaataggatttctttgtattacgtttttttcaaaaaatatagtgcataataagactataaacatgccattctctttcagctgtaatgttcttaaaattattcttgaatgtactgtgatgtcaataaagctctttagttcatttttgttaaactcttgcaccttaattttatggttttaatctaaggaacgtacttttataaaaaggcagctggaattttgtataacaggttttaaaggtaccttctctcacctcccccaaagaaaatggtttttacttaatagtttgtcaaagtttgtaaattgtacccatggacttttgccagattccaactttaagggtatgaaagagggctagaaatagacctttacttttcatttggaagtatttgacaactttctaaacttttcttcctattttggggattttcaagtaatatattctctgtgtgtataacgtgtggttcactcctgtaaaatgaaattgctggaatcaatcaagccagtgcaccagtagagttatttgtaaggaacgattgtgtttgacagtaatagtcaagtctggaactatattctacagtcacccacttctgttttagaagcattttgaaacactttttggggttatagaaataagactcatgattcaatatatttatttatatttttaaagtataatatgacctcaaatcaatggaggaatgctgtattatgcaggtttgtgtcaatttcmtgacattaaaattgtctgattttgtccgtttcttaaaattatgattagtgagtggtctaacagtttaaggcattgataacttacaagtagaatggggctctcaaagcattttaactcagttgctttagggtccatttttttatgtaatcacttactcagtgataaatgaatctctgaaaacaaatgcttttacattttaatttaaaaagaaaacaggtgcaggccacagaaaagttttaaagtatgccttcttaccagcaatagttcattttaaaaatcatgccagatttttgccaagatcagtgtttcctcaacatgaagatagaaatagatttgtatagtgtgctcttgtacctctacatagattattatataattttgagcagttacacatttatctaaaggaaataaatcaactgtgaataaatgcatgtttaccaaaatggctgtttacagtgcatttagttctgatatttataaagatgacatttcacagaataactttaaaatagtttgaaattctatatagtttagacatcgatcacatctggagacaaaataaaatgtgcaatattttttatgtaggcgagctaacacagtgtacctaattgcagaattatctgattaatttgtaatagataagttgtataacattttcatatcttaaaatgttttttagatcaatcttgaagtgaaatattttcaaaataaaattctacagaaaaattctgttggctatgatatgcacatttttgggcaagttatgaactagagccaaaagtagtatttgacagttttatttactctgccgtaatttgcaagcttatcagttaagtctgtagtttttttaaaagccgtcatgatatttgtgattattagtacataaaccagtgttataatttgatatttgggtttttcagacttttagtggcagatttagagaattctttattttcttgacatgtgatatagtatttatttaccttgagtggtaaggttttataaggtagggtttccatgatttaggatgtgaatgcaaaaacttacacataagttaattagatgtataatttggttatgaaatcttttctaaaataataccaccagaaaattaacagatcaaatttttgagacaatccttggtctggattggttaatgaaaatgtcttgtttaagaggttctattaaaaaatatttctagtgtattagtcataattgtttttgtggagtgggggtaaaccacaccattaagggaataaaatgtaatttgaaagaggtgattataagatttgtttcaggccccaaaatataaataaaaattggtgtggaatctcgttagtgtatatgttttctgccactataaaattacctttttagcatctgtttctagtggtgtaataccaagtaggtaaatttcgcagtctatttttaagtgtcctgagttttttgtttccttaaacacatgaaaggtaatagtaaagaattttttactgtatttgggaatttttacataggagttgtattaggtttccagtctctgtagtgttgccttacagaaatctttacatctaaactgagtttttcttctcctacataaatttaaatgtattttgatttactgaagtttctaaaatgtactgagtacagacatacaccacataacgacgtttcagtcaatgacgggccacatgtacaacagtggtcccataagattataatgtatttttactgtaccttttctgtgtttaaatacacaaaaccatgatattacagttgcctacagttttcaatatagtatttgtagcctaggagcaaaaggctataccatgtagcctgggtgtgtagtagtctataccatctaggtttatgtaagtatactctgtgatgttcacatcacaatgaaatcacctaatgacacatttctcacatgtccccaagttaagcaactgcatagttgctgtttcttgctttttgagatggagtctttctctgttgcccagcctggagtgtagtggcacagtctcagctcactgcaaactctgcctcctgggttcaagtgattctcttgcctcagcctcctgagtagctgggattacagcacccaccaccacatctggctaatttttgtgtttttagtagaaacggtttcaccatgttggccagctggtctcgaactcctgacctcaggcgatccacccgccttggccccccaaagtactgggattacaggcgtgagccaccgctcccagccgattgcataaatggaagtagtagtagagtcattggattgagctggctctgtttcttgatgtgttttaggtaaatcactaaatcaccatgggccttaacttcttcagctgtgtaagggaggaattagatgaattttttttttttttttttttgagatggagtctcgctctgtcaccaggctggagtgcagtggtatgatcttggctctgcaacctccgcctcccaggttcagacaactctcctgcctcagccacccaagtagctgggactacaggtgtgcgccaacatgcccagctaattttcgtatttttaatagagacagggtttcatgttggccaggatggtcttgacctcgtgatccgcctgcctcggcctcccaacatgctgggattgcaagtgtatgccaccgcacctggccaaattagattagttctaaacacatctagctgttaagtttttcagttttaagtggaattttgttgtgtaaaatttaaaagagaaaatgggctttagctcttcaaaaagcacacatgggttatatttatatcataaaggtttatcagatacctatagagttcctttaaagataccttggttaaatctgccacattctgattttggtagaagttatgatagaattattctgagttaccaatttatgtaaaatttttaagtaaatgtgaaaacttaccagttaaactgagtggatgtagtggtatatctcttttttttttttttttttgagacacagtcttgctctgttgcccaggctagagtgcaatggcgtgatctcagcttactgcaacctccacctctcttgttcaagcgattctcctgcctcaacctcccaagtagctgggattacaggattccatcaccactctcagctagtttttgtactttttgtagtagagatggggtttcaccatgttggccaggctggtcttgaactcctgacctcaggtgatccgcccacctcagcctcccaaggtgctgggattacaggtgtcagcctccacgcccagctgtatatcatttcaaagctacaagggagcactttacccttggatgaaaaaaaaaatgtttataaagttgaattacaaaacagacattaagagttttagagcaaaataaatacgcagacttacgggtgagaccataacaataatagtctggggaaatatctccaacaatggccatatactgcattacagccattacaactttccaataccacttaggcttaagggtcattgggaaagccctttgttgatgtttgtagcgagaaatactatgagctagttttgcttatttgggccagacctgttctgggtgttcaaaagacatacttgtcagcataaagcaaatcattgattccccttcttgttaaaatgtagtggaaaggctctgaagcccagtgaagtgtggtaccttcaaagaaagtacatataaagctcctagaactttatttaattgtgcttgcactttgctttttccttggatgtgtcactccaataaatacaacacgtgctacattttcttttgtgcagagctttctgccttcatgtggagagaggatcatgtatctaagggtagaggagctctgaagaggacatagcaactgaaaagtgcgaccacccttaggaggaggtcaatattttagctaagaaccatgaatgaaagactattgctgtctgggtgaggtggctcccacctgtaatcccagcactttgggaggctgaggcaggcagatcacctgaggtcaggagcttgagaccagcctggccaacatggtgaaaccctgactgaaaatacaaaaattaagccgggaatggcagcatacacctgtaatcccagctacttacgaggctgaggcacgaagaatcacccgagcctgggggacggaggttgcaatgagctgagatcctaccactgcactccagcctgagcaaccgagtgaggctgtctcaaaaaaaaaagaaaaaaaaagattcctgagcggtaaatttcgctaactgaaagaaccctttaccaatttgaccctacctgttgaaaatacagaataattttttgtcttcaatgttggagattcgtcattgttcttacccaaagaaagactttgtgcatttagacgtaaaatgttactgatcactgttcctagctctaaatgaagtttgcctagactgagccacagaagcctcctactacatgatgtatataccctgtacaagataatagtcatttgcagaaaataagttttacatttggccttctggccatctgatatttgagtgccttgaaaggggaaacaattcttcccttgaggaagaagtgctcccatactcttgcattcttagcagtagggtcaatgtcttacaggaatataaaagtccttgaagagacatctgttaagtgtgaaatagagctacatggcaataaaagaagacacagcacgaagtaatggcctgattgaggtcaacttcgaacatgaggtttgaggtgtcctatagcaataaagtatcttcaaagttgtttatgatagtaaaaacatcttgcagkttaattccatgtgcaatttgctaaatgagcgtgaaagtatagccatacatacataacactcaacaatacaatcatgaaagtcggctgcaggccgggcgcggtggctcacgcctgtaatcccagcactttgggaggccaaggcgggcggataacctgaggtcaggagttcgagaccagccaacatggagaatcgcttgaacccgggcggcggagattgcagtgatcccagaatccgagatggggactgtactccagcctgggcaacagaacagactctgctaaaaaaaaaaaaaaaaaaaaaagtcggctgcagacggcgaaagtgatctcggaacctttatgttggggatcttttttcgggagggaccggaaaagaggtgggatcgtttgtcgcgatgtggagtggccgtaagctgggctcctccgggggttggtttttaagagtgctggggcctggaggctgtaatacaaaagctgcgcgtcccttaatttcctcggcgggtgagtgtgtgtgcggaggtccttcgcatgcagtcaattgcgmgcgctggcgtctctgcgcatgcgccgggggtggggcggtgggttgtctctggacctcgcgaggggtcagcgcgaaacctaaggcttggtcctggccccatctctctccattgtaaacctcgcatagtcccgttggcggacgccggggaaaagagctcaggaccagtggtcctgtctggaaaagcgcaggccgcgggtctcttgtggctgagctccttgccccaggagccggcgacccgctctgcgtgtgctgcagtctgaaggtcatgcatctttcctttgccggggcaggaataactcacgcctcgtagttatgcatagctttgtatctgtgttttgtttgcacaaagcttgctgtttttttcagaaagaatttaaggcagctgtattactttttgattaataggttaatccaacagactgcatttgcaaatgagatcaagaaaataatgcactgctcagtgcttgtagacagcagtctgattttcgaactctcagtattaagtagaaacttaagctcatctttcacatggaactcttaacaaatactgtatgccagacactggtatgagcactgggaatttaaaaatgaatgacaccgcaaggatctctttaaaaatgttaggataaacctaagatcaggatataatgaacaaaaaaatggggaatctaaccgcccattaataaaggttattagttggtactatcatacagtgaaaaatagtacagccaataaaaatgatttaaatctatttgtacccacatggaaaagtagtaagatatagtgttaagaaagtaaagtttcattgtttcctggaaggagccaaaaaaaaaaaaaagttacaaatcagtatgtatagtgaacttggagttacaggtggagatatatagagaaattttgcagtgattgcctgtggtagagtaggtgattttctatcattttatcctttatatacttttctttttctgaactttttttagtaaacatgtgtcttttataatcaaaaatttagaaaagatataataaacctagttccaatttttgaggggtgaacatagaaggagcatttaatccatatttgggatcaaggaaacttcttgaatgggatatttagagaaatcttgaaggaggtggccagttttagaagcagttggtcgagacaggcagctcacttgaggtcaagtgttcgagaccagcctggccaacatggtgaaaccctatctactaaaaatacaaaattagctgggcgtggcggcaggcgcctgtaatcccagctactcgggaggctgaggcaggagaatcgcttgaacctgggaggcagaggttgcagtaagccaagatcacaccattgcactccagcctgagcaacagagtgagactctgtctcaaaaaaaaaaaaaaagcagttggagaggggaaaggaccagctcgagaatctgtgagaaagtttgtgagaaactgcaaggttccttgaaaagtaaagtgtgtaggtggagggcagaaggtaaaggcagggggtggcaagggatgaggaagaggcctttttggccatgacacattcatgaaaggccatttacacctcctgaggtagactatcccgcggacagtggaaatcactgaagaagcaacatgaacagatttatgtttaagaaataacacttggcagctgtctacatagaatgtgggatggagtcaggcaagtctaggcccaggaagaccttagagcaatccagacagtaaattatcattgctggaaataaagtattggtagggtaaaagtctgtcacctgttttattcaccatcagcatggtgcctggtaggtgctgaataaatgacttttcaataaataaaatgaaaaaaaccttttcccattcctttaaaatttcaaataccaggatgatcacagattcaaggtagagaaggaattggtagcattctgtttaaatacaaactcaattactctctttccgttgtggtaaggtggtagagtggtttttatttttactttttagattaattaatttttttttttgagaaaaggtcttgctctgtatcccaggttagagtgcagtggcatgaccacagttcacggcagccttggcctccctggctcaattggtcctcccacctcagcctcccaagtagctgggactacaggcaggcaccacaatgcatggctaatttttatatttttagtagagaaggggtttcaccacattgtccaggctggtcttgaactcctgggctcaagcgggycgcccaccttgstctcccaaagtgatgggattacaggcattgagccactkcgtctggcctaagatgatttttaaacctcttgagaattgtagcaatactgatgacttagggattcattttccagaaatagaggaggtaagagagagatcaagggttgtctgtccgtaaaaggcagatattgttaaaatttctaaggcttagtttcataatagtaataccttatatgtcgttatcgatgtatcatggtttacatagttaaactttattctttaataatatctcatgtatctacctaaagtcatacaggaggtgatatttgaactgggtcttaaaaggtagtccagatagagttggtggaaagggaaataaaatgaacaaaagcctggccgagcacctttaatcccggcactttgggaggtcgaggcaggtggatcgcttgagctcaggagtttgaaaccagcctgggcaacatagcaaaaccctgtctctacaaaaaaaaaaatacaaaatttagccaggcatggtggtgtgcttctgtggacctcgctactggataggctaaggtaggaggattacttgagcccaggaggtagaggctacagtgagccgtgaacccaccactgcactccagcctgggcaacacaacgagaccctgtctcataaataaataaataaataaataaataaataaataaataaaatgagcaaaagcctagacacatgaactttattaaaaaagaacattgtaatgggtttgggatggactgtgaagggctgattaaaaaataaaaccaaataaacataagctcaggagaaaagtatgcagagactacaaaaagacaagatgtgaaatataaatgaccactaaacataagaaaggatgcttaacctcattcatgataaattgaaactacattaactgggcacggggcccatgtttatagtgccagctactcgaggggctgaggtgggaggatcgcttgggtgaccttggtggaggttgtagtgagtggagattgttccactgcagtccagcccgggtgacacagtgagaccctgtctcaaaaacaaaaacaaacaattaaaactacactaagataccattttcatgtatttgattagcaaacataaaaatgtttaacaaagactgggcgcgtggctcacgcctgtagtcccagcactttgggaggccgaggcgggtggatcatgaggtcaggagatcaagaccatcctggctaacacggtgaaacccgtctctactaaaaatccaaaaaattagccaggcgtggtggcgggcacctgtagtcccagctacttgggaggctgaggcaggagaatggcgtgaacccgggaggcagaacttgtagtgagctgagatctcgccactgcactccagcctgggcgacagagsaagactccgtctcaaaaaaaaaaaaaaaagtttaacattgtatgggtgacagtgtgggaaaaccaacaagagacactctcatagattaccgataggatagtaaattggttcaacatctatttagtggcaattacagatttacaaatgcacgtaccctttgacatcattcttgagattttacctacagggactctgaaacacatatgaaatgaaataacctatgtaatttaatctctagttgttgtcgttttgagacggagtctcactctttcgcccaggctggagtgcggtggcgtgatcttgcccactgcaatctccacctcccgggttcaagtgattcttgtgccccagcctcccaagtaactgggactacaggcgcaccccaccacgcctggctaatttttgtatttttagtagagacgggctaatgccatgttggccagcctggtctcaaactcctgacctcaagtgatccgcccacctcagcctcccaaaccgctgggattataggcatgagccaccacacccggccctaatctcatagttttgataattacccaaatgctcattattagggaactgcttaaataaataatatagccatacaatgaattatcacacagccttttaaaaaatatgaaataatttccaagatatgttggtaggtgaagagaaacattcagaatgagtgtattgtgctacattttatataaaatgagagaaactgatactttaaaatgattgcatatgtataaaatgcctctggaatcttacatacaaatctagtaggattggttgtttatagggagagaaactagatagctacagtcagggctgggagagatactttgtactgtacccttttgtactttttgattttttaaattttttattttgaaataatttaagacacaagaagtggcaaaaatagcacagagaggctgggtgcggtggctcacgtctgtattcccaacactttgggaggctgaggcgggcagatcacttgaggtcaggagtttgagatcaggcgggtcaacatggcgaaagcctgtctctactaaaaatacaaaaagttagccgggcatggtggcgtgtgcacctgtagtcccagttacttgggaggctgagctggataatcacttgaaactgggaggcggagattgcagtgagctgagatcatgcctctgcagtccaatttgggcgacagagtgagagaccctattccccccaaaaacaaaacaaaacaaaaaccccaaacacacagagagaatttccatgtactatttacccagttccttggtgataccatccatagtacattgttgaagccaggaaatcaactttagtatgataattgactccactacagaccttatttggtttttgccaactgtacatgcactcattgtgggagagagtgaggatgtgggtggtgtgtgtgtgtgtgtgtgtgtgtgtgtgtgtgtgcgtgtatacattagtgttttatttatttacttatttagtttttgagatggagtttcgctcttgtcacccatactggagtgtaatggtgcgatcttggctcactgcaacctctgcctcctgggttcaaacaattctcctgcctcagcctcctgagtagctcgtattacaggttcccaccaccacacctggctaatttttttatttttagtagagacggagtttcaccatgttggccagactagtctcaacctcctgacttcaagtgatccacctgcctcaatctcccaaagtgctgggattacaggcataagccaccgcgccaggcctattttgcctttccatataaattttaaaatcagcatgtctgtgtctatcaaaaaaaaaaaaggctattgagattttgataggaattgtattaaatgtgtaggacaatttggggagaactgatctttttactatgttgaattttccaatatgtctcacgtttattctttgatttctttcatcagtgttgtgtaattttaagcatatagattctgtacatgtttttgtttgatttatgcaacaatgaatttttttgaaatgatttaaaatgataaagtattttacattttgaattttgccttccacttgttcattgttaatatatagaaacaagactgacttttttgtgttgcctttgtaatctttgagctttctttttttattttattttattttatttttttggagatggagtttcgcttttgttgcccaggctggagtgcaatggtgcgacctctgctcaccgcaacctccgcctcctgggttcaagcaattctcctgcctcagcctcccragtagctgggattacaggcatgtgccactatgcccggctaattttgtatttttagtagagacagggtttctccatgttggtcaggctggtctcgaactcccaacctcgggtgatccacccrcctcggcctcccaaagtgctgggattacaggtgtgagccactgtgcggcctgtaatctttgacctttctgaattcacttattatttccaggagctttttaaagatttcttggtattttctacatagacaatagggacagtttaatttctttcttaacattctatatatcttttatttccttttcttgcctcattgcactgaataagactttcagtacaatgttgaataacagtagtgagaatggatgtgtttaccttgtttctgattttagggggaaagggcttagtctttcatcataaagtactatgtgagctataggtttttatagctgttttgtaagataatttccctttcattcttagtttgccaaaagtttttaatcataatggatatggattttgttaaatgctttgtctgtatcaatcaacatgattatgtttggtatttgttttgttttggtttttggttttcatttgtttgttttttgagacagtgttgctctgtaccctaggctggagtgcagcggtgcaatcatggctcactgcagcctctacctctcaggctcaaacagtcttcccatctcaatccccttagtagcaaggaccatgggtgcacaccactatacctggctaattttttaagtttttctgtagagatagggtctcaccatgttgcccagacttgtctcraactcctgggctcaaacaatcttgactcttcagcctcccaaagtgctggaactacaggtgtgagccaccctgcctggtgtatttctcttttttattgttaatatggtcgattatrttaactgctttttaacattgaactagtgttgcatacctggaataaatctcacttggttgtgctgtattcttctatttrtatgttgctgaattatattgtggtaatatttgctaagaatttttgtgtctgttcctgagaggaattggtctgtagtctttgctgtactctttgatttttgtatcagagtaatgttggcttcataaaatggcctgggaagtattccttacccttctatttttttaagagattaagtagaattggttgttatctctttaagtgtttggtagaattcaccagcgaagccatccgagactggagatttgtttttcaggcttctaactatgaatccaatttctttagtagttatcagttattcaggctctctatatgaattttggtagtttgtggtttttatggaattagtccattttgtctaaattgtagaatttctgagtgtagagttatgtgtagtattcccttatcaaccttttaatgtctatcagagctatagtgatatcctttctttatttcttgatattggtgatttacatcttttctttgtcagccttgctagaggcttatcaattttattgatttttgcggtgaattaacttcaggtttgatgtattttctccggctttgttttgtttacaatgtcattgattttcatttttatttatttatttgtttattcattttttgagacagagtctcactctgtcacccaggctggagtgcagaggagccatctcggctcactgcaacctctgcctcccaggttcaagcaattcttgtgcctcagcctccagagttactggaattacaggcatgtgccaccatgcctggctaatttttgtatttttagcagagataggcttctatcatgttgaccagcctggtctcgaactcctgacctcaagtgatccacttgccttggcctcccgaagctctgggtttacagatgtgagccccctcacccggctgatttctattttttatcattttctgatttctgcttgcttgcttgctttgtgtttattttgctcacctttttctagttcttgaggtcgaaacttagattgttgattcgaggcctttcttccttttcttttttcttttcttttcttttttcttttctttttttttttttttttgagacagagtcttcctccattacccaggtgggagtgcagtggcgcaatcttggctcactgcaacctccatctcccaggttcaagcgattcttctgcctcagcctcccgggtagctgggactacaggtgtgtaccaccatccccagctaatttttgtatttttagtagagacagggttttaccatgttggccaggctggtcttgaactcctgacctcatgtgatctgcctgcctcggcctcccaaagtgcccaaagtgctgggattacaggtgtgagccaccattcctggccctttcttccttttcaatatgattattttagtgatataaattgacctctcagtgctcctttagctatatctgctgatttttatatgtagtacatttattttcatttacttcaatttttaaaatatccctgagacttgtctttgacttatggattgtttagaagtgtgttgtttaatttccaagtgttttgctttttaccgttatttttctattatttatttgatcttattacattcaaaactatagtttgtgtgatttcacttaaagttatgaagatttgttttgtgtcccaggatatggtctatctttatgaatgttccatgcatgcttgaaagaatgtatattttgttgtttgggggaagtgtttcacacattttaagtagattttattgaataatggtcttgttctgttcttctttatcyctgctggttttctatccagtggttctatcaattactgagagaagagtgttgaagtctccaacttacaattgtggatttgtttatttctcatttcatttctgtgagtctttatgtgttttgaaattctgttgttggtatgtacacatgttttttgaggcacagtcttgctctgtcgcccaggctggagtacagtggcttgatctcagctcactgcagcctctgcctcccgggttccagtgattctcctgcctcagcctcctgggtagctgggattacaggcacatgccaccatgcctggctaatttttgtatttttagtggagacagtgtttcaccatgttcaccaggctggtcttgaactcatgacctcaggtgatctgcttgcttcagcctccgaaagtgctgggattacaagcgtgagccactgcgccttgctggtgcatacacatttagtattgctttttcttcttggtggattatcccttttattgtgatgtaatgcccctctttgtttctggtactttctttgctctaaagtctactttgtctgaatgtttattgaacaactgagtgttctgcaacacagctgctggctcataaagcaggcccctgtgtaagttgagcatatagactgggtgaatgtttattttaggttttatatatacacatacattttttttcctctgtaaagggtattgagcatatgcaaaaattcatttcatgtagctaatatggaattgacagaatttgaamtagttttgacaaataatttcagaattaatattatcctagtttaaaacataacactttatatttgaatatcattcctgtcattttatgtacataatgtagatgtaaaaactaatggcatgaaaaactttataaacagatgcattacttgttttggctaattacaattttagaaatgtctgggttagagttagataccagaatgtaagacctttattttattttattttttaggtaaaatcttaaattaagtaaaaaacaaacaaaaaccctttgtttatcaattgtaatgtaacagtattaccatataaaataaaattttgtccaggcccagtaaatcccagcactttggaaggttgagacaggagtatcccttgagcccaggagtttcagacccagcctgagcaacatagagagaccccatctcaacaacaataacaacaaaaatgagctgggcctggtggcctgcgcttgtagtccccgctacttgggaagctgaggcgggaggattgcttgagcccaggaggtggaggctacagtgagccatgattgtgccattacactccaacctgggtggcagagcaagactataaaataaataataaaataaaatagaatcttcaattacatgcatatcagggattcttactgtgcaaagcttttctctagatatttaattttttttttcagtttatgtgaagaaccagctcagtgggactctacagattaaaccaggggttttcaatgaatacagaaccatatggttcaaatcctacaggacgatcttttcctgtttgaacagaataaagagtttcaggtgggtttattattactgtggcaaatattcaygtaattatatgtaataggtttttagtattatctttaataaacccagtcagtatgtaatagtccatgtgtcttgattaaagtagcttgtgtttatttaagtagtctcaactaatttattttctaacaatttttaaatttggggagtttcaaacccacagaaacggtaatagaataatacagtatatagacaataaacaaccttcattcagattcagagatagcttttgttttcaatataaggctattacttagagaagaatttttatttcctcataatgtccttatgacaagacacaaacaatgcagtgcttaaaatcataaatattacttataatacctaatacaatattttaaaatttttagaaatcataagtgatttgggtgctgcataaatatgataaggtggctaaggtagcaaaattgawtgaaggtaatatctttctgtatttgtattttataagccaacttttaaccttgtgaaaatattgcacagcattaatacttgaactctgttttttgttgttgttgttttgaggtggagtttcacttctgttgcccaggctggagtacaatggtgcgatcttggctcactgcaacctccacctcccgggttcaagcgattctcctgcctgagcctcctgagtcattgggattacaggtgcccgccaccacagccagctaatttttttttctttttttctttttttttttgtgacaagagtttcactcttgttgcccaggctggagtgcaaaggcacgatctcggctcactgcaacttccgccttccaggttcaagcacttctcctgcctcagtctcctgagtagctgggattacaggcatgcaccaccacacccggctaattttgtatttttagtagagaaggggtttcaccatgttggctaggctggtcttgaactcctgatctcaggtgatccacccacctcagcctcccaaagtgytgggattacaggcatgagccacygcgcccagccttgaactctgttttctaagtgcttgttcctccttgtaaatgagcccctttgagtttgggtttatatgaaatcattcttagtcaaatgagcaaccacctactgttacctattgtaaattagtccttgattactgaggctttgcattaagcatggacaagggggctaatattcctaagataatattaatattaaagaggaatgacacttgaatcttaaaagaataaaaagtaatgaatatagaatatgctctctttatgtggctaaaaacaaacttaataaaaatgtgaatggcattaccttttctaagttaacatccttactatgttttacctgagcagccctttgaaggatttttctatactatatgcttctacatggaagtcagtgtagtgtctatctaayccctctttactcctgtttgatcccatttaattaaataaaattttaggcaaattatatactttcctgggctttttccttcagattattcatttgccaagtgcttcctgagcaccatgttccaggaactgtactagtcactaagaataaaatggtaaggaagacagtccatgccttgccttcatagtgcttgtggtctagtggaagacagacatgatcgatcagataatcacatagccccatgaagaagtacaaagtggtataggagctaaaatagggggacaggggatgaggggaacatgacccagttttgaggatcaaggaagattctttttttttttttttttgagacagagtcttgctctttcacccaggctggagtgcagtggcatgatctcagctcactgtagcctccacctccctgcttcaagcaattctcgtgcctcagcctcccaagtagctgagattataggcacctgccaccacacctggctaatttttgtatttttagtagagactgggtttcaccatgttggccaggctgatctggaactcctgacctcaggtgatccacctgcctcagccttccaaaatgctgcgattacagacgtcagccaccacatgcagcagatcagggaagattcttagataacattccattgaaactaagatctgaaggatgagaaggaatcaattaggtgtttgggaaaggaaaggaaggatgtgggaagaatgttccaggcagaggggacaacctatttgaagtgcctgaggaaagagcatgcatggccagtccaaagaactgaaaaaggacccatgtggttggagtgggaaggatgaggagaatagaaggaagtgagtttggaaagggagaaaactgggaactaaataattcagaactttgtaaactwtgctaaggattttggtcttttttctaatggcactgggaagatatggaagcattttattcaggaaaataacaatcaaatttgtattttggaacaatcactctagatgcatcatggagaacagattggaaagggatgaggtaggaatcagctaccagttagaaggctaggacactagttcaggcaagagatgatgggtgcttgcgttagaattatggcagtagaaatggagcagagaagatggaggcacctgtgctcaaatcccagctctacaatttacttaatctctctgagcctcccttttcttatctgtaaaatagggataataataatacccaccttgcagagttgttggaaggattaagtgaggtaatatatgtggagctcttaaacaatacctggaatttaataagtgctcaataaatggtagctattattattatttatttatttattttgagacagagtctcactctgtcgccgaggctggagtgcagtggctcaatctckactcactgcaacctccacctcccggattcaagcgattctcctgcctcagcctcctgagtagctgggattagaggtacccactaccatgcccagctaatttttatatttttagtagagacagggtttcactaagttggtcaggctggtgacctcttgatctgcccctttcggcctcccaaagtgctgggattacagatgtgagccactgcaccctgccagctattagtattgttattgttattattattagatatgacccagaaggctaagttttataaagttctgttttgaattgaaacttacttgaaaagtaattttgtttcgtctgtgaatagatgtatttatatgcagtgtgattataagaaaacttggttttaaagcatcaatattgagcagtatacagatttagaatataataaattgtaaataagactatctttctacataatatcccatgttaaacatttyttcaaaacagcagtatttgcttggttcttcattttcaccttttaggtacccttgggcgagactgtacagtacttcccaaaccactgtcgacagcggtgaggtaaaaaccttcttggccctggctcacaaatggtgggatgaacaaggagtatatgcacctcttcattccatgaatgacctgagggtgccatttattaggtaacactccagaaactctaagtctttttaaatggaactttttaagaattcatatttcacattcatttttttcttagtttatacctagttaaaaaatgctgcacattaagtttgctttggaaattagggagattcttttcaattaccactgtttgaaaccattaatttttaataatatcatgcaaggtcaaggctgctttcatagcttaatttgaagcctatttgtatattatcaagttaattataattaagttcttataaaagcaaactagggtcttatggcatcaaggccattttatttattttattatttatttaattatttttttttttgagatggagtcttgctcttgtcacccagaggggagtgcaatgtcaccgtcttgattcactccaacctccacctcctggtttcaagcgattctcctgcctcagcctcctgagtagttgggattacaggcatctgccaccatgcccagctaatttttgtatttttagtagagacagggtttcactatgttggccaggctgatctcaagctcctgaccttaggtgatctgcctgtctcagcctctccaagtgctgggattacaggcatgagctaccgtgcctggcccaaggccattttataactacagacctacagtggcatcattgacttaggcagttctggtaaagtttgattcaacaaatttttttgagaacttacctcatacagagctcaggggctagactgtaaaagactctaagatgaatgaaacataatctttgtgcttcgggaacttataggttgctgtggaagttaaagaaaggcaagagtacatcagggcttacatttaagaaaactggacaccattctcacttaacgtgagaattctcacttaacgtgatgaattagaaaagcatccaaattgtttatccctttaaaaatattttttatcagtgagttgcaaaactgtttcttaaaacgtatttctaggtaagtaatttctgaaaggctccaaccattaagatttagtatgaggggcgagggatagcattaggagatatacctaatgctaaatgacgagttaatgggtgcagcacaccaacatggcacatgtatacacatgtaacaaacctgcacggtgtgcacatgtaccctaaaacttaaagtataataataataaaataaaataaaataaaaaataaagggaactgcaagggagcagctacaagcaaaatgtaaaaaaaaaaaaaagaaagaaattgttcatttgttcctctgtccatttatgtattcatcaaacarttttgggcaaagcactgtaacagacacagaatatctgactcagactttgccctcaaggaacttcctggttggtttttgctggttcatccagaattagtataccaaaaagagaaatactgacatcctttaataccactgacaaagcaaagcaaagaaaaacagaaatgtcattcttgtaagctagaacactgggtctcaaagtgtaggccctggacagtgacattagttcacctaggagctcattagaaatgcaaattatcacgtctcatcagggacctactgctctggggaggggtcagcactccattttaagcaaactttacgtgattctgatgtatactaagtttgggaattactctgttcaaactacgagacacctttaactagagatcacacataataacccagggcagtgcaagctatggttaaagtttagattttattttgagcataattagaacccatcgaaggaaagtgatatgatctaaattatgatgtaaaggagtcattttagctgtggtttaaasaatggatcgacttcatttgaaatgggtcttttctgtatgttataactttccaaaatgatctacttaaccactatccatgttattcttagaattcaattaactttaatggcaatagaagatatcttaagatatcctcattatgaataatatttattttaatataagtataattaaaatttatacatagtcctctctctctctctctctctctaaatatatatatatatatatatatatatgtttagtttacaatactgttaggtgtatatatacttgtgtgtatatgtgtgtatacatatgtttgtataggtaaagtattaaccgtgattatcttagaagtaagtttacttgatttagatgcctgtttacatgctcatacatgaaaacaccactcatttagaagattaaaagaaattttattttgaagggaatatagacaaattctgaaaatataggtctcccatctgctttttctaagctctataaaataacctatttgctgctgacatgaaatgggtctagcaagtattgacagcaaagccaaaacgtgtgtcatgatatctcaagcaattgaaattaggttaatctagattattttgaaattttttctttatattattactaaaacaataattaagtcataattactactagattatttcagacctttaagcatcctgcttttgattattgaaaatgttttataaattaaatgtcaatgttgaaagatctatttataaaaaaaatgaataatttatttaaatggaggttaatatttccttgaaaactacacactttgtgacttttcgttgataaaattaattatttgttttggtatgttttgaattttttaaaaaagggacaatcttctgaaaacaattcctaatcaccagccaggaaaacctttgttggggatgaagattcttgacgttggctgtggtggtgggctgttaactgaagtaagtgacagctttcctgccatttttaactgggagaaaaaaattaagaagtagacttgtgcctcatttattctttcaacaaataatattattcattaaaaaaagaaatgcatgttgggaggccagggtgggtggatcacctgaggtctggagatcgagaccagcctgaccaacatggcgaaaccctgtctctactaaaaatacaaaaattagccaggtgtggtggcgggcacctgtaatcccagctactcgggaggctgaggcaggagaatcgcttgaacccgggaggcagaggttgcagtgagctgagattgagccactgcactccagcctgggcaacagagagagactctgtcacacatacacacacacacacacacacacacacacatccataatattgattttaatcttttttttttgagacagagtttcactcttgttgcccaggctagagtgcaatggcatgatctcagctcactgcaacctccaacacccaggttcaagcaattcttctgcctcagcctcccaactagctgggattacgggctgccgccaccatgcccagctaatttttagtagagacagggtttcaccatgttggccaggttggtcttgaactcctgacctcaggtgattcacccacctctgcctcccaaagtgctgggattacaggcgtgagccaccgtgcctggccaacctgtgtttaaaaacttgggcatgtcatgggaaatgactaaataaaaaagctgagagaagaattagctatgaaaaatcatttctagtcagagaaaaaaacttttgagaaaagattgttctttagaaaatttgaatatttcagaaatgattgctgttttttcaatggcttgttacatttattgcactttaaatatgttaatactgtactatgtgcaagtaagtgtatctagagtacatagacaaagtttttttcactgtcttcaagtagttttttatcagttttttgttgttttcattgttcttcttaactttaagggtttgattatggaaaatttcaaatgtgtacaaactagagaaaatggtatatgagtttccatgtacccataaatgatgtccagtatttatcacctcatggttaatcttgtttcatttttgataagctttttattgctaacatgtgctctattttcttcctgagggtaacagtttttttaatgccattagcctctagggcggcttggggcttcagttattggaatcgaccctgtggatgagaacattaaaacagcacaatgccataaatcatttgatccagtcctggataagagaatagagtacagagtgtgttccctggaagagattgtggaagagactgcagaaacatttgatgctgttgtagcttctgaagttgtagaacatgtgattgatctagaaacatttttacagtgctgctgtcaagtgttaaaagtaaggcttatggagtttacatcttggtttcttcttctgagtgtgtgtatttgtatctatagcaataaaatggtccataatgcattagcagtccagcaggcaaggtatagtagagaagaaaccaggaagcctggatgaggggacagcatctctgctgtagatttcttctactcctcagcttgccctcaataccagggtcttcctgtgtcctattaatatcttggatgtccagggatcttgaaaaatgctggtgctggctggatatggtggcttatgcctgtaatcccagcactttgggaggccaaggtgggcagatcacttgaggctaggagttggagattagcctgggtaacatggtgaaaccccatctctactaaaaatagaaaaaattagctggacatggtggtgcatgcctataattccagatactcaggagactgaggtacaagaattgcttgaaccctggaggtggaggttgcagtgaggcgagatcgtgtcactgcactccagcctgggcaacagagtgagaccctgtctcaaaaaaaaaaaaaaagaaaaatattggtgctgaacacgggaaaaccatacacttatagcagtatttttccactggtgcagtcgggattaaatacttaacagatattgaatgacaattataagacattgatttgaggctgggcacagtggctcacacctgtratcccagcactttgggaggcggaggcgggtggatcacctgaggttgggagtttgagaccagcctgaccaacatggagaaaccccgtctctactaaaaatacaaattagccaggcgtggtggcgcatrcctgtaatcccagctacttgggagggtgaggcaggagaattgcttgaacccgggaggcagaggttgcagtgagccgagattgtgcctgggcaacaagagcgaaactgtctcaaaaaaaaaaaaaaaagaaagaaattgatttggatgaatacttaaacatcaataaaaataattattagcataagtttaattaaataacaagtaattctgtacatggtaaatgcgtaatagttttcagcttataaaagaatatttcataaatgtgatctcacttgatcttacctacaactagatgaggaaggaaaggcaggtattgttatcacatcctttcacctacgaggactcaggatttatcagatgtcagaggtctctaagcatttaagtggggcttaaggccagaccatttgactccaagtttggttctctccattacttactatgcttatatagtataatttacaacagactttgttctctgaatgtggctgtaagttttcttttaataaatacccctaaagtattattattattactatactgactctgtcgttcacatatttaggaggtgacatcctaaggtcaaaagctaaaagaatgaaatgcatagctcttattgaaattttaagtaattttaaatttatagcaaaattgcaaagatagtaagtacagtgtgcctttcacctgtcttccccttaggttaacatctcacatcataagggtaggaactaggatgagtcaagtgagacacctagggcacaaaattgcaggtgacagcccctctcaggtgctgaccctgcacttgcataccctgaaaggggttgcctatttcaattctgtgccctagaagactcacttgcctcattatagttctagccctatatataaaccatggtacagttctcaaaactaagaaattaacatcagcattatacttattaactgcactacagagctcgttaaattttattaattttttttttttttttttttttgctaatgtcagtttgctgttacaggatccaaaccagacttgtacatgtatttagttgtcatttctccttagtcttctttaatctgtgacagttttttggtgttwcctctgtttttcttgacaaggtcttactctgtcacccaggctggagtgtactggcaagatcacggctcactgcagccatttcctgggctcaagccatgctcccatctcagcctcccaagtagctgggaccacaggtgcatgccaccatatctagctaattttaatttttaattttatattttacttttttgtagagacagggtctccctatgttgcccaggctggtctcaaaatcctgagctcaagggatcctgccgcttcagcctcccaaagtgctaggattacaggcgtgagctactgtgcctagcccttgtttcctcttaagtagagttttactaggcttatctcttattttccaaataaaacttcttaattgattgttaattcttattttatatgtcagtgtgtatgaagggaggttctttgacacatatgagggatgctggcattgtagggtttaaaactaatttttgctttaatggaaagcctatgttttaaaaatgactattgcttaccaccatttccttaaagtacgagtatgtagaacacagattagatattcataagtgactttttttttttttttcagagacaggatcttcctctgtcacccaggctggagtgcagtggcaccatcatagctcactaaaacctcaaactgctgggctcaagtgatcctcccacctcagcttcccaagtagctatgtctacaggtgctcagcaccatgcctgatagtttttttaaataaattttttgtagagatgcggttctcgctatgttgaccaggcttgtcttgaactcctggtctcgagcaatcctcctgcctcagcactagaattataggcatgagccaccatgcctggcctagaagtgattcttaagatattttaragtttgaagttgcaatgagctatgatcatgccattaaagggaaaaaaagatattttagaatactagagctttacagaggaaagttaaaatgtgtgataatatagtgtatgatatttttgtttttaatttaaaggcatactccaatatttcagggccctctcttgtcttttttatttttggcatagagtggtatctaagatatattatctctttctcctaactcccctttctttctcgctttctttctatatgtctatagtaatatgattattttggagggaatctttggcatttttccctcatcaggctaatgagaatgtttaaaagagagaggggacattaatatccttgccatttgtgagacaatataggtaacgccataaatatatttactataaaatgacagactgaggccgggtgcagtggctcatgcctgtaatcccagcactttgggaggccaaggcaggtggatcacaaggtcaggagttcgagaccagcctgaccaagatggtgaaaccccgtctctactaaaaatacaaacattagccgggcgtggtggcaggcacctgtaatcccagctacttgggaggctgaggcaggagaatcgcttgaacccgggaggtggaggttgcagtaagctgagatcatgccactgtgctctaccctgggcgacagagcaagactgtgtctcaaagataaactggcacactgaatagtcctataaatcctttgcattcatcctggtgctcatgttgttctctttatataaatatatatcactgcaacctccacctcctgtgttcaagtgattctcctgcctcagcctcctgagtagctgggaatacaggcactcaccacgatgcccagctgatttttatatttttagtagagacgggggtttcgccatgttggccagtctggtctcaaactcctgatctcaagtgatctgcccgccttagcctctcaaagtgctgggaatacagtttgtaagtcaccacggccggccactctttatattttttataaaaatgaaataaaaacaaaaaatgttcaaacctaatcattaatgttttagtgagaaaacacttattggtagtacttccctgcacaagatgtatagctctgtgctgtaacaaacgagttaagacaggctcagcacttacaatgaaaaccattttgacatatgttagaatgtgaatgtggacatgtaacaaggaagagcagcctgatctcatttttattgtaaagtgtttgatatgtacaaaagaatatataaatataaatcataattatatatgatcttaagagttgtaagcactgttgtatatactcactgagtacatctaaaatgccttttatagtgaatttcccaagagaaaaaaaatgctattttggtgaattatattttatgcgtacatatatattttaatggcactcagattatttggaagaaaggaggagggagggggaaacagcttttacttaagtgatacacttagtcttttacattttacttctatataatttcatttcttttagcccggtggttctttattcattactacaatcaacaaaacacaactttcctatgccttgggaattgttttttcagagcaaattgcargtattgtaccaaaaggtactcatacatgggagaagtttgtttcacctgaaacactagagagcattctggaatcaagtaagtattaagagaattttttccaattttccaggcctagctgaacttttaatatgccagtaattattacgcacttagcctagcacttaataaaataggccactatgtttttgaatgttggttttatcttctcaactaggtcataaactcatggaagctaggattaagtagtagawaccacttctcttttacctgttgccccctaacccagggccaagcagataacagatgatcaatgaatactttttggctatttagtcctcacttgtttaggaaagagatacaaatgtctgttatttacacattctcagtctgccttcttgagccctgcttgtatcagcttatcttacatattatttttcctgattccaccacagttacatatattttgaacttcagtatcactttttatgtattttatattacttacagcatgactttatggttattttggtggtttttttcatccttttatggcctgtaagctacttgaaggcaagactatgtctcctttttgtactctctacaatgcctagctctgctttacacagagtgagctctcgatttatgtgatgaattctggtcaagtaatagtgcttgtcagttcatttatttggcattcggtattcctgttgagtacttagactcctatatttctaatgctttttttttcatataagtctatcagtaaacttgattttacttggaatattattagtacatagccatgtagtaaattctaaagatttctatgagtaactttgttgaaaataaagtaaggctgcacgcagtggctcatgcctctaatcccagcattttgggaggccgaggcaggcagattatttgaggtcaggagttcgagaccagcctggccaatgtggtgaaaccctgtctctactaaaaatacaaaaattagccgggtgtggtggtgcatgcctgtaatcccagctcctcgagagtctgaggcaggagaatcacttgaaatcaggagatggaggttgcagtgagtcaagattgtgccactgcactccagcctgggcaacagagtgaaactctgtctcacaaaaaaaaaaaaaaaaaaaagtaaagaaaagaaaagaaagaaagaaaakaaagtaggaaaaaaatgttttaaagatgtgttatggggacaatctcctgttggcacatattttttaataacagctaacatttattgagtacttaccaaactccaagcattgtgctagtttacacatatagctcatctaattctaacagttctatgatacaagttctgtacctgtaagaaaactgagatttataaagttaagtggcttgcccatggtcaccatgtaataggtacccgagctgggatttgaatccaggcagactgcgttggagtatgtgtcctaattgcgacttactgaagttctgcagtaaattgtgattagtgcatagttacaaaatacgcttgcccattaagttaggaatcctttttttttcttcttttcctatccatttagtgtgctctcagcatttttaatatagaaagttgcatgaaactcttggaaattggaaggaaaatatttattaaatctactctttctgatttttttttttttcagatggtctgtcagttcaaacagtggtaggaatgctctataaccccttctcaggttactggcattggagtgaaaataccagccttaactatgcagctyatgctgtgaaatccagggtccaggaacacccagcctctgctgagtttgttttaaagggagaaacagaagagctccaagctaatgcctgcaccaatccagctgtgcatgaaaagctgaagaaatgaattgtttctgagaactatagtaatatggcttggatatctgatgttttcaaatacaaaaatgtacaatttatcctttgagagagaatcatgaagaaaagaaggtcaataaaaagggctaaaaccttggamaaaagtttttgttatttcgtctaatagctactttcaagggattctgtgaataaaaagttttgtcaagatattgcgtgatctaggagtgtaagttcctcaacctttgttgtataactagggtatgcatattcatttcatcgtacaaaaaaatacatatatatatatattctgcatgtatacatatacatatgtatatgctgtaatttgtttttgtttcaagatagggtctcactctgttgcccaggctggattgtggtggcgtgatcatggcttactgcagcctcaacctccagggctgaagcaatcttcacacctcagccttctgagtagctgggactacaggcatgcaccaccatgctttgctattttttatttttatttttatttttatttcttttgagatacagtcttgctctgttgtccccgagctggagcgcagtggcgctatctcatagctaggctcactgaaacctctgcctcccaagttcaatcgattctcctgccttagcctcacaagtagctgggattacaggcaccagccaccacgcccagctaatttttgtatttttagtagagacagggtttcgccatgttggccaggctggtcttaaactcctgacctcaggtgatccacccacctcagtcacccaaagtgctgggattacaggcatgagccaccatgcctgacccataactcattttttttttatactttaagttctggggtacatgtgcagaacatgcagttttgttacctaagtatacacatgccatggtggtttgctgcacccatcaacctgtcacctacattaggtatttctcataatgctatccctcccctagcccctagccccctgaaaggccccagtgtgtgatgttcccctccctgtgtccatgtgctataactaaattttttaactgagtgtttaaaaaatcctttctacttaaaaaaaaagcaccataaaacatttaaagaactgtatacagaagtatgtcaaaataacctgaaattcttgaatttaatatttgaatccaaatccagcatatatttaacaactcatttgctttccaacaaagtaaaatttaaaggaaaaaaaaccatgttttatcttcccaaatataagtgatatgcagttattattgaatcatcttgaagcaattattactgaatcatcttgaatttctagtacttaacaatgtatatatttaataactgtgaaagttaggcatctctttctacaataaatgagttttgttttggggactgcttttgaagcaattccattacatatttcttagattaataccaatacttcttctaatagatagagtgaggaggcttaatttactaagaaaaccactagaaaacagactaagaatcaaacttttagatgaagtccagtggaaactcctaatttttagtcccctaattagtcactggcaactgaagttaaaaatttttcttctaattcttgaaatttcactttcttcccctaaaatgccactgaaaaaaagaaaaaaagctaagatagttgggaagtgtttgcccaaggaacctaaaccaacagacattgacaaaggaatatagaaaacctatgaactgaaaagtggaaaaggcagaaataaaagctgacctctacatgggccacacagcatccatctgtgttgtcacatttggccaacacattctgtgtgtgtccttatgcagcatccagattttcagaaaaagccagagactcacgtacttcaagaggcataaaaatatatttcatgttagtccttttcattataaaaatgttagctgaaaaaggaagtttccataactaaattgttgttgttgttgtttgagacagaaactcactctgtcacacaggctggagtgcaatggcacgatctcggctcactgtaacctctattaattcctttggaattaatagataaaaatatatcttgcctctatgtataatctaatttgatcttgcaggccaacttcaatcatattccagaagaaatagacttttaaaagacattacaatttcttaaatgtgtatttgtaaagtgaggattacccagctgaaaagtcctaattttgagaaccacctatttttgaaaaccaggaaagtatcaattacagttatagtagaaactttaatatgcaaaacttcccttaggaacactgggggcataagagtccctgcaataaataatggcggaaactttagggctgatagtccagcaaaagagaccgtagatctgtcttaggaagaaaaggaacaaggctggagagagcaggaaggtgaatttgcttgggattttggtttagggttggaggaacagtgatgggaagctgagagatgacctgaatgaatatgcataccctacttataaaagtagatgactcacatagtcctcatgaaggcagtcagattgctcagtggggctactaattataaaaactcctagaccatttaaggttgactcccagagctatgagcactaggagagcaaaactttcagcacatggaagtagtaataaatgatggtaggaagagtcacaagagagaagtcaagtggtgtagctttttcgaaaacatccataaggaaccatagaagccagcacccagtacacgcacaaaacacctgtagaacctagaggagacttctggcaagattccagaaactagcaacagtaatgaataaaatcaataaaacatgtgcatgttctacatatttcctcatagtaaaacatgacaacaaaaatctttcttttattttacatctttcaggaggcactagaattgtcagcatccattcctcaaattatgcctgagtgttctcaaatgaaaatgtcactgttactacaactgtaagcttagaaaacttcctatttttgataataatgtcaggatttagaagtcaggagtatcatttacatagtcaggagcataatttacccaatctctatgtaaacaaatcttcctcaaattatctattttaagcatgccatctctttcctgttggaaacctcacagatatactgaccccatgccctgacctcttcttcagttgtttctcattgctcataagatacaaggcctaaatcctttaacatggctaccaagtgcccacatgtagccctacctacttctcagggctgtttgtttgctttttgacaagtttgctgtatttgaatgacagaacagttcattacaagtcttttgcattattttattttatttttttgagatgcagtctcactctgtcttccaggctggagaccagtggagtgatcttgactaactgcaacctctacctctcaagttcaagcaattctcctgcctcagcctcccgagtagctgggactacaggctaaatgcatggctaatttttttgtatttttagtagagatggggtttcaccatgttggccaggctggtctcaaactcctgacctcaagagatccgcttgtcttggcctcccaaagtgctgggattacaggcatgagccactgtgcccagctttttgcattattttaaactttacattttaaaataatttaaaaataatttcagacttagaataaaggatacaaaagtaatacaaagagttcccatatatcctttattcagcttccccaaatgttcacaattttaaccacattataattataaaaaccaggaaattaaatttgatacaatacagttatctaatctaaaaaccttatttaaattgtattaattgtgccactagttggttcttttttttttccttttgaaacaagatcccacattgcattaaattgtcatgtcttcttagtttcttttaatttgggatggttcctccatccttctttaacattcatgactttgacacttgaagagcactggagagttatttagaatgtaccttaacttgagtttttctgaattttctttgtgattaaattctgataatgcatttttggaaagaataccacagacatgatactgtactcttctccacctcaatgcatcctatcaggagwtacataatgtcaatttgccttgttactggtgatgttaactttcatcacttgactaaggtgttgtctaccaggttccttcacggtaaagttagtatttttccctttgaaatggatgagtatcttgcagcaagatacccctagaaatatataaatattctgtttttcatcatattttgcccattagttgtatcatccattgatgcttattgcttgaaactattatgcctatggtgtttgtctctttctacacttattaatggaattcttctgaaaggaagagctgtcccttttcctccatttacttatttatttacatccatatagactcatggatatttattatcattgatatgttattattattcattaccatttcatgatatgattattcattattattttctttttcaacttgtcccagatttggccattggaaccactcctgtgtcctttcatgtccccataatttttttttttttttttttttgagacagagtcctgctctgtcacccaagctggagtgcagtggagtgatctcggcttgctgcaagctccgcctcccaggttcaagcaattctcctgcctcagcctcctgactagctgggattacaggcgcctgccaccacgcccggctaattttcgtatttttttagtagagacagggtatcgccatgttggcgagtctgatcttgaattcctgacctcaagtgatctgcctgccttggcctcccaaagggctagggttacaggcgtgagccaccatgcctagcctaattttttgaacaccacattttttctggcaccataagatgctccgggttcaacttgtgtttttcctgaaccagccctggaaatcgagggactctaatacctttaattggagaatggtatttagaaaccaagatctgagcaccaacgactcttgtaactactgaggtgtcattgattccaggttcagcagatagctaggaaatatgtgaatgcatacaaatatacatatctctatttctgtatctgcgggtgtgttgtttgtgtgtatataataatgaattcatactgatacctctgattccaatccaacatcacagcgtttattccaacgttcctcctttctttatttgtaaccctttctctgacaatgagaaacctagctctcattattcacagtatattcagttatttactcaattccagaatgcttagtttcacaattgctaactcataccactgcgagttagttcttttccttctcatctatctcagcatgttattcatttgtaacacagttgggttcttatggtactctgtgtgtgtgtgtgtatgtgtgtgtgtgtgtgtatctatctatattttttgagacaggtctcactccaggccggcgtgcagtatcccaagcatagctcagtgcagccttgaactcctgggctcaaatgatccttctacctcagcttcttgagtagctagtgctacaggtgcatgccaccatacctggctaattttttttgagacggagtctcatgttgtcgcccaggctggagtgcagtggtgcaatctcggctcactgcaacttccacctccagaattcaagcgattctcatgcctcagcctcctgagtagctgggattactggcgtacaccaccacgcccagctaacttttgtatttttagtagagacagggtttcaccatgttggccaggctggtctcgaactcctgacctcaagtgatctgcctgcctcagcctcccaaagtgctgggatttacaagcatgagccactgtgcccagtctacccggctaattttttttttttttttttgagatggagtctcgctctgtcacccagtctggagtgcagtggcatgatcttggctcactgcaagctccgcctcccgggttcatgccattctcctgcctcagcctcccgagtagccgggactacaggcacccgccaccacgcccagataatttttttgtatttttagtagagatggggtttcaccgtgttagccaggatggtctcgatctcctgacctcgtggtctgcctgc

SEQ ID NO: 93327 - DNA, 28309 bp, Homo sapiens
tcaaaataataagagctatctatgacaaacccacagccaatatcatactgaatgggcaaaaactggaagcattccctttgaaaactggcacaagacagggatgccctctctcaccactcctattcaacatagtgttggaagttctggccagggcaatcaggcaagagaaggaaataaagggtattcaattaggaaaagaggaagtcaaattgtccctgtttgcagatgacatgattgtatatctataaaaccccattgtctcagtccaaaatctccttaagctgataggcaatttcagcaaagtctcaggatacaaaatcaatgtgcaaaaatcacaagcattcttacacaccaataacagacaaacagagagccaaatcatgagtgaactcccattcacaattgccttcaaagagaataaaatacctagcaatccaactcacaagggacgtgaagaacctcttcaaagagaactacaaaccactgctcaatgaaataaaagaggatacaaacaaatggaagaacattccatgctcatggataggaagaatcaacatcgtgaaaatggccatactgcccaaggtaatttatagattcaatgccatccccatcaagctaccaatgactttcttcacagaattggaaaaaactactttcgagttcatatggaaccaaaaaagagcgtgcatcgccaagtcaatcctaagccaaaagaataaagctggaggcatcccactacctgacttcaaactatactacaaggctacagtaaccaaaacagcatggtactggtaccaaaacagagatatagaccaatggaacagaacagagccctcagaaataatgccacatatctacaaccatctgatctctgacaaacctgagaaaaacaagcaatggggaaaggattccctatttaataaatgctgctgggaaaactggctagtcatatgtagaaagctgaaactggatcccttccttacaccttatacaaaaatcaattcaagatggattaaagacttaaacgttagacctaaaaccataaaaaccctagaagaaaacctaggcatcaccattcaggacataggcatgggcaaggacttcatgtctaaaacaccaaaagcaatggcaacaaaagccaaaattgacaaatgggatctaattaaactcaagagcttctgcacagcaaaagaaactaccatcagagtgaacaggcaacccacaaaatgggagaaaattttcgcaacctactcatctgacaaagtgctaatatccagaatctacaatgaactcaaacaaatttacacgaaaaaaacaaacaaccccatcaacaagtgggcgaagcacatgaacacacacttctcaaaagaagacatttatacagccaaaaaacacatgaaaaaatgctcaccatcactggccatcagagaaatgcaaatcaaaaccacagtgagatatcatctcacaccagttagaatggcaatcattaaaaagtcaggaaacaacaagtgctgcagaggatgtggagaaataggaacacttttacactgttggtgggactgtaaactagttcaaccattgtggaaggcagtgtggcgattcctcagggatctagaactagaaataccatttgactcagccatcgcattactgggtatatatccaaaggactataaatcatgctgctataaagacacatgcacacgtatgtttattgcggcactattcacaatagcaaagacttggaaccaacccaaatgtccaacaatgatagactggattaagaaaatgtggcacatatacaccatggaatactatgcagccataaaaaatgatgagttcatgtcctttgtaggaacatggatgaaattggaaatcatcattctcagtaaactatcgcaagaacaaaaaaccaaacactgcatattctcactcataggtgggaactgaacaatgagaacacatggacacaggaaggggaacatcacactctgaggactgttgtggggtggggggaggggggagggatagcattaggagatatacctaatgctagatgacgagttagtgggtgcagcgcaccagcatgtcacatttatacatatgtaactaacctgcacattgtgcacatgtaccctaaaacttaaagtataataataaaaaaacaatgtaatcaaatagatttatagaatttttaaatttacctttaattagctatctttaaaaatctttaactaaatatttgactcctatacccaggcggtattcaaatgggtgcattccatcagtcaccaacagcgagggagtattgaaatccatccatcactagtcctagaaaagcaaaagacacccctacattgctaacagtggattagaagcttcacctttatagaaaagacaaacacgctgagaatttagcaaaattgcaggtattcatattcaaagcatcaggctaacacaatgtttcatacaacagtgtttgtgagaaaaactaagctgaaggttagaaaacacagagttatcgtgcatttttaaaattaattctcaaaaatacttaaagatcaaagtcaccaaagttttggggtaaatgcaaagagtaaatctaattatctgaggagatgagataggcattgataacaatttgacggaaagcatgcttttatttatggaatggccacttgtgcaaagttgagaagcaataaaaagaacagaaaatctgccatttctgccactcacattaactatgactaataggtaatgactactaatgagccctagaaatttattttaaacagtattatccctaccttgaaacttaattccagaacttaacccaggaagaaggcttttttcattaacttattcacaaagacctcatgcaatttacattgctgaaatagctatcaggaaatactacttctgtttaaatacactttattggaattgacttgataattcttttttttatgacttaggagcatttgatgttggcaccagtggtaaaacattaatattgcctttgtaacattagcacgatgtgtggtaacagaataaaatgtgctatagaggatctgggataaacttccctgagaggaaaaaaaatgcaggccaagcctccagagcttatgcaaagactcttaggcaagaatggtattaacccattccaccccacaaacagaagccatttgttagaggaacctcttgaacttagcatttataggatatgagctgatgtaagctctgacatcacttgactgtctctttcatttatggagagggaaatcaagacccaaagaagtacagtgaacttccagaattacatagccagttaccaattgagtagattctcctggattctcaactactcctttcttttttttgaaatagagtctcactctgtcgcccaggctagagtgcaatggcatgatcttgactcactgcagcctctgcctcccgagttcaagcaattcttatgcctcagcctcccaaatagctgggattataggggtgcaccaccacatctggctaatttttgtattttttttgtagagacagggtttcaccatgttggccaggctggtctcaaactcctgacctcaggtgatccccccacctaggcctcccaaagtgctgggattacaggtgtgagccactgcacccagcctgcgactcctttctctacatcaaccttccatgttattctcacattttgtcatttcaccccttgaattcaatgcctcaatcacactgaggtcctttcaatgcttcccccaaagtctgcccctcaaagaatgatctcaggctctcttgtctctgagccttcacacttgcagttctttgttttggaacccacccatgccataccccaaccccaccaaactccatgtctcattatctcctagccattgtccaaatcacagtttagcaaggcctctaagttctcagaaatctaggttatatacattttctctcagttcccagacagaaataaacaaaagaaataaagcaaaacaaacccaaaacaaacagaagaaacgaaataagaaaaataagaacagaaattaatgaaacagaagagaaaaatggaagaaacaagagctctgaaaagttcaacaaaattaataaactaagaaaaaaagaagacacaaataactaatattaagaataaaatggcctggcgtggtggctcatgcctgtaatcccagcactttgggaggccaaggcgggtggatcacctgcagtcaagagttcaagaccagcctggtcaacataacaaaaccccgcctctactaaaaaaatacaaaaactagctggtcatggtggcggacgcctgttatcccacctactcgggaggctgaggcaggaaaatcacttgaacccgggaggcggaggttgcagtgagcagagatcacagcactgcactgcagcctgggcgacaagagtgaaactctacctcaaaaaaaaaagaataaaacaatatggctgcagacactgcagacatcaaaaagataataagggaataacactattaacaactctacacagataaatttgacaatttaggtaaagttgatcaattcctcaaaattgcaaagtatgaaaactcatgaaataagaaatagattatttgtataaccttataattattaaggtaatttaatttataacttaagacatctcaaaaaggagattctatcaaacatttaaagaattaacataggttgggaatggtggcacatgcctgtaatcccagcactttggaaggccaaggtgggtggatcacttgagcccagaagctccagaccagtctgggcaacataatgagaccccacctctacaaaaaatacaacaattagctgggcttagtgacacacatgtgtagttccagctactcaggaggctgaggtgggaggatcagttgaagctgggaagttgagactgcaatgagctatgatcacaccactgcacttcagcctaggtgacaaagcaagaacctatctttaaaaagaaaaaatgaaaatgaataacagttctacacaatctcctccataaaatagaagaggtgaaaatacttccaagttcattttataaaattaatattactgtgacaccaaaaccaaagatggtgccaaaaaaagaagaaaactaacattaataactcttatgaatatagacacaaaaatctttaacagaatgttagcaaagtgaatccagtgactgatatataaaaaagaattatacatcaagtgtgatttttttccaggtatgcaaggctggttcaacatttgaaaattaatcaatgtaatctaccatatcaacatgctaaaaatgaaaaatcatatgattgtatcatttgacacagaacaagcatttacttattctctcttgtcttctagctaaaccctgcccactggtgttgccttttattggaaatgtattttatctccattcttcatcaagatccttgggccttgggtcaagacccaggtccacacacggagattttctagggtccaaatccaagttggtaggccctgtatgcaaattagtttcacttcctctgagtaaccagctctgcaaaccaaagagtgaggagctcttgataaactactagagaaaatctgacaccatccttatctgtcaacaaggggcctacattcagaaacctgaaagaattactcaagtttagagacaaatatgaccatttttgtattttgaaaacaacagaaaagaaatacttttgtacactctgttagaaattttaagtttggacatttaaaagtccaaatttaaaactcaaaaaaatggataataagaggggacctgtttgattaagggagaaaaaaatagtttgcattttcaccttttgtgctctttcactgagatgagcctatttcagattacacttaggaacttccatcaagcagcgggagagcctacttttcctgtttaataattaccagactacagagaaagctcaggacccagccttctgatctaccagtcgcctgtgtacctttgtactttctacagtgaaagttgctacaggatctccctttctcaataaattcatctgcggtggagaaaatcagcatgwgtactacaggccaagtaggtgcagtcttattctttatgttgtgtcatatctttgtcagtttgtgtgctcatctctttaccaacatctcatcacccagctagtctctgggctcctaaaggtgagaggctgtcataatcatagtatctctcctcctcctctcctttttccttaattcccttttgacttccctcagttctttcatctcttcaataagtaatgtccaagccctttatcagaatttccagagtcaaagatatatccccttctccaaggatctcacagagagacaataattataaaagagcaattataaagcaatatacaaggatagtaaagtagaaagagaatgggagcctcaaggaaaagctcataacccagcttggcttcccagaggtgataccgaaggggaaatcactggagaaatatgaattcaccaggtaaaggagaagtgtgtgcaggcagataaaacaacataaggagtaatacagagactgagaaaatatcccatgcaagaagcttcagaatatgtttgggggctgaaaggtaaagcctgaaacacaaagtgacaggaaataaggttggagagactgacagagagaaaatcctgatgtcagcggatccaggtaagcaaatggtaacaacatcatttttagataggagattggtgtgattaggattatatttcaaatggcaatggtataaaggtgatttcgaaggtggtaaaagcaagaaagagataaagcagaaagcttttttagtactagcagcagtggagaaaagacacatatcctagaaaaatttagactgtgaagattgagggacagaaaaattgaggctacttcccaggtttctacttgggtgagtgaacacatcgcatggctgctagttgaatagaggtagcagagggaggaatatattgagtgttttgtccactagagcrtggtggaaggtggagatgggaagaagaaataatgatatgttcatgttttaacatgttgagtttgagatacctccagtaccttcaaacagcaaatgaatacattagcctataacttagggagaaatatgtcccataaatatagtttactcacataaaggtagtggttgaatctgcaaaaatagataagaccacacagaaagagaatttatagtgacaacagtggtggcctgaaatcagaacctttaagaactaccttgccaccaacaacttctccaacctcaatctgccaagagacaccatttgatgattgcctccattcgttgctccataactcacccttccaccccaaaactgatttttcccatgcttaggatcacaaataactcccacactgtaatgccattcctaccctgaaacagccaccaggccactttattcatagtaatataaaaagtatgacacctgcaatcccactactgggtacctacccacaggaaaatagtatattaaaggtatacctgaacttgcctgtttattgcagcactattaacaatagcaaagatatagaatcaacgttaagtatccatcaacagatgaatggataaacaaaatgcggtacatatacacaatggagtactattcagccgtaaaaaagaatgagatcctgtcatctgcagcaacagggatagaactgaagatcattatcttaagtgaaataagccaggcacaaaaagacaaatatcacatgttcttacgcatacgtgggagctaaaaatttgaacacatggaggtagagagtgggaaaatagataacagagactgggaagkgtgagtggagaggatgatgagaagtgggtgaaaaggtacaaacatggccgggcgtggtggctcacgcctgtaatcccagcactttgggaggccaaggtgggcggatcacgaggtcaggagatcaagaacatcctggctaacacagtgaaaccccgtctctactaaaaatacaaaaaaattagccaggcgtggtggtgggcgcctgtagtcccagctactcaggaggctgaggcaggagaatggcatgaacccggaaggcggagcttgcagtgagccgagatcgtgctactgcactccagcctgggcaacagagtgagactccatctcaaaaacaaaaacaaaataaagtacaaacatacaataagatagaaggaataaattcaatgtttgataccagagtagggtcactatgctcaacaaaaatgtattatactcagataatggacaccctgaatacccttacttggtcactacacattatatacatttaacaaaatttttcatgtaccccataaataggcacaattttttttttttgagatggagtctcgctctgttgacagactggagtacagtggcatgatctcagctcattgcaacttccgtctcccaggttcaagcgattctcctgcctcagcctcctgagtagctgggattacaggtgcaggccaccacacctggctaatttttgtatttttagtagagatagggtttcaccatgttggtcaggctggtctcaaactcccgaccttgtgatccgcccgcctcgacctcccaaagtgctggaattacaggcgtgagccaccgtgcctggccaataggcacaatttttttaattaaaatctttaaaagtatgacatctatcctcttggtcatgttacattttgtaaatatagttggtattttcaaaactaatttgaatacagaggctgatagtacaagaaaacttaaattggggtcagaaagactaccttcagcatatatttattcttttttttttctgcagtgcggaaagttggactaatccaatttaatgattctataatcactaatatagcaatcttccaactcccaagcttaaggagcttctctttctgcccctgtattctatttcccaggtcatcagatgcaaagcagccatactctggaagcctggtgcaccattttctattgaagaggtagaagtggccccaccaaaggcaaaggaagttcgcataaaggtaaaaaaaaaaaaaaaaaaaaaaatcacaccaaaagccaaaagccagagcttcttactgtaagttacatattcttatccggatattcaactcagaaaaaaaaataataaaactacatatctttgtatttctttttcattaaacatttccatcaatttttaaatccagccagataaaaggttagggaggtaaagcataggctaactgcccaaaggataaaactcaggcttatttacagctattgtactaattattaatttaaaaaaattctaccttcaaaccctattttaatctgtacttgtaaatttttatggcatccttcataatacttgtcttgaaatattttgaataaaaattgattacagacaaatcatctctgaatctggaaactcaagttagagctggaagggccttagggatacctgatattttacagatgcgaagactgaagccagctgcggtttagtgactggtcacacagctagtagagtaaaaataaagactaatttttctcggctgagcatgatagctcatccctgtaatcccagcactctgggaggcagaggcaggaagattgcttgagtgcaggagatgagaacagtttttctcaaccttggttacctatttggaatcagctggaagctttgaaaaatgctgataaccaagtcccatctccagaaattctgcaattgtgatttaattagtctggggtgcagcctggacatggaaagtttttaaattgccttcagatggttctataggcctcctccaaactagaaaatagtttacctgacttgcagttcagagtcctttgttattattttaattataacaataaagaataagtacagtttaatgatagattacaaagagacagtcattttctaagtcatctcatctgcacagttcatgccttcttctcagagagccttctccatcctacatcccctatggagtaagcagtgggctattgggttgttcgcatccactccccacccacagggtcacaactcatgcaaccaggtttggaccctcactcaaagacattcaaccattatcagacaagctacacatctgaatgtctcaccagtgaatttgaaccaagatatgggcactatagcagagtaagtgatggyaggcaatggtgaggttgggcagactcatcactggttaactgtttttaaccacgatcagcaaaataaatggagaaagccaatctgcagagaataataggtgaatgcaactatgcccatattgaatcaaagtaaagagataaagagaatgactatttggtaaatgtctaggtctatgaggtctgacagcactttctacagttgggttgcaggcaattcaggcaattttatggtattgttccaataatcctccttttacatgcacaaatttcaatatatttcatttcttgactaaggagtatgtgcatgtgaatgtgtggctatgtgtatgcaaacttcatatttgttttagaaatgaagaaactgagacccagaaagaaaaatttacccccaagttcacacagctgagaagggggagagccagtatttcatccctgaacacttaaccactgttctggagtgtcttcattttaaactgtctggctaacttacaataaagtgggattatgacttgtacaaataacaaaactataaagctcacttgtaaaataaattaaggttttaattaaattataataggaaacattattcctttgcctcctgtgttccaatttctttatttcatttcattttagagacagggtctcactctgtcacccagactggagtgcagtggtacaaaatcatagctcactgcagcctcgaactactgggctcaagtgatcctcccacttcarcctcccaagcagcttggactacaggtgcatgcaaccatgcctggctaatttgtttatttattgtagagatggaggtctcactattttgcccaggctgatctcaaactcctgcccttgagtgactctcctgcctcagcctcctgagatgctgggattttaagcataagccactgcactcagctcaattcctttatttttatagtcgttctttctcctccacacttccatctacaagatcaatgaagccaattgagacctcagacatcaagtcacactgcaattttacagcttctcttctgaccccattctacccacactccccagtaaattttcaatcatcttgattctgaaatcagctaatgaaaaacatttcattgctttaacaaattattattgacccttccctagaattaaaactgataagaaatgaatgcagtgtataaatggagaatatcaaactagcaaaaagccttacagtcaacaactctaaaacaccattatctgaaacagcgggaactgcagtaccctttgccttccatacaggttgtggccaccggactgtgtggtacagagatgaaagtgttggggagtaaacacttggacctcttgtatcccaccatcttgggccatgaaggggctggaatcgttgagagtattggagaaggagtaagcacagtgaaaccaggtaggaattagcacctggtaataggaaacagcaacaacttggaaccaacatcgagaaaatgataagcaccccttaagtatgtcaggatcaagtgaaatgaaaggtgaaatgtttccaacttcttagaaaagtagggataaattacttgtaagttacataaaatactaaatatattgtattctttgcatttacattttgaaaataagaaaaaacaagaagtagaatgcactgaaactggacttgaaagtamaaatgagacaaaaatttatgaaaaaaaggttgactgaggtaaactattgaacaattatttaaatgaggcatatgataaataatcaaacacattagtggaaccaaataaagaagcagtccagaattgaatccaaataaacataagaagttaatgcagcatgaggtttgtctttcaaacttaagaatagaaacagattattccacaaattgtgttgaaacaactagatagttatccgggctaaaaaagtaaattgggttgccatctcattctttatataaaaaaattatacatgcatctaaaaattaaatgtgaaaagcaaaaccatagaagtactataaaataacatgggagaamtgtattatcttggaggagggaaggaaattttaatcaatacaaaaaaatacccagmagatataaaatagrtatttatatagataaatttgacaatgtaaaaattacatagattctgcatgtttaaaaaaaaccccaaaagtcaaaacccagtatgacaatggaccaattttcttaatatagaaataatttctttaaaagcaatttttaaataaaaaaaggcaaacaaaatacatgtctaatttaaagaaatatatatatacacatatatgtgtgtgtatatatatatatgaatgctttaaacacattaaaatatgcccaacctcagacatattaaaaataaaaaacattttaaaaggctgggggtgggaaaaatggagagatgtggtcaaatggtataaaatttctgctagataggaaaaataagttttttgagatctattgaacagcatggtgatcacagttgataataatgaattatactatatttcaaaattgctaagagtatacatttcaaatgttcttaccacaaaatataagtcttcaagtgtttaacatgttaattactttgatttaatcatcccatattatatacacataatatcacattgtaccccataaatatataatttgtcaatttacgataaaattttaaaatgcaatgaaaaaacactttttccctagcagatcggcaaagattaagaagtttgataatatatagagttcacaagaatataggcagacagctccctcatatcttattgtttggaacgtagatttgctcgactctaaatgcagcaatatgtaatatcatttaaatttatatattcttggacacaacagtttcaattctagaaacttattccatagatatatgttcatgtactcattttctattgctgctggaaaaaatcaccacaaatataacagtttaaaacaacacaagtttattatctcagtttctataggtcagaaatctgagtgggcttggctgagttttctgctcacgtttcaaggtcaaaatcaagcgagtagccagctgggtccttatctggagcctctggagaaaaatccacttccaagttcattcaagtagttttcagaatccaattccttgaggctataggactgagatccttatttcctcaccagtggtcggctccctgaaattgctcacatttcttcttctgtggcaccttccagcctcgaagcagccatggcccactaaatccttccacaggtgttaagtcacttttacttcctcttctgccttcatctgctcttcttcttttgatggctcatgtgattaccttgggtccacctggataattcagtataatctccctatcttaatgacaactgattagtgaacttagttacatctacagagtaccccttgccatgtagcataacatactcacaggcatgacaccacaacatagtcacagtttctagggatttgtgcaggatatctttcggagggcattttagaactctgtctacaataagatactcattgcattactggttttagtgttggggtgtagagaaacaaagaacaacctaaatatctatcagtgttcatggcactggttaatgatggagcactatatgtactaaaatagaaagctccatgatacagtgttaagtaaaaaagctaggcccaaaccagggtagatagcatgcttacctttgcatttttaaaggggttacagtgctgaaaaatatcgtggttactggtcagagtacctgtctctaagatggggaactggggaatagagtaataattttcacttttgtgcagtttaaatttttaccatatgtatgtgttactttttaaaaaaataaaaataaataaaatagaagaaactaaatcttcataaggtttttaactaaaagtataaaacaaatttctctggtttacagtgttagaccatgggggcagccagtaaaatacatcacaggcaagctcttctaatcatgtcctgatactttgaccactactagagaaatctgcctacctttgatctctaaggtcaagaagaaagggttgatgtcaaacacagagaacagcatagaagcaattttttttctccctaatccagagcttactctgttagtatgtggtatccatactattttaaattcaatccctgagagaggaaattagtgttgaaaatgttgagaagagataagacttgactgaatggatatatgacaaaaaactatttcatactysaaaaggagcttacaaaagaggcaaatctggggccagttcctcaagattcagccactgagcccagggctgggcccagatgctaaagacattctctctttttgtaagtatttgatattctttgtggtatcaagcacaactgaatgtggaaataattttcagctgtcatttcttcttgggtgccttgctgtcaaaatcctgaaagacagctatgtctttactttaaaaaataatatgttaataagacatgattttgctcttttaggtgacaaagttatcacactctttctgccacagtgtggagaatgtacctcttgcctgaattctgagggcaatttttgtrtacaattcaagtaagtttttactaatattttctttttgaaaacttaattcactttcattggagaagatctaagctttctaattcaaaataaactttgtgttttgttttttgttttgtctataaaagacagtcaaaaacccaactgatgtctgatggtaccagcaggtttacctgcaagggaaaatcaatatatcactttggtaataccagcaccttctgtgaatacmcagtgataaaggaaatctcagttgccaagattgatgcagtcgctcctctagagaaagtatgcckaattagctgtggcttttccactgggtttggtgctgcaatcaatactgccaaggtgaggggcatttatacccatttggaagggaattattgggatatggagttraaaggcctcttgcatctttgtcatstcttatcataccaaaggaaaaatcccaagcctgactccaaacatccttgagttctctgctatctacctagtcatcccacacccccttcaacatttttcccattccctcttggtgagtagtaaaagacagattaagtctggatgccattcacaagtggaaagatcaggaattactggaaattaaatctaacatagttacaacatgactctgtggcctttcatattccagtttatcctttctttccttagacaaatattttcggagccattcactgtcccaggtgctagaattcagcagctaacaaaactcatgaagctaatattatattgcatgatatattaggtagtgataaatgctaataaaaagaaaaggagagtaaaggaaccaagtgatgaagtaggtgttactacattagacagattgaccaggggatcccactctggctgaatgggctgctattgaactcttatttctaaaacatcactcaaaccttcccggctcccttcctaaaggtgctgttgaattttagaactttgcattttccagtgtccatcagtcccaatactatacagagagatagaatggaaaaaaattatttaaattagtcctatgtaggacagtactcaataaaaaaaaagcctttgccttcacaaggtattgacccgataagttatgaaaaatttacagataccgagagagagagagagagacagagagaaatggttgtaggaagatagagataattttaaagaactcaaaaatatctggaattaaatacactgtcaagtaagtcttaatattcaatgcaaattcatttaaactactactcagactaattcctgggacttgaaactctactttcaggcagttttttgttcctgtgccaagagtattccatatctagaaatatttttgaaaaatcaaaactttgtagttataatatgttatgtatgtaaacatcatttgcttatgactcgttaaaaaatacatgcatatagacttagccttcccaactgagtaaaggtgtatgttctctttgctttttgttttctgagttttctgcctgtatgtgtttaggtgactccaggttctacctgtgctgrgttggcctgggaggagtcggcttgtctgttgtcatgggttgtaaagcagcaggagcagccaggatcattggagtggatgtcaacaaggagaaatttaagaaggcacaggaattgggtgctactgagtgcctcgaccctcaggacttaaagaaacccattcaagaagttttatttgatatgacagatgctggtatagacttctgctttgaggccattggaaatctggacgttctggtatgtaatcctctggagtgaaaattaccaatacttttaccagtcatcgtttagattatagttgaatgagctttctaaaattccctccactttgctctatttaattttccttgtgttccatgacatctcagctggtgccrtctgtgtactcttacaaatttgttcactatcccagatactaaatctagaactttcatataatttcaaagccagaagttttaagcaagataagattaaaatttgattaatgaccttataaatcaatgtgcttttcactttcagtcgtctttcatgtcagatctgagataagtttccaagaaaaatatttactagtcacgattaaacgggttcatttcaaaaatgaaggggaaaaaaagtggtggtttttctggctaaacgtggtttatataaaagaatagaaagtgaggggaagttacttaaaaatctaaggcttgttttctttggggatttgaagaaataatgtattattaggttgcatggctctatcgtctagtcagctgtatggaaactcaacaactgcctcttccaacttgggcccttttcccagcataaaaaatcttttcatgattcaccatacataaattcctttatctgtaagaagaaacagcaaaacctttctcacactcttactctgagaaatagcctttgaacataacgaatgtaacggtatctgtttctcactttgctatcatcttattatataaatatctgtcttcttagatgtctaaaagaaaaatgtcaattcttaccagccacctgcatcagtaataatttttataaaaattatttttattattatcactactgtggatgtttttactattttcatttttgttatttccatttattgagtcctaaagtgccaggtactatactaagcaacatacaacgtcttatatgtgtttcatagcatccttacaagataaatgttacttcaaatgagaatagggagaatcagaaaagaaagtcatagaccatttaggagttaagctgaaattaagatgtaggctcaatcctcacatacatcttttaacccctatactgtattgcrtcactttctaacaggcagctgccctcgcctcctgcaatgagagctatggggtctgtgtggttgttggggtgttgcctgccrgtgttcaactcaaaatcagtggccagttgttcttctcaggacgttctttgaagggttctgtttttggaggtatggatgaagcagggaaaggtggaaatgcctgaggaggtgaaggtgggaaatagaaaaatgtaccataaacgcttaagaaaggacataaaacaacagctttatattacagattttttttttcaacatatgaatacccaatataaagggatggatagtgggtgtatctagtgcctcttggaaagctttttctcatgcaaagatagagaagaggtttcttaattgattggtaaagaatccagtgtccaacatttaaagcaaactctaaattgaaaagaaggcaatattgtaatctataactacacttcagcgaaattatacacctgccagctgggattctttggagaatatacttagccattagttgtcattgttcaactcatgtaaaatcttatcccaaacaaatgagttgtcacgctaccaactcaaatatattaaacacaatggattcttgatttaaaagaaatactattgattaaaaaaaataagaattattttacccagaggaaaaatatcttatagaatcctttgattttctgttttttacctgtcctggaacatttttatagactttagaagactattttattgaaaaagtagaagacaaactaaattaaataaatctgcttaagattctgggctcataagcaagaaatctgaaatttacgaagaaatgtatttatccagaaactctgggcaatctgaatgcctgggcaaaaagagatgagaattagaggagtgcctgaattacttgcacaagtgagctgtctgtagtccccaagtaagctatggcagcatgttattacagatattagaagccttacctaattcatttataaagagtagatacatggcaggaccagcaaaaaaaaaaagtaataatccagttatatatataatctattaaatagaagaactgtaatttcagttcttctatttaagatcattgaatacatccattgccatttctctctattgtatttatagatgataatgttaattcaaaatacacatactcagctaagtcttataaaaataagattaccaatattcttaaaaccctcagtgaatgaaactaattcactggccactctagcactcatatagtgatcattaatgtaaattagtttattccacaaatagtatagtcctctggttcaatgattttcaatcaacaatagcatttaacaggtgttggacagtcctgctaaacctcccacaatgtgcaaaagaaagaatgttccccacccaaaatgccagtagtgcccttgttgagaaacactgcctagtmccgtctgtggtcctagaattttctttcctatgtcatttggttgaaataagaaaaaaagtggagggttgacatagatgtaaaaatgttttatcagatcaccaatcaaaatataaaaacaaatagaaatatacactggcccttcatgtcatgacatagaacagtaattagtattcttggttacacataacagaaacaaacttaaattaaaaataaatctattagaagagtttgtggtagtttggagaagaagttggggagcctaacctaagctagaaccaagaaaagcaagtaattgtcaagatcctatcacagaataatccgcatagaacactaagcagattacgccacattatactttgcacaattacaccacacccaccctttctagcaatgagcagactgccaaagtctgtgtggtaactcactgagcgtggcacttagcacagtgctaaatttaatgtgtttcttgaaaatcacgggaatagagaaaatacaatgctaaactacatcttaccttagctaactccatctttgcttgttcaattcttacttccagaaagcacattttattcttatattgctttgtacacattcttttcccaagagctttcactgggactgctgccacagtgagagttcttcttttcctttaagctatttgactcttttatgaagtggcagatcaaaacatacacatgagggaatgcacacacaaaaaaatgtgctatatttaacatttgaattgcttctttccatgattcccaagaccttggcctttgttatacattagatatagattcactgctccccagagattgcaacatgacaccaggaacactcaaggcaaggtccacattctatctgctttgaattaattctcctctgtagtaccagaagtctcctttaggaacacagccctctatataatgtgtgtggttggggtaggcattctcctgatgattgaggcaagtaaacgggacaggcttagattttctcagtcaaagccaacaacttcagcagttactttgaatgacytttcctttataatgaagcctcatgtgtaaaattcatcattaatctgtatttccaggctggaagagcagacagcacatccctaaactggttgctgattatatggcagagaagttgaatctagatccactaattactcatactctgaatcttgataaaatcaatgaagcagttgaattaatgaaaactggaaaatggtaaactgcccacataaattttatgtctgtgtgtttgagaccaagagaaagggtgtattggcttgggagtagaagaagggtcgtccctgctgcagaagctgtatactgataattgaagaggctttcaggaatttgtaaagcatctccttcccctctgcattttgttttatttctagctaataaaatacataatcctgaaagtatttaagtgttyacctaccgttacttttgccattagcattgtatttccaatatggattttttttttacatgacatattaatggaagtcagcttataaaattgtagctcaagtttaaaaacataagaaggtagttcacaaataggccattgttgtatttgttgttctactttgggggagaagaggaattattcataggattcctaattctgaatcctatctttgacccaaaaaacagaaaccagccataacccagaaactggcattccccacacgagtataagcttgcttacctactttttacccttggagtttcatgtcattttaaaaaatcttcccatggcttatttaatcttctcatttttcacctaaagagaaaaaaaatctagtttactgctctacaaagtgagaatttgaaatccaaaacacaaatgttgctctaaaaatgttccaaccttttttctcttcttctttttttcagtatccgctgtatcctgttactttaagtacaatgtaatacatgcaagacccaaaggatatttcaccaactcaatggcatttgatgtaattttcatgatttagaagaattattcacccaatcccatttctatattctgacttctgattcactccgcagtggacctatatctggcttctgacctaaccatttcatcaaaattgttcttacgtaacccagtgtcaccaaggatcagcctccttttcagagctagattaaggttggcttgaatcactcaactccacatccttcagacataaaaggtcaatgcaagatgctcccattttcatagttcctctacctgtggacctttatattcttgtacactatatgtctctctcacaggcctagacatgaaactctgccattttactctaaagaaacaaaactccgcattaatgagtttattgaagattcaggttaacctgaatcaagttaacccagtctcaaatgctcacttatcctatctccttggcacaaatctctcctctcctggattgccaaagaaaattcaaattattcttcaattagtcaggatgatttgactatcagcagttcatagtacccatcttcataactaagccacctagggatccrgcagaaaaaaaagggatgaggggagtcatcatacaggaggtggatcatttascaggatccacacttcctacaaagcggttgtaatattaaataacaaaactgttttttattccaatcttcacataaaacaggaataattgtatactttcttactaatgtgttccatggagtttttcctccaagaagtggcttaggggaaaatgagccccagtaatgctytgtggcatccaatccttctaccccgaccctttgactttctgccccagcccctcttagttctcctagaattaggactaaggttaagtgccctcttgggatatgacttccttcccttcctcttgatacaaaaagagcctattaccaaccctcatacacacaagagttcccttcctagttgcagactcttctgctccagctggactcccctagctctggactcccactagatcacacaggggtccctgcatgtcagtaaactttggatgaccttgggagaccaaaaaatggaatatcattttttgatctaaacaaaatagtttcctgatttaacactggccaggaaggtgggctgcaccctcagtctctctctcccatcatggttttcacatgatatcaaaggactctcataacagtctgattcttatgagttgggcatcctgtgtttccctttaggggcctgcttccttcaaatagaggagatgggtgctatgaaacctattcactctggacttgggatggctcttctccatcttcccaagtctgagctggagcctccatgcccaactctgctctgctcttctatttcctgacagcagctaaggcatgttcctgttctgcccccaaattgaccttactaacagtgagaacttggaggagtcttcgggtcttgggaaatccaagttttcccggaaacgttttgttgtaaacagtgtccacactctttgctccaataaagctcggttccttaagccactttgaatgtcttgttatggtgtagctcgttgcaaaattcacctaattttatcacaaatgcaggaactttttttccttcctgttaatatacagtcaaacatattaccaagtactggagactatctatatcactgtataaccattcactgttgttgccagcttcaagaccacatttgaatcctatcaggcccagtaaactctgtgaatagactctgtgaactgtctctaagtctcactgttttgtccacattaagtgtcttgtttgaagcacaaagtaaaatctttctttccaatccctgtcactgcacctccctagacagtcactacatggggcagtttatggacttcagcaatgtttacctaactccagatccacactataggagtccagccttcagggagaactagttttttacattttttgcctgcataatgagaagctttaagtttttcatatttttacctgagaacaagaataattacattctaggctatcacccaacaataataaaataatatgtgtccatgcaatataaatgccccatactaacacacaaggtacatgcaaaagcccattattgcaccaccaggaatatgcactaccaaacactgagagttaatgttccctgataattttcaagtgagaaccatcagctcctacatattcacaatgaagcctttatactgatattggcacaagcttctgaaaatgttttaaatcctatacacaccctcagtttcctattaaatgttgtaagttaacactagggttctctctagtggtgaaatttgacatttccctacgcaataatttcaaaagaatttgatttctcccacttatttctctctaacatcattcataagccagacgaccaatcactggaggactgacaagagtatgaacttcgttcttgttttgttttgtttttgcctttttgatgagctttgatagtctcttaactaatcactcactcaaccaacatttatttagtaatgtacatagtattgaagactcatacagcttgacatctagggacacagatatgaaagtaattaaaatgcaatatagtaactattatatcagaggaaaaatcaaccaataaacagaggggaaaaattagtcctacctaggagagattagagaaaaatacacagagaaggaaacctgaagtttagcctcaatgggtgcatcaggttttgccaagtggagaaagaatattgcgagcctatgtaatagcatgagaaaagttcaagttggtgaaagagtatgggctgtgatggtgaatgtgagaaaggtgagagagaggtgtggctggaccaaacaatgaagagggggaaggatttagttctatagaccagggatagttacagaggttttcaaggaaaggattggcatgcccaaatctgtgtttcagaaaaacatgacttttcagcctgggcaacatagcaagacctattctctacaaaaagttaaaaaaaaaaaaaaaaattagccagacatggcggtacatgcctctagtcccagctactcgggaggatgaggtaggagaatctaaagccaagaagttggaggctgcagtgtgccaggattatgctactgctctccatcctgggcaaaaaagcgagaccctgtctcacaaaaagaaaaacaaaatgcctttggcagcactgtggaggatagtatgaagaggacagagactggaagtaggaaaaataattgacaagctgtgcgttaaggcacaattgagaagctgtgtattaaggtgcaattaaggagaaaaattttgcatctaaagccaatggctgtgagtacaagttacatgaaaggttcttgtagctgctgccatcagtacctcatccatattcctaggaccttaccacttctctgtgccccattagctttcagctgctggtgtcagcactctcatgtctgagggcttttgccagaactatagaagattgatctgcctacttctgttaaaacagcccagaagacctagggaatttataccccaccaagcagccctccacaagtgactggtagaagtctctacaaaataaacaaggccagagagttttccatgagattaaactctagttgccccctttggtagccagttttaaaatgcactcttatactcaagtttatattaggacttatgtagggcctattatgtaggctatcgtgaactatattaggacttatgtagggcctgtagctcctttcttttggccaatttatcccttttggaataggagtagttacccaatgcctgtatccccattgtatcttggaaatcattaacttgttttagattttacaggttaatgggtagaagagactagccttgtctcagatgaaactctggacctttaacttttgagttaatgctagaatgagttaagattctgaggggctgttaggaaggcaagattgtatttcaaaatgtgagaaagacatgatatctgagaggggtcaggggcagaatgatatagtttagatctgtgtccttgcccaaattgcatgtcaaatcttaatccccaatgttggaggtgggtcctgatcggaggtgattggatcatcgggatggatttcccccttggtcctgttctcatgatagtgaatgacttctcatgaggtctggttgtttaaaaatgtgtagcacacccctgcaactttcctcttgccccatccatgtgacatgcttccctcccactttgccttctaccatgattgtaagttttcttaatcctcccccaaagcagaagctgctatgcttcctatacagcctataaaaccataagccaattaaacatattttctttataaattacccagtctcaggtattcctttatagcagtactagaactaaataatacaacacatagtcatcagattttctaaggtttacatgaaagaaaaaatattaaaggcagctagaaaaaaggggcaaataacatatagaggaaagcccattgggctaacagcaaacctatcagcaataaccctacaaaccagaagagattgggggcctgtattcagcattcttaaagaaaagaaactacaaccaagaatttcatatccaacgaaactaagcttcataagtataggagaaataaggttatttttaaacaagcaaatgctaagggaatttgttaccaccagacatgccttacaagaggtacttaacagaatgttaaatatggaaatgaaaaaccattactggccaccaaaaaaacacacttaagtacatagacagttgacattataaccaactgcacaatcaattctggataataaccagctaacaacacaatgacaggatcaaatctccacctatctatgctaaccttgaatgtaagtgggctaaaaaccccacttaaaaggcacagattggcaaattggataaacaagcaggactagactatatgctgtcttcaagagacccatctcacatacaaagacagaagaggctcaaagtaaaaagatggagagaaatcaaccgagcaaacaaaagtagaaaaaggcagtgtgatggttaatactgagtgtcaacttaattggattcaaaggatgcaaagtattgatcctgggtgtgtctgtgagggtgttgcaaaaggagattaacatttgagtcagtgggatgggaaaggcagacccacgcttaatctgggtgggcaccatttaatcagctgccagcatggccagaatttaaaagcaggcagaaaaatgtgaaaagactagactggcttagcctcccagcctacgtctttctcccatgctggatgcttcctgccctcgaacatcaaactccaagttcttcagctttgggactcagacgggcttccttgctcctcagcttacagacagcctattgtgggaccttgtgatcatgttacttaatacttcttaataaactcctatatatatgtgtgtgtgtgtgtgtgtgtgcgtgtatatatatatatacataaaatacctacgtattagttctgtttctctagagaaccctaactaatacagattttggcaccaggagtggttctagaggaacagaatattaaggatggagttctttcattggttttgggatttctggagttggctgcttaatatgattacacccaaaaatgctaaggactctacttctaatagtatggagaatactggtagtccttggtatgaactgtttagacagttatgcaaaataaatgcatttgacactactgattcaccactcatgagaggcaaggagtttagtgactctataagtaatacctttgactatatgtggagaaccaagagacacaatgaagttggttggttgctcctaagttcactggacagagtgaagaaagaaaatgatgaactcagggattctaactccaggcatcagaagcagatactgagcctcaaatctgctaagattgccctgacagtcttatctcctgtagagaagagctgaaattgtggaaaaacagacacaagctcttatcatgcaagtggctgacctgcaatgataggtgcatggagagccccaccaggtgtctcctgttaaagtgagggcattgatttgaaaagaatgagaccctgaaacttggaatggggatgtgtgggatgactgtgatgaagctggggacactgagcttgtaaactctgatgaaccttctttgccagaagaaacagcttccccatctccagcagcggcaacacccctccccaacccatgctgccatcagcctttccacctttgtctgaagagatataccctgtactgcctgaggcaatagtgatggccccccttgaacagttgccaggcaagataatgttgattcacctcaggagccacccccaacacccccgtttgcttctagacctataattagactaaagtccccacagacccctagaggtaaggttgagtgtgacccatggggaggcacactacactcgaaaagaactgcttgggttttctaatttatataagcagaaatctggagaacaggcatgggaatggataataagggtgtgggataatggtgaaaggaacatagcactgggtcaggctgaatttattgatttgggcctactaagtagggattctgcagttaatgttgcagcttggggagttaaaaaaggttctaataatttatttgcttggttagctgaaatatggattaaaagatggcccactgtgagcgagctggaaatgcctgatctcccttggtttgatgtagaggaggggatcaaaaggctcacagaaattgggatggtggagtggattagtcactttagatctactcatcccaactgggagggtgcagaagatatacctgtaaccaatgctttgtgaaatagatttgcgagggtagcacttgcatccttgaagagccctgtgattgctcttcactgtatgttagatctaacagtgggatcgatagtcactcaattacaaaatttaaatacaatgggaataattggatcctgaggtggcaggggccaagtggtggcactcaaacattaaaggcaaggtgtacgtaactactgtaatcgacagcaaaggcaaagcagcaatcagaatagtctgcctcatgtagagctctggcattggctaattaattatggtgttcctagaagcaaaattgataggaaagctactgcattcctacttaacttatataagcagaaaactttcaggtcgaa

SEQ ID NO: 93328 - DNA, 13394 bp, Homo sapiens
ggatatctgcctaaacaggtttttaatgcagacgaaagtgccctaatctggggggtgggggggtggaatgccacaaaggacatttattaggaagagaagcaagcaccaggatttaaggcaggaagaaacaggctaactgctgttttgtacaaatgcaatcgggtttatgatcaggactgcccttatctgtaaagctgctaaatcctgaaaggaaatgataaacatcagctcccagtcttctggttgtacaaggaggcctggacaatgatacccctttctctggattgcctgcattgatgttctgtccctgaagtcaaaaagtaccctgccagtgagaaattgccttttaaggttcttttgacattggacaatgcccctgatcacccagaacgtcatgagttcaacacggaaggcttagcagttgtctacttgcccccaaacacaatgtctctaattcagcctttacatcagggagtcataggaccttgaaggctcattacacacagttctctatagaaaggattgtcaatgctagaacaaaagcccaacaggacatgaaaggctggaaggggttggggtctggtggctcacgtctgtaatcccagcactttgggaggccgaggtgggaggatcacttgaggtcaggagttcaataccagcctgggcaacataacaagatcccatctctacaaaaaaattaaaaaattagctgggcatggtggttggtgcagccagtagtcctcactactcgggaggctgaggatggaggactgcctgagcccaggagtttggggctgtggtgagctgtcatcacaccactgcactccagcctggggaacagagcaagaccctgtctctcaaaaaaaaaaaaaaaagtctgaaagaattataccattgaagatgcaagccatcgttatagaaaaataaaagctgtgaaagtcaccaagtatgaaacaataattcctgcagaaaactgtgtccagatgttgtgcatgacttcacaggatttatgacagagccaatcaaagaaatcatgaaagagattgtggatagggcaaaaaaaaaaagatggcaggtgaacagttttgagatatggatgttggagaaattcaacaggtaatagagacaacaccagtggagttagcagaagatgacttgatgaagatgagtgcttctgaaccagtgccagatgatgcagaagaagacatacaagaagcaggactccaattattgaagtctgcttgtgacttcttttacaacttggacccttccacaatatgggcactgaaactaaagcaaatggtagaagaaggattggtactgtagagaaacatttttagagaaatgaaaaaaaatcagaccagaattatgatatattaatatttccatgaagtcacaccaagggtgcctgcctctcctgcctccccttccacctcctccacctcttctgcctctgtcacctgggagacagcaagaccaacccctcctcttactcctcagccaactcaatgtgaagacaagaatgaaggcctttatgacgactcacttccacttaatgaatgttaaatatattttctcttacttatggttttcttaataacattttcttttctctagcatactttattgtaagaacgcaatatataatacatataatttaggaaatatgtgttaatacactatgttatcrgtaaagtttccagtcaatagcaggctattagtagttaagttttgagggagtcaaagttaatggattatcaactacacaggggttagcactccaaacccctgcatcgttcaggggtgcactgtacttctactcgtagttgattctccagttctatgttccaccttctttattcagttattttattagtcctttctcagattgctataaagaactacctgagactgagtaatttatttaaaaaaaaaaaaagaggtttaattgactcatagttccacaggtgtacaggaagcataactgaggaggcctcaggaaacttacaatcatggcagaaggtgaagggcctcaggaaacttacaatcatgtctggagaaggaggaaaagagcaaacggagaggcgccatacacttttaaacatccatgtctcttgagaattcactcactatcatgagaacagcaaggggaaaatctaccactaagatccaatcatctgccaccaggtccctcctccaacactagggattacaatttgacatgagatttgggtggggacacaaaactaaaccatatcagttataatttccttaagagcagaaactttgcctttattttatttgtttgtctctacagcatcctaaattgtgattgttcaataaaggaaatggttagataatgctaccatttcaattcactcatcgaaaaaataattctatgaacgagattatccattttattgacaattaaatcccctgaagaagaagtctagaggactgctttgtttttgtttttgtgcagtctcaaaaatgctttgattgtgtttttgtgcagttttttgtttgtttttgtgcagtctcaaaagtgccaaatccacaaattgataaatttattttgttaatccaataatagactctaataagtgatatctttttgattcgctgattttgaagtaaaactccagttagtattttgatggtcacaaaacataatactttacctagatttgatcctgtctaaattctgatagtactgagaaaggacaaaggggaacaaaagaggtccttacctgagcagtatcacaatgcacctcaaaaatactgctggggccaggcgcggtggctcacgcctataatcccagcattttgggaggcagaggcgggtaaatcacttgaggtcaagagtttgagaccagcctggtcaacatggcaaaaccctgtctctactaaaaatacaaaaattagccgggcctggtggtgggcacctgtaatctcagctactcgggatgctgacgcaggaaaatcacttgaacccgggggatgaaggttgcagtgagccaagatcatgccacttcactccaacctgggtgaaagagcgaaactccatctcaaaaaaaaaaaaagaccaaaaatactgctggggaaaacaaagtcataaggtctatatctctgacccattaatattacagtaacaacatgtacctctgtgcagggtagatgaatgtcactgcagctttttctatcatcgcagaaatagtaaaacctagggccccaaagctatagtaattgcaaaacatgtcccaactctccagtggtgtgaatttatttaaatcttttgaaataaaattgtaaggaaaataaaagtccttaacatcgcactatatacactatgaagtgtaagtccttccatcatccactcaatgattgaatgcctagcagttctactttaaaaaaatgtctattctcgagggatctacttagaaagaaaggaatatgttaaacatttaaattgcaatgcaaataatatgagatcaagaagccagatatgttctgaggaaggatgaatctttgcagtctaaaattaggaaaatttcccctaaattgttgcatctctatgggactccgcatgcacaacgcacaactacaatgtaagtaaaatcacctccatctgggaagatagtttatatactgtcagttccttttgatctttgtcattctttttcgttttttgccttttttttttttttttgagacggagtcttgctctgtctcccctgctagagtgcagtggtgtgatctcagctcactgcaatctcctgggttcaagcggttctcctgcctcagcctcccaagtagctggaactacaggcacgtgccaccatgcctggctaatttttgtatttttagtagagacggggtttcatcatgttggtcaggctggtctcaaactcctgacctcagatgatccgcccatcttggcctcccaaagtgctgggattacaggcgtgagccaccatgcccagcctgatctttgtcaatcttctgaaacaggatagcaatcctacacatttatattttacattgtattttttgagatctatagaaatgttttcttatgaattttagtgaaagggccagttgaatcatgataattatatgatgaggaaaaaaacaagtaaagtaaggaattccacttttgtgaagacagagtagtagatgtaatttcccctattcctcctactaagtacaactaaaaacactggacattatatatacaacaaacataattatactctgaaaggtgaaaagaagaaggcaaactggctagggaacttgaggcccaaggaatgacataaaggtgagttccttgttttttgtttgtttgtttttgttttttgtttgttttgtttgtttgtttgtctcttatatcccagacttgaagctgaagctggcaacctggaaatgccaatggacatggacaaaaagaaaaagacccaataaatgcctctcttgccaaaagaccgagaaaggggcaggcttacaagacaaaaaaacatttagacaagaactattctactccaaccaatactacagaaaagtggtggccactccccaactgataccagcaaagactgagcggggagacaactcaaattctaatgaggctgtaattagtcaccaaacaccctactggggtgatgtcagagaagacaagtagggtgcaggacttttatccctgctagcctgtaatgagtcctccactcctatgataccagtggagaccatcagggaggtgtggtcttcacccctacccggcagtaacaagtgtttattggggtggtgtcagaggaggccaagcagagagttagtcatgtgtcagagtaggttttgtttctctcgtggcccagtggtgatgaggctgccccatcacagtgacagtgaagaccttgtagtaagccagacctctcacccctgcccaacaccagtagtagtcctcctctctggtgtcagtagagacctagtggggcatctgtacttacacctctacctggcaatggagtggtatcaggaaaagccagctaaaacaaaaggttcaaataagacccagagtctccaaacatttagaaatccagatttaaaaggaaatcacttatcaaaccaagaaccaagtaaactcacttgaataaaaaaggataatcaatagatgccaataataagattatagagataatagaattatctggccaagatttttttaaagcagccatgacaaaacagtttcaatgtaattgcaaacgttcttaaagcaaatgaagaaaatagaaagcctcagcaaataaatagaagtataaagaagaaccaagtggaaattttagaacttaaaaatagaataactgaaatgaaaagctcagtgaatgaacttgatagtggaatgaaggggacagaggaaacaatcagtaaactaggagatagaacaatctgatcaaaagagagaaaattgaacaaaaaatacagaacctcaaaaacttgtgagactatatataaaaaagatctagcatttgtgtcattagaatccctgaaaggctgaaaaaatacttgaagaaatattgactgaaaacttcccaaacttgacaatagatgaaaacctacaggttcagctgttaataggatcaacccaaagatatccacaccaaaacacatcatacttaaactgctgaaaaccagtgacactttatttatcagaagaaaaccattagaatgacagataattaatttatcatcagaaatcatggtgatcagaaggacatgtcataatatttttccattgctaaaagaaagaaactattaacggagaatcctatacttagcaaaaaaaataataattcaagaatgaaagggaaatcaaaacattctcagaggaaagaaagttaacggaatttaatacccacagacctactgtgaaagaatggctaagcaaaattctctaaatagaaaggagacaataaaaaagggaaccttggctagtttctaaggatcatgagcgagtcaggattcctgatccagagacaatggccctgatgggatggagcctgagggcatcatcgagagtaactggaatgagattgttgacagctttgatgacatgagcttctcggagtccctcctctgtggcacctatgcccatggttttgggaagccctctgacatccagcagtgagccattctaccttgaccaagggttatgatgtgatcgctcaagcccaatctgggactgcgaaaatggccacatttgccatattgattctgcagcagattgmattagatctaaaggccacccaggccttggtcctagcacctactcgagaattggcttagcagatacagaaggtgatcacggcactgggagactacatgggtgtctcctgtcatgcctgtattaggtgcatcaacatgtgtgctaaggtacagaaactgcagatggaagctccccatatcatcatgggtacccctggccgtgtgtctgacatgcttaactggagatatctgtctcctaaatacatcaagatgtttgtactggacgaagctgacgaaatgttaagccatagattcaaggaccagatctgtgacatattccaaatgctcaatagcaacacccaggtagttttgctgtcagctacaattccttctgatgtacttgaggtgaccaagaagttcatgagggaccccattcggattcttgtcaagaaggaagagttaaccctgaagggtatccaccaattatacatcaacgtggaacaaaaggagtggaagctggacacaactgtgtgacttgaatgaaaccctgaccatcacccaggcagtcatcttcatcaacacctgaaggaaggaggactggctaacccagaagatgcatgcccaagattttactgtctctgccatgcatggagatatggaccaaaaggaacgagayrtggtcatgagggagtatcgttctggctctagcagagttttgattaccactgacctgctgsccagaggcattgatgtgcagcagctttctttagtcatcaactacgaccytcccacgaacagggaaaactatatccacagaatcggtcgaggtggacagtttggccataaaggtgtggctattaacatggtggcagaagacaagaggactctttgagacattgagatcttctacaacacctccattgaggaaatgcccctcaatgttgctgacctcacctaaggggttgtcctgcttcccagccccagccagggttcagtctcgaggggctgaggagcagcaggggtggggagggaaggggagccaagggatggacatcttgtcattttttttctttgaataaatgtcactttttgaggcaaaagaaggaaacgtgaacattttagacacccttttctttggggtaggcccttgccccaggcaccagcccttctcccaaaaatcactaatccatttccccaatctagtaacctccagatcccagagagagcacactcctcacctcagctgacctcctttgaaagtgattcgagggactatgtcactcaacctcattttctggaccaaatctggagggagaacccctaaaactcctgagtaaggttgccaggggattgtccccaggtagggggaagcagggaacagaaaatggtagccatgtttacattgtgttgtatagcatttattgattcaggaaacaaatgcaaaattctaaataaaatgtcttagaaactgccaaaaaaccaaaaagggaaccttgaaacatcagggagaaagaaggcatatggtaaactaaaataaataaataaactttccttctccttttgagttttaaaaattgattgtggaagcaaaaattgtaacactgatgtagttttaaacgtatgcagaggacgtatattagattgttataaatgagggaaggtaaagggagaaaaacagatatgtttctatacttctctccaaccggtaaaataacaccagtaaaatgtgatgagttatgtataatgtaatacctagagaaatcacgaaaaagctatataaatagatatactcaaaaacactatgaataaacaaaaattgaattctaaaaattgttcatctaaccacaggatggcagaaaaagaaaacagaaatataaaacaaaacagaaggccagacatgatggcttatgtgtgtaatcccagcactttagaaggctgtggctggaggattgcttgagactaggagtttgagactagcctgatcaacatagtgacaccccatctcaataaaaataaataaataaataaaatagccaggcttggtggcatgcacctgtagccccagctacttgggaggctgaggcaagaagatgacttcagcccaggagttgaggtgcagtgagccatgattgcaccactgcactccagcttgggtgacagagtaagaccctatttcaaaaaaagaaaagacaaacaaaacccagacataaaacaagcaaaagtaatgacagatttaagccttaagcatatcaagaatatattacattaaatataactaatctaaattcaagtaaaagagattagcagagagtatttaaaaacatgacctaactctatgctgtctacaagaaactcactacaaatataagaatataagcaggttgaaagtataaaatggaaaaagatatcatacaaactttaatcaaaggaaagcaggagtggctattataatatcagataaaagactttatatcaaacaaattactagactcagagtgggatattatgtagtaaaaaagattcaatccaccaagaaaacatagaaatcaagtgtgcgtgtcccaaacaacagatctgcaaaatgcatgaggcaaaacggacacaagtgcaaggaaaaacagatgaattatagttggagatttcaatacttctctctcagacagttttacaggaaaattttaccaatcatttaaagaaaaagaattaacaccagttctacatactctcttccagaaaatagaacagataccaaaaaccagaacaagagaacaagaaaacaaaactacagaccagtatctctcatgaatacaggcatgaaaatccttaataaaatattatcaaagagaatttgggaatattttaaaagatttacccatcacgaccaagtgtgacttattatacatctgcaaagctagctcattatttgaaaaacaatcaacataattcattatattaacaggctgaggaagaaaattatatgattatatcagttgattcccacaaaaaccatttgacaaagttcaacatccattcacaataaaaccctcagaaaactagaaatagaggggaacttcctcaacttgataaaatgtaagcacataaaacctacataaaacattatacttaatggtgaaaaactgagtattttcctcttagggcaggaacaaggcaaggatgtctactcttaccacattcttattcaatatagtattggaagttttagtcaataaaggggaataaaagacatacagaccagaaaggaagaaataaaaactctgtatttgtagatcacatgattgtctacatagaaaattctaaggaacctatcaaaaaaaatccacctagaactaataagtgaattcattaaagtcacagaggctgggcacagtggctcatgcctgtaatcccaacactttgggaagccgaggcaggtggatcacctgaggtcgggagtttgagaccagcctgaccaacatggagaaaccccatctctactaacaatgcaaaattatccagttatggtggcacgcgcctgtaatccggaggctgaagcaggagaatcgcttgaaccccggaggcagaggttgcagtgagtcaagattgcgctattgcactgcaacctgggcaacaagagcgaaactctgtctcaaaaaataaaaaataaaaaaatgaagtcacagaatacaagataaacatacaaaaatttattgtatttatatatactagcaatgaacacatggacactgaaattatacatgcaatatcatttataatcaaccaaaaaaagaggaaataggtgtaaatcatgtatacacaaaactctacaatgctgataaagaaatcaaagaagatctaagtaaatggagagacatataccatattcctaaattggaagactcaacatagtaaagatgtcaattctcccaaaattgatgtacaggcttaatacaatttctatcaaaatctcagcaagaattttagtagatgtagacaagattattctaaaatttatatgaaaagataaaggaactagaataactacaacaattttgaaaaaggaggaagaatcaacctttttgacttcaaaacttattagatagctacagtaatcaagattgacactattggtggatagatagatacagatcaatcaacagaacagaatagagaacccagaaataggcccatatgaacatgcccaactgattttttaaaaacatttagtagagacaggatctctcaatgttgcctaggctggtctcaaactcccggcctcaagcaatcctcccaccttggcttcccaaaatgctgaaattacaagtgagctgctatacctggacccaactgattttcaatgaaggtacaattgcactttagtgaaggacacaatcttttgaacaattggtactgggaaaactggacatttataggcaaaaattgaataacctaagtctcacaccttacacaaaacttaactcaaaatgggtcatagcttaaatgtaaaatgtcagacttttggaaagaaaaacacaggagaaaatctttgggatctagaactagacaaagagatcttatactttatacctaagtcacaatcaataaaaggaaaaattaaattggacttcatcaaaattaaaacctcttgctctatgaaacaccctgttaagaggatgaaaagacaagttagagagtggaagaaaataccccaaatccacatatccaacaaagaactagtatcttaaatatattaagatatcttaaaactcaacagtaaaaaagtaaataaataaacaattcaatttaaaagtggtcaaaagtacgaagagatgtctaccaaagaaagatatacaggtaacaaataagcacatgaaaccatactcaacatcattagccattaccaaaacacaaattaataccacaatgagatatctactatacccctagcagaatggttaaaacaaaaaataatgacaatgataaatgctgacaaggatgcagagaaactagatgatgcatatattgccggtgggcatgtaaaatggtatggccactttggtaagtattttggcaatttctttaaaaacaacacatgcaactattacacgacccagcaattgtgctcttgtgcatttatctcaaagaaatgaagatttatgttcacacaaaaactttacataaatgtttatagcagctttactcataatagccacaaactggaaatatcccagaagtcctcctacagatgaatggttaaacaaactggagtgtatccgtaccatgctatactactcagcaaccaaaagggacaattattgatatactcaatagccttaattaatctccagattattatgctgagtggaaaaaaagcatacataccgtatgattctatttataaaacattattgaaaggacagatttatagaaatagagaatgaattaatgattagtgaaagtgttggagtaggaaagaagtggatgtggctataaagaagcagcaggagggatcctgtggtgatggaaatgtcctgtatcttaattgtatcagtgtaaatatcctggttttggtcttataccatagttttgcaggatgctaccactgggggaaactgggcaaagaacactgagatctttctgtataatttcttaaaattgcattttgtcattgttcaggctgctataacagaacactatatactggggtggcttaaacaacatacatttatttctcacatttctggaggttgggaagtccaaggtcaaggtgcccacagatccatggtctggtgaaggactcttcctcatttgcagtaagctgtgttctcatggtgctctaatttggcagagagggagagtgggttctctattataaggacactaatcctattcatgaaggctctactctcatgacctaattacctctcgaaggcccacctcctaatacaatcatattgggggttaggatttcaacataagaattttagagagacacaaacattcagtccataacccatgtaaatcttcaggtatctcaaaatgaaaactctaattttgttgttgttgttgttatttgtttgttgagatagagcctcactctgtcagccaggctggagtgcagtggcacgatctcagctcactgcagcctccacctcccaggctccagcgatcctcccacttcagcctcccgagtacctaggactacaggtgtgtgccaccaggcccggctaattttttttttttttttttttttttttagagaaggggttttgccatattgcccaggctggtctcaaactactggcttcaagcgatctgcccgccttggcctgccaaattgctgggattacaggtgtaagccaccatgcccagcctaaaaagtttaattttgaaaactaaaataggcatttaactttttcccccagtcctgttattactgttaccaccactaccagctactactgccacaactactggttttattattttttaaaaatgcacagatattcttttaatttaaaatgtaaaagttctggtctttttatagcataacagaacattggaagaggtcttgtgattccacaggcaatcttccggcatcacaaatggggagctatgaccccactgcaggataatcaataagctatgcatgcaaactagtgtctaacttgtcctttttaaaataaaaggagtattggccaggcgcagtggctcacacctgtaatcccagcactttgggaggccgaggcgggtggatcacctgatatcaggagttcaaaaccagccttgaccaacatggtgaaaccccatctctactaaaaataaaaaaattagctgcgcattgtggcatctgcctgtaatcccagctaatagggagactgaggcagaagaatcgcttgaacctgggagacggaggttgcagtgagccgagattgcgcaattgcactccagcctgggcaacagagggaaactccgtctcaaaaaaaaataaataaataaaaataaaataaaagaagcattagaagaacctatcaaatacaagccctaatcagaagaggacagattatcataccactccagatgtaggtaggatgagatttgggcccactaatgttttcaactatggttacttttctcttccc

SEQ ID NO: 93329 - DNA, 23009 bp, Homo sapiens
acttagcgaaaactggtttgttttaaataaaaacttctactaaatataatttcaactttctacttcctcccaaccttgggagcagtggggccaattgctaacccctcccttgcttgtcctccctgggagggcatccctgatccttccagcagagcagctggccactcacaggtcaagggccaccaaaaaagtgctcctcaggagaagatgcacagcctcagctgggtctaggctacctctataatctcaacagcaagtgtccaatgtggctttccatgccattcccttcatgtatcactaaactgctgagatggcttgtgttcataactttcacatcatactattcaaagtgcagcacttacccttcctaagccagatcctgccaatgctctctgtgcatgtgaaaggacacacctgcttcccaggggctggtacgaaagcagctttctattggcgtgactgctttagaaattataaggcaagatggagcataaagaaactgtgcttagggaaaaaggaagcacaaattggtaggcaacgaaggttcctaccctaaaggccaggaggaactgtgcgcgggcatgtttcttccctatctggcgatcttcaaagcttccctggtcttatggagaagttccataaatgaaatctgttttttctgctatctagactataacaatggagagtgttaggcacagctttagggtcccctggtgaatgaaagtgagatttcacatgtgcaaaattattctctattttctaactattgtcaattctaaaagcaagtgtatttacctttgaggtctgatctttactgccatcatcaactactatcacttcataagtgaacgcaggatctcgtttctgcaagaaacaaaaataaagtaatacaatttggcataactgccataaagtattctaatcaaatcaccagtaatttaaaaaacaactgctttagtgttgatacatataaatttgaatataaatattagtgcacaaaccgcataaaataaaaaggctaagtaaaaagagagagagagatcctgggtagaggtggagagtgaatattgactcaatctctccatgtcaccttgctgttccccagtctgccctgtaccttggtggtggaagaagccaggtacttgtggtgctatagcacatttgagagggtacaggtgtgtaagaaaaaagctcctgaggtttgaagtcagagagggcagattccagcttggctgcagcatttcttagcctaatgaccttgggcaacttaactttttgggcctattttctgattaaaaaaagagaacagaaaaacctactctatgtggctggtgtgaagattacacgtaattgaagaggtagaagcctcatacatattaaaggctcaattcctttcttcttttctctaaattgaatgtttgaagttggtaataaggtaatacagccctttctctttcagtgaatcttctatttcccctttatacaaaaaatctaaaagcaaagtaaatcaaaacaatttttttttaaaaagaactcacttaattcttaatccctccaaggggattccaatggcagctaatgttacaaaagaaggttgtgtattacttctcttctccttatgtagggaaaacaggaagaaaatgtgaggggagactcttgagaatattgaagaaatacaaaataatttcaatgtaagtgtgtcttttaaaaatatcttttttctgttcattcagacttagtttttctgtttattcaaacccagttaaccaaaaaataaaaaaagagagaagagaataaaagttaacagcaaaaacagcaacaatacaccttttcttacaagtcacaaaagtaaaaacagcattgtggcatcatacaaagtctgcagacatacactgtcactcaattttaaatatatcatcaagcaagacaggattaaaatgggtaggagggtacagaaacagaaattttcgcttcctggtttgtcctgggtcaacgacctgcctctggaggtagcatgctacgtgccgggcttatggatagcaacaagcaagcagcaggtggcccagcgatcggggtgctgccaggactgcctctcacagtgcatctggyttggggtccacaattggtgacctggtctagttttaattggagatatcatattaaaagagaaaacatgatacctgtctcttctctagatagctcagagcttcatccatcatcacaggcacttgaagaaaaaaatatattaaaaatcrcttttgaaaatgattttccaagcccggcacattcagcttacatacagaaaaaagtcccaataatctaacaagcccctctggtactttcccaatggtcattcccatctgaaatcctgccttctgtccacaatgtgcttattacctctctagaacattccagtcccgctgcctcatgatgctgctcctattcatgagagcaaatattcacttccctctctgccgaactacaacaattatcaactgtgtgctcaacacagcccacatctattaatgttttggcaaagacagtgaagtcaaatactttaaatttccttttcttttccaaactaccctttaccaaaaaaatcaaaacagggcttacaccgtttttcttcattgtatgaaggcacaacgacagaaagttgtttggtaggtgagtcccatatgctgggtaaagtttctttctggcctttggcatttaagaagaatttctcttcttcatgtcgatggagtgctggcatttttgtagcagttgtaaatgcaacgatggaaatctaaaagcagacatacatgtcttttacaaaacagaaattatgttttgctgacttttctgtatttatgttagaatacatcatctacttttcttttagttgaatactcactctcaggttttagttcattaacaatggtctagaggtgactccaaaattagacaatagtgagtcccctacttatgaacgaattactgtccttttttccatcagtaaggtgctgatgccttaggaggctctgtctcttcccagtcatcattcgccaggcctccaccatcccagctacaataaaggtcagtcactacaggaagaccagtctactctcaggtgccctaaaaccctgatccttagcgtgtctacatgcatagagacacacacacatatagtaaggtcctatcgctacttggaatctatatgtgacaggacaagtccattttgcagttggaacatgtggggtgagggcacactttccatccaggaccagacagacccaagatataaaaggaagattccccagactaccaagtagggaccaacaatgtttaagaatatgtttttgacacttaactcgaatttgaattcagaatacagcatttactgaagtatctaacttacaggctcccttccatatgcacttgggagctaagctttggaaataaccattgtttttacattgtttctattggtacactttctgctttcaaaacagtctttaaatttttggaatgctattcatttgtaatttaatgatcaatttgaagacattatcaaattgtcattgtcatcagctcctgaggtttgatctttgaggtctgatctttactgccatcatcaactactatcacttcagagattataagattataatcaaagattatcaaagattataagggctgtgctgaaaggacaaagtagtcaacctgaatgggctctcagtggcctatgatgcaagaatctgatcgtcctcccacttcccccctgccaaaaaaaattactgcaatggatcaaaccatgaaaaatactgtaaatcataaatttgcaatgatactaaagacaaaaactgggtaagatgcaggaaggatctcatttcaaaaatttgccttttgcgttttatatgtatgaaaggtattttagggtaaatgaatagctgaggatgagatttctttcattacaaaactctaggtaataaatgaaggatacaatgagaatatttcactttgcaacccgcaatgaaataaagcatttaggtaatgatcctcaatgactactaaaaccattaggctgatgacaaactttataaactggtgggtctggctggcaacatttgaaaccacagatccatcttaacaccagagacaaatggccattacatgactcctgatgagacacaagagaaaggaagaagcatcactcacaattttttcttgattaaaaaacacatcgagtatgtatctgatcaggtctctccatcctaactaccagtttatagaaaatttgagatagaagatgttaaaaggcattaaggggatgcaatcaaagaaatccaaattgtgagaagttctacaggacaaatgatcatattaaagacaaggaaaaaggccgggcgcggtggctcatgtctgtaatcccagaagtttgggaggccgaggagggtggatcacctgagttcaggagttcgagaccagcctggccaacatggcgaaaccccatctctattaaaagtacaaaaattaaccgggagtggtggtaggcgcctgtaatcccagctactcaggaggctgaggcaggagaattgcttgagggcagaggttgcagtgagccaagatcacaccactgcactccagcctgggtgacaagagccagactctgtctcaaaaaaaaaaaaaaaaaaaagacaaggaaaagaaaaaaagggggaggagaaactgtcaactgattaagagactcaagacatcaacagagtacaatgtgtggcacttgtttggatcctgattggaacaaacagacatatatactgagacatatatgagacaagtgagggcaagtgaactgagggggcatttgaaatcacagaataaatttaaatctgtgaccactttattgtggtattttaaaaagaaggaccttatctgttagaaataaatgctgaggatttaaagataaaatgtcttcgagttgttttaaaataattcagaaaggaggtgagactgtgagtaatggagagtggatacatatgaagacaggatgaggttttgaaaaattatttttttaatgatttcttgctctggcatttaaaaaacctaagtttcactagttgtgcaacatttgagtacacgagctcatttctccaacatgtttcctcaccagtaaaataatgctaatgataacatatatgtcacagtgttaaagatttaataactcctattaaaccaagtgcaacacaacatatagtaagtactacaatcaataaatggtagctcttatcacttcaagctagtgggaacaaataccgtcagtacaatcccataaaatctgtgcaaaagacccaaagtaaggcagcttcaatctaagaatgtgtgaatccactccccgcccgcaccccgccaaaaatcaatcaatcaatcaatcaatcctggtttgctcaaaaacttgaaaaaacaaaaaagccctaaaccctgaaatctctactagttagggcaagagaggactcctctctcacccagatactatcaacaaagaagtaaggatgcattacattttatctaaactgtaaatttatacaacctctggaaagatggcagagtggccttcctggcagtgctgtctaggtggctaatctgaatgtcaaggaagctgaaatcctctccacttactaactagagggcaggctcattccaaggtgtgcgggagagagttcgccaattttctaccacttaacaatcagcaagtgtttacaatgtttttgtgtttcgagagcaagggcaaagacaatcgagtttgcattctatcgtcctgccttgtttaggggcagtatatttagggtgcttaattctgggacacaatgcgaccccggacaaggcgcctgaggcctgtctctctcgctcaccctgcgtccctagtgggtctcatcgatccacgcatttattcccatttgtaacagatggctgccgtcaaggctccgtcacccctatttgcttaaccacatcagccaagggrgcaggctagggagcacaccccttctgggggctcgagacctccctgggtggagcagaactgcagcggctgcaggtcccggagagtctgggagaggtcgaggttgacagaggaggtgggtagggggcgcgggcgccaggggcgatggaagcggcgatgatgccaggccgggtgggtgcgctccagtgtgaaaaaacttacaagtctctgagcacacaaagagataagattccaagggaaaattaaagaaccgaagaaaaggagagtgaaactmcaggaaactccgaggtcaggaatttgggggaatctaggggaaaagggacttctccgagaactggtagcgcggaggaggggacgcctgaggagccgcagtctccaggagagcggtaagccccggcctgcgcgggttcccatccctgttctcaccagtacgagggctgcggccgccagcgccgcgccgagcaccgccagctgcaacagaagcggagccattctccatgccgtggcagcccgcccaatcccgcacctccacacaggcggaagcgcgcccgcgcgacccggccccgccgccagagaggtcgcgcccgctggccgcagcgcccccgcgtggcgaggcggagaaaacgccgctctcgtgccctcggcgcccagtcggtggagaggagcgctaggttccacascggggcgccaggtttatcaagtatgcaagacgtctacttaatttgaatttcagattaaaaaactaatcatgtttttaacagccttattaagatagccacataccatacgactcatccagttacaggtttctggtttattacattagtttttataaactgtggtaaaataaaaagttgccattttaatcattttaagtttacaatagtgagtggcattaattacatacatactgtgcaaccatcaccactatctatctgtaaagccttcccagctccctccaggttctggcaacaactaattgcatgctctatttggggcatactcatgctttaaaaaaaaaaaaaacccacaaaaaaacaaaaacaaaaaacaaaaaaaccacgctgtgtttatcagacattcaaatttaacgtggtatcctgtattttatctggtaaccccacctaggagggagatggcagccttgagcacgacacagtctacaacacaaggtgatgctkaggagccctcagctccgggacctgcagagcagaacgtggtgcggacaatgagcgcacagaaagttcaggtttctcggccgagcgccgtggctcacgcctgtaatcccagcactttgggaggacgaggcgggcggatcacaaggtcaggagatcgagaccatcctggctaacacggtgaaaccccgtctgtactaaaaatacaaaaaattagcggggcgcggtggcgggcgtctgtagttccagctactcgggaggctgaggcaggagaatggcgtgaacccgggaggcggagcttgcagtgagccgagatcgcgccactgcactccagcctggacgacagagcgagactctgyctcaaaaaaaaaaaaaaaaaaagttcaggtttctcatgtgttggagcacggagcccttgaccagtgaagaggcaaggccagggctgagcctaagtcacaggcagaaaaaagacgcagaaacattggaataacgctccacacgcactgcttgattctgcgctagaaaccctgttatctccgaactgttggtgttattctgagtyacagcaccagctcttttataaagaggragaccygctccttctttaacagcagattcgtcaaaatacgtccaaggcaaggaaacctagaaaggcgtctgggcaggggaaagtcgatgcgagggcgggccagggacctttcgtcgcgtccccaccttggcatttcccgtggcgtgagcggccccggcatccgtgtcgaaagtgcggcggcggaacaggcgcgcaggagaggagcggcgcaggcgcagacgcgcgggcgggaagatggcggctgggttcaagtgagtgttggcgggtggcgggtagagttctgtaccctggcggacggcagcttcctttaactcttagctgggattctctcacctggaggccgaccccgttggggtgccatttccttcctcgtcgaggcagacgatgggcgggaggacctggaggttgtcacagtgaaaagaaagggcttcttcctcagtgagacgggagatgaaaggactctgtagagttccatacccgctgcgagcgctcgtgagcgtggtgtgtagtgaacgtgcagtcccaggagacatagttgtaatcttttaaagattgtggccgggcgcggcggttcacgcctgtaatcccagcactttggaggacgaggcgggcggatcacctgacgtcaggagttcgagaccagcctggtgtacatggtgaaacactgtctctaataaaaatataaaaattagccgggcgtggtggcgggcgcctgtagtcccagctactcaggaggctgaggcaggagaatcgcttgaacccgggaggcagaggttgtagtgagccgagatcgcgccactgcactccagcctgggcgacagagtgagactctgtcagaatcaatcaatcaagattgttgcatcagaaccacataccgcctgcttctccctctcccgtaatttatttctaaaaggatcatgcctcgtttggaaggtttttgtgtgtgtgaagccagtggactttcttaaagtttttaaaaaatggataaaataaataggattccaaaggaaatccattatgttgaaatagttatctatgagtataaactccgaagacacgatatagtagtatatatacttggtttaaaattaaccttcgtaaacaagatctagtggcgagactagtagtaactcctgggatttcaaagtaacggtgagcctgaacataccttacacagctaaagggtgcaaacgaaaacatctgtggtctccgtggttgttaaagttgcaggtactgctaatgttactatggcttattgcttacagtcataattgaagaatatgctaaatttcacttacagtgaaaataaagatgtacctttttgtttcctgagttatctagtaagaggttaactattcatgatcactagattattaaaataatcttttttcatgatcactagatcactctgaatccttgtttcagagcaagaacgacatgattcttttgacacagattgagcttttaaagagctcactcaaagggcttttagacgccaatcttctaatcgtttatggcagagttaaggacagcaattgaatgtgattgctactacaaggatttttactttctagaattacttttagttaaaaagttgtggagatttatgctgcatcaccacacttaagatctttgccaatttctggatttatgttaagattcatcagtttatctcagatatatttttaacacgtgtttcagaaccgtggaacctctggagtattacaggagatttctggtgagtaaaggttatgtacatgttatgcgttttgataacgagctgcttttaaagatgaatttcaagtaatttaaattaatccatttgaagtaacatttaatgtgtgtgtaaaacttgtgatagatgtgtaaaatatgtaataggtataatcyatttttatataaacatatttatttagaaagagaactgccgtcctgatggaagagaacttggtgaattcagaaccacaactgtcaacatcggtaaggwtgtattttccactttcaactgtatgatattcccaagttttagtctatgaaccagccaaacagtttttcacccaaattctttgtctaaaggatttgatgattttttttgtcaagagatttttatccgtacaaaagccctgtaactaaatgaaaaatgattaacacaaattcaaggacaggtgaataattatttaaacactaatttaaaatagttatgtaaaaatcaattattctaacttgaaatattcataagcaactgagaggggtagcaagataatcgtacacagcaaactaaaacacttaattttaattattatgtggataattttgtagctgttttccttttatgaacctttcattttgcttatcttttcaggttcaattagtaccgcagatggttctgctttagtgaagttgggaaatactacagtaatctgtggagttaaagcagtaagtctaaatatgtcctattgagatttgagttacaaagttagctttatttattagattgtaatatacacctgtaattctactcttgatttggtagttgggtgtcaatttttaatgtttaatttcccaagagctttcactatgagtgttagataatatgacccaagtttaatgactaagtgaacaattgtcaaatgtagcaaaatgaaacaacttttaaaatctgagtcaccattttaaaaaaattgttatatcatttgagacattaacagatttttggtgacatccttttagccagtgatgacatgtaatctgtgtaaatgtgtagaaaattgaaattgttgaaaagaaaaatttgagggaatactggctaccatttactgagtacttgctatgttccagacacctttttaggtgctttacagaattatccactttaatgcctataacaatcatttgttacttgtcttcacctcctgttttacagatgactttcagtaacctgtccaggtacataagactcataagtaaaacttagacataaatctgactccaaagcctgtgcttctttgactacagtmtaccctgtgttatttaacctcagttgagattcttctttcgtaaacctggagtgatgtataacagtaagatttgagaacttgctccttgtcaggttttatgcctgggatttaacaggtctatctcatttggcccttattaacagtccctaggagtagacactattttcttcccatttgacaagatgaggagtttaaggtaagaggttaaataacttgcctgaagtctctcagccagtaagtatggctctgacatttgaactggcttagtaattgcagagcatttgcttttttttttttttttgagacggagtcttgctctgtcgcccaggctggagtgcagtggcacgatgtcagctcactgcaacttccgtctcctgggttgaagtgattctcctgcctcggcctcccaagtagctgggattacaggcgcccgccaccatgcctggctaatttttgtatttttagtagagacggggttttgccatcttggccaggctggtctcaaactcctgacctcaggtgatccgcccgcctctgtgtcccaaagtgctgggattaccggtgtgagccaccgcgcccagctgagcttttgctctttaccactaaagcagcagttcctaaatcttgctctatcatctggagaacaaattaagattcttggctagtagttgggggcacaaacccagttactattttttaaaagatctccaggtaatcttgccgagcagcactgtagtgtagtccactgtactgtagtgccttcttatcttgtagagctattgtgaggatcagcaccaatgtccgtagaggccctgacacaattccctaagctgatatttgatagagccttccataactgattgctaaattgtcttcataatttttcagtagcttctttcaataggaaacatttctttgctactataggaatttgcagcaccatcaacagatgcccctgataaaggatacgttggtaagttaaatggttttgtaattttaatacaaatacttttaacacatttaataatttttagttaagtcctagttaagttgatgtaaagaaaattattcctaatattcggaaatatttatgaataaaacaaattcctcaaaagttttccgtgtgttagtaaaagatagcataatagcaggatatagaatttcataaatttaacctttatcaaacttgtttgctcaatttttgtttatacattcataagttactaaccaagaaaatagaattttggctgggtgtggtgactcacacctataataccaggattttgggaggccaagacagcaggatcgcttcagcccagcagttcaagaccagcctgggaaacaaaggagaccccgtatctacaaaaaaaatcaagttagctgggtgtgccagtgcacacctgtgtcccagctacttgggaggctgaagcaggaggattgcttgagcctgggaggttgaggctacaatgaactataattgtgtcactgcattcaagcctgagtgacagagtgaaaccctgtttcaaaagaaaaaaaaaatagaatggaattttttttagtcaaagaactgtcattgcacaccttttgtttccataaagattctttgctttatacaactgctatttttttcttgccttggaaccatctgttctttatggtaggaaccaacattttttttaaatgagaaaaacagttggatgttagcagaggggctatatatacttcagttacagattgaggtattttgaaagatatcaggaaaactcgtaaaggatttagaattgaggtctaaaatagattttttaaaaaggcatatgggggaaaaatgtcagaaaaatagaaatttcatggctgggagtcttagagagaccaaacagaatataactataatgttacaatgtattctactcagaagagcctgtccatggccacagttgcctttactgtggattgataatacctttaacacttcagtaatccataaattgaaaagtttaggccgggcatggtggctcacacctgtaacctcagcactttgcgaggctgaggcgggcggatcacgaggtcaggcgatcgagaccatcttggccaatatggtaaaaccctgtctactaaaatacaaaaaattagccgggcgtggtggcgtgtgcytgtaatctcagctacttgggaggctgaggcaaggaaatctcttgaacctgggaggtagaggttgcagtaagctgagatcgcaccaatgcactccagcctggcaacagagcaagactccatctcaaaaaaaaaaaaaaaaaaaaaaaaggtttagttcatagctgcagagtgtttctttcagttcctaatgtggatctaccacccctgtgttcatcgagattccggtctggacctcctggagaagaggcccaagtggctagccarttcattgcagatgtcattgaaaagtaagagcaccatgataaaattttattacaattcattttcagatagttttgggcttttcatttactttgctctttgtcattaaatcaagttcacagataattcagaaagaggacttatgcatttctccaggaaaggtaagaggaatagagaagctataagttcttattaattctgaagggattttttttttgtgggggaaagtgaacaaggaaattaaaaccaccaatcaaagtagctttaaatatggatgtcttacagattttagagattcagtaatttcttactctataattctctaaatgaaccatattgtttataaaaaaacaagtttgactaacttactgcctgtctgggagctaccttttaaactgaagtaatttttttcccccttaacttttaaagttcaatcattttttattccttatagcagattataacattaatcatgttaacatatgtttatggtgaatccacacagtagattccaaagtctatttgaaaatgtaaaactaggttgattagaacctagagaggctttcctactagatcatataaactgatacattagcactgtaaaacttaaacatttcatgtattatgagaaagtgcattttgaattttagctagggctttcaaaaccatctcccttatctgtaacctcccaatgagaatggaaattccttctacatctgtagctccattaagggaaatggacatgtttgtcatttgtcagcctggcaatcaaaagccagctttcacaaaacctgtccactttcttctggttttctatagaactttaaaaaggtgaagcattttcttaaggtttttgagccttgaaagttatcttgcttgtttaaccaagggttctgtggttcttaagtctaagckaatagcatgttctacccattagaagactttaatttccttttgtgtttaattctattttagcttgtctgggttctatactgtgatctcatttgcctcgactacgatggaaacattttggatgcctgcacatttgctttgctagcggctttaaaaaatggtaagcagccttacaaaaaaggcaatattcccactcatgggttagaatgttgttttgtgaaacttttaatgtacatttgctttcgtatgcttccaaattaatgaatgtaatgctgacatgactttccaaatatagttgatagttgtatattctctaactgaatgctctttagagtgctgctttgactgtacccatctacttaagttaggacttcagtcctttccaaaatagtgttaatattggtgggagaaggagacaagagttgtaacttctggctaggtgattggtgaagatctgccagtatcctcatagttctttatgtgatattgccaaaagaagtagaatggattctgttgtttttactgtgaggccatagtaatagggaagtttcttagcaaggagtctaggttgactgattagttacagatttcaataacttgtgcatattccctatcattgatgaatgatgaattggtaggaacaaataattggaggtggaatataaagttagcacagcaatattatagtagagtggttaagtgaattggaggtagaaaatgaagtcagcaaaatattataatagactggttaaagtagattcctggctctctcactctgtgctgaagtttccttatctataataaaatagggataatagtacttactttgtaagagtattgattaggtgaatacaatgaaaatatgaaaatgcttaaaacagtacctggcagatataaatttaaaaaaaaatcattgacttcttaaacttaaaaaaaaattatgcaataagcactaggtaggaatgtcagatgttgtgaaaagcaatgtatatcctctatatttaccttagtggctgtaaggtgctttttaaaaagaaatgttctgggcaagttaaatagagggaaaggtgaattaaaaaaaaaaaagcttagaaatcatttgtttcttagagacttacttactttacaaatttgccttttcttagtacagttgcctgaagttactataaatgaagaaactgctttagcagaagttaatttaaagaagaaaagttatttgaatattagaactcatccagttgcaacttcctttgctgtgtttgatgagtaagttaatcaaacttactttaaaattttctatatttaagattagggtaattgatgttcagcattctaactctttaggaagtgctatggtgaccctacatcctagttttccctggacacttgagtttctacttgtccctgcacaattatttctagtcactgcacaattattacctgttccttggtttacttatacctgtgtaatgttaatttccaattctttcactataagatttatctgaagctatcttcaatattttccaaggattttagcacgttcagaaatagaagagcagggccgggcatggtggctcatgcctgtaatcccagcactttgggaggctgaggcaggggatcacctgaggtcaagaattcaagaccagcctggccaacatgttgaaaccctgtctctactaaaaacacaaaaattagctgggtgtgatggcgtgtgcctgttaattccagctacttgggaggctgatagtatgtttagtattttaaagtaaaatttgttccatggattgataacttatatttttttctttttatagcactttgcttatagttgaccctactggagaggaggaacatctggcaacaggaaccttaacaatagtaatggatgaggaaggcaaactctgttgtcttcacaaaccaggcatgttcccgccacttcagtcctaaacatatgtagatgaaaactcagtgtgagccttaaattagggagggccaaatagaatatgggatattttatttacctaattttagtatagtttcttagctacctaaaatgttcttccatcttaatggtatatgtcagtggttcttaaacttaagacatacattagaatcacttggaggtcttgtgaaactaacttgtagatcttgagactgtaccctgatttacattatccaatttttttgttttataatttgacatgacattaatgttttttgaaaaggaatgataactgagattaaaagtattggcaaaataatttttcaggtggaagtgggctaactggagctaaacttcaggactgtatgagccgagcagttacaagacacaaagaagttaaaaaactgatggatgaagtaattaagastatgaaacccaaataaacagccaccacattttcaaaacagatttgtaaaaattgtatttgttaacactgtgcacaaacgttttatactaaataaatatcaaactacattcttctgaaagatgtttctattatttcttaggtcrcttccatatatattatgtatagtgaaaccatttttaaaaagcaatgacttaggcaaaccaaccctagtttgttaaaccatttccctgtttttatttaaaaatgataaggttgtgcttctgtataaagtttgtacatctagcaatgtaaaatactgacacattaaaaaaaacaaaaagtagaaactcaattcttttgattcagtgctcttgtgtttttaaaaaaggaacaaaaagtaatgcaagactcaaaattttggagtggttggcrtgcctctcttcattttactttttgactggctgcctgtatgccgatgatgatgtagctgagctgtttgtgctgctgctgctgccatagccatttgatgctgcaagaatcgcaactgctgcaaaagggagggaaaaaaatcgagttatgttaaatgcaggcaggtgtagaaaggtgcttttcctgagtgacgaaacaacacaactgaaaaagggagaaagcaccaagataacaaaaagggactataccacattgagacaatgcacagtcaaacagcaccagtggcacagaagcctgctaagggctttaaaaatgattcttggcaaacttcaaaattatttgttactttgccctgccagtctatattgtagtaactcagcaacttcagttaccattttgttgtataatgatggtttatagcaatataaaacaaccctgaatatcaagatagtcaactataatatgctgactttccttcctaaaattatggtataacatttttctaaataaacaggtatgacatttactaataggaacacttttctgcagtaaaatattagaaagttaacaattggcacttacaactgtctttcaaaatatactgcatactagaaaaatgtatgttaatgtgccaccagcacttcatgaaaaattttatagagtatggcttaaatatacaaaatatattcagtgctccaagttgactggctaaaatgtcagactttaaaatttgctaaattatttaccaattactgtacagtcttaaaagacagtaaaataaaactaaagcaagttattttgaggtacttttggagctgagtatctttaaaaatgtaatcagagtgaagttgctggattacttgtatctgttgctgctgctgttgaaaggcagaggagagctggaatctctgctgaggaaggctttgctcaggtctgttctcggcagagccaagctgagacaacactacagagaggagaaggggaaagcaggccagtcaaaaagtttgaaagctaccagggttagaaaaggacaacatagaaaatgaaataatagaaaagttagcagtatgattaatcttaagtatcaaatcatagacatttcagaataaatttagtatatggtctcctgttagttgggggtaccactgataatggaactttctggacacaaaaagagaagggagtgcattatgtatcaaagcactgaacctctcttctcttgcatctgtataaaatttgatattgatgctattttgtttagaagagtatattatttttgaaataaaaccaacaaagtaggagaagggagatggaagaaatccaaactattgtaacaacaaagctggtagacagacaattgctttaaacaaaagatgctgcaatgaatatcagactactctactaacaataaaggtggtgaactgagactaagcattgtttgttatttttttagctgaatgggaccacagtaatcagttcaacactcattttacatatggggaagtttgaaggccaacatgatttaagtgactcagactcaaagttaagtatggcagtctgtggctaagaacattctcatgatttttttcagactagagttgtttccactaaattatactacagctattttcggaaattcacaattggtctgataaaggtatatgattatataaacttctatttggaaattcactacctctaaattggaactttatatgtaaggataactgacttccaaaataaagattatcattctaaaagacttctaaaggcatcatagtaagcccacagtgataagatgctgacaacacagtcactcattcaatcctcaaactcttatcatagttttcttatacatatggcttactcttttaattaagtgtgaagttagaattatcgtcttcaactgacaggaagttagaattatcgtcttcaactgacaggaagttagaattatcgtcttcaactgacaggataatcattaagagtaatctttagttcaccatttactgctggaagtgttgagaagtaatttaatctttttttttaaatgataaaagtgacttacagaagttatgctattgaccattaagacttaagtcatttatgcaactacaagttaccagaacgagacaaaagattatgcaatctagaaaaattcagtcttaacccaggaaaacaaaaaagttattaattaagataactattggcaaacactgaaaacagctctggtaacctagtaaagtggataattattttgccagtaaactgtaacaaggaaacacaactgtggtaattatgttaagtcaaagctcttaatccactatcaatgaaaaaaaatctcagccatcaatcaatttaatagtttacacattatagctttactttttcctgtttactggttgcaagggaaggaaaagaaaataatttaagcggtgagatcccaaatagattagatatgtttagtaaattcagcatataaagttatgaagatacctaccagctgcctgtgactgcataaaacttcctactccagtaaggttaataacagcagcttgctgagcagataaggcctgttcttgactggttgaaccttgctcagaaccctgaataaaaaaataataaatgacttgtacaagaaagaaaaacaaatttgagctggtgaaaagaaatcagtattttttcctatatgaaagaaagcagtattagactagtcttgtaaaaagaataacaaggaaaatacttcaaaggtatttagaataagcaagaataaatttatggtatttgaacaaagaaaacttcatttttcagtgcatctgtatttattgtttaatgctacctagataacgcctaaggcttttataaagcttcactgaaacaattttttaaagcttaaaacaccctttgtaacataaacatagtgctggaacttttagtcagcagactaagtcaagaaaaggaaataaaaggtatatagattttataggaaaaaataaaattgtccttattttcaaatggcacaactgtctatatggtagaaaaccctaagcaatctccaaaacagctcctagaagtagtaagtccagtaagagggcacaaaacaagaccaatatacaaaaatcaacactatatatactagtaatgaacatgtgaaaactgaaataaaaaaaataccattcacaattactcaaaaaaaaagagaaaagcttaggtattaatcttaagtctaagaaaacatatacagggcttgtataccaaaaactacaaaacattgactttggtctagataaggacatatactatgttcatgtactggaagactcacatcataaagatggcagttcttcccccaaactgatcaacaagtttaactcaattcttttagaaatgctggcaaggtttttgtagatatagacaagatgactttaaaatgtatatggaaaggtagagaacctacattagctacaacaattttgaaaaatggtatgggagaaaacactgcccaattttaagacactacaatgaacaagacagtgtggtattggctgaaggagagacacatagattaatgaaacagaacagggaacctagaaatagacccactcaaatagacccaactgacttttaacaaatgtgcagaagtaattcaattcagaaagaatagctgttttttttctttgttgttgttttcttttttttcaacaaatggtattgaaacaattggatactgataggaaaacaaaaacaaacaaaaacaaaacacggacctaagttgcacatcttgtacaaaaattaactgaaaatggatcatggattcaaaataagaaactataaaactgttagaaaaaaaacacaggagaaaatctttgggacctagagctaggtaaagagttccgagacatgaaaactagaggatattccataaagaaaagatactgttaacttggacttcagcaaaattaaaaacttttgctctgcaaaagacatcctttggtaccacctaaaatagtgtctgaagtaacatttcagtatataattgcaagccaaacatttcaaaagttacatttatcttgaggggatctccctggatataaaagattggacaaaagagcacagagctgaaaggaggacacattattgaatttggaacccagttcatgaaatgaacaacagaataaggcagaccacatcaccaccataacggagctatgataaaacaaacaaaaaaactcaaaatgcaaaaaaactacaggtgatatcaatttccccccaaagcactccacaaacctaatgtagactataagccaccaccacaaatggaatattcaaacaaggaggaataatgattaaacaaacatcttgaagaagaaaacaaatactaagaaataaaaggactcaggctaaaactaaaaggatgaaaaaagacgtactaagctaacgttaatcaaaagaaagaaacaagaaatattaccagagataaagaaggtcatttattaatgataaggggtaaattaatcaaggaaataacaatcctaaatgtatatgcacctaacaatatgggctcaaaaaacaacctttagcaaaaggaaaaatagaaattttcagttttggttgaagacttcaacacttctctcagtaactgataaaacatacagaaagaaaaggatatagaagacctgaatgatgccatcaaataccttgatctaatatggaacactcctaacagcagaatatacattttttcagccatatatggagtattcatcaagacagatcacgttctcaagcattaaacaaacctcaacaaacttaaaagaaccaaaaatatgttttcagatcacagtggatttaaactagaaatcaactgcagaaagatatttggaaaattcccaagtatttggaaatcaaacatatctaaataactgatttaagaggaatccataagaaaattctgtggaacaaaatgaaggcacagcatatcaaaatttgtggaaagtggcttaagcagtactgagaaggaaatgtataacattaattgtttattttagaaaagaatgacctcaacacaataatctaagcttccacttacgaaactacaaactatcatccaagaaaacattccagaaataaagaagtgactctacacattaaaaggatccacaggaaaaacatggaaaaatcaattctgacacacacaccagtgaaaatattagacaagcattcagggcctctaggcaaactgcttaaataaacttacaagagcaagataattagactggcatcagatttctcaaaaacatataaagcaagtcaacagtaggaagagttcttaataaatttaaaggagacctaaaactagagaacatttataagaaaacaagtgaaaatgcttcaggacattggatttggcaatgatcttcaatatgataccaaaagcacaggcaagaaaagtaaaaagagaaaatgaactacattaaaataaaaaaaaaaaaaacttctgtgcaatggatgcaatcaagagtgaaaagacaacaaatgggagaaaatatctggaaatcaaacatctgatatatgtgtatatgaagaatgaagaactcctacaattcaacaacaaaaattaatctgaaaaaaaaaaaatgggcaagggacccaaacagacttttctccaaagatggtacacaaatggccaacatgcatatgaaaagatgctccacaccactagtcattaaggaaatgccaatcaaaaccacaatgggattatcacctcacacccattaggaaggctgcttaaaaaaaaaaaaaaaaaattccctaaagacccaaccaccaccagaaaataacaagagttggcgaggatttggacaaatcgagatctctgtatgttgttgatgggaattaggtaaaatggtacagccactatggaaaacagtatgatgcttcttaaaaaattaaaaattaccacatgaaccagcaatccaacttctgggtatatatccagaagagttgaagacagggtctcaaagagataattgtacactcacactcacactagcattatttacaatagccgaaaggtggaagatacccaagtatccatcagtggatgaatggataaacaaaatatgg

SEQ ID NO: 93330 - DNA, 12967 bp, Homo sapiens
ccttcctctgcttacagcagcagtccccaggctttctggcaccggggactggtttcgtggaagacaatttttccatggatcggggagggggaatggtttcatgataaatcaagcacgttacatttattgtgcattttatttcgattttgtatcagtatatgcataaataaagcagctgccatgactggatggctttctggtttcactactcgggtagtgaaataattatgcagctcactataatgtagaatcagtgggagccctgagcttgttttcctgcaactagatagtcccatcgggtggtgatcggagacagtgacacccaaagtgtgttgcttatgtccagtttacttcataatctctttcggttgctgtcactgcagaaaaccctgcttcacaaagacaggatgttgggaatggaagcagactttatagagcttttgtggtaaactcaggatattctgccttgattttaattcagaacatacgaagacttgaagttgtctcaaacatacttttagggccaacgtcatttgcgatctcaggcagttgatacttttctagcatggacaaagtcaattcacctggcttattcagaaatgggtcatggatccattccttcccagttcggggttcttttgtggttgggaaataatgcacaaactttttttttttgagatggagtctcgctctgttgcccaggctggagtgcaatggcacgatctcgactcactgcaacctctgcctcctgggttcaagcaattctcctgcctcagcctcctgagtagctgggattataggcccctgccaccatgcctggctaatttttgtatttttagtagagacagggtttcaccatgttggccaggctggtcttgatccacctgcctcggcctcccaaagtgctgggattgcaggcatgagccaccacgccccacaatgcgcaaagttttgaaagctgagataagtgatcatgcagcagctgagagaaaaagggccctggctaagtctctttcaaaatctctgctaatgtttgaaacatgccaaaaatcccaacgttcactccttgtccccataattccagtttggctttgaaaggagccatttttgacgacttgaacacagttgtcattcgcccctgaagtgacaaattgagtatgttgagcggtttgtataagttcacacaagtaagcaagttttgcgacccattctatgttactgtaatgtgctgtcattggtgactgtttttctaaaagaaatctctggagtggctctcataattcaaaaactctgaccagaaatacacctttagaaagccaactcacttctgtgtataagagaagatgtatgtgctctgcatccatctccccacagagctgtgcaaacagatgtggattaagggcatgtacttttatgtcactgataattttaatcacgtcctgcaaaacattgctaaggtgacattttttggctagccagcatttctttatggataacacagtgtgtagactcacactcagaagatacttctttgacctgagtagtgtaaccagaaagccatccagtcatggcagctgctttatcagtgcatatactgatataaaatgactaattctgttttccttatacataatcattcaaagacttgaattatttctgcagctgtggtgttggttggcaacaaaagtgcaaataacatatcccaatgtgtatcatcctgaaaaatatatcacacaaaaacaagcattgttgccttttttgtcaacatcagtggacttgtcaacttggattgcacaccatggtgacattaattctccctaataattgtttttccatatcttctgctattccatcaatttgtctagttatggtgttagctgaaagaggaacacgtgccaccttttgaactggagcatctcctaaaagtttgtgacaaatgttcttagcagcaggtaggatcaactcttcaccagtaagggcttcttagctttagcaatgtggttagccactaagaatgatgttctcagtgcagacacatttgatgaaatagtgacctttaataattgcttctgttcttcacgttcatttttttttctttagaaaaactccaaaggcttatcttttaatgcaaggtacttggtctccatgtgacaatgcagttttggaggtttcatggcttcgttagataaccagtaaccacatattatacaaagtgggcttggagaatgtgaatcatctgctgcaacgcacctgtaatttaagtaggactcttggtattttcttttaaatgcagctttttgttgttgttgttggcagtcacagatccttctgctgcctcatcattgcatctttcccccttttcaaagaagctctccagtgatgtttgttttttactaattttggctaactttagcttgtgagtttaccaaaactgtgactaagtgtgcagtgcaggaaagaggcatggatggaagcagcaaataaaataatgggcaggtcatgaacagtctaaaataactgttgaattctgacttgaagcctgccatcagatgcagctgtacaattgaagtacatcaactcacttgccattataaagccaaccatcagatgcagctgtacaattgaagtacatcaaaagcttatcttttaatgcagggtacttggtttccatgtggcaaagcagttttgaagttttcatggcttcgttagataacatcacttgccactataaagcctgccaccggatgcggcttgtcacttgccactcactgatagggttttgatacgagtctgcaagaaattgatttattatggtctttatgcagtcaaacctctcggctaatgttaatctgtatttgcagcctctccccagcaccagcatcactgcctccgttccacctcagatcaccagatattagattctcataaggagcatgcaacctagatccctcatatacacagttcacaatatggtttgcactcctgtaagaatctaatgccaccactgatctgacaggaggcagagctcaggtggttatgtgaccagtggggagcggctgcaaatacagatgaagttttacttgtttgccagctgctcacttcctgctgggcagcccaggttctaacagaccatggtaccagtccatgccccaaggtttgggaatccctggcttagaaagtatattttgaaaacattttttaaaagtttgttgctgctatggaatgggtctttctaaacaaacgcaatttaaaacacactaattgcttttgttggtcttaaaatagaccaaaatctttaacgtggtttaatatgactcaactcgacctggcccctgcttccctccagccttgtctctaccattctttcttacttttcagactccagccagccaaaaaacatgttttcagtcagttgtattgaacctgttccctcttgatagtggacacatcctgattccttctatctgaaatgcttcactgtttgcctagctaactgctatcctttagactcagtcaaatattgtttcccatgtcaagcctttccaaaacttccagagcatcataaaacttatttgaaatttgaaaaatatatttgtaggattacctggttactctattttcctcactagagcatgcgatctcttctctctcatacatatgtcactaatagcctactttataatatctgacataaaagtgggtgaagtgggtgttcggtacaattagttaaacatattaagtataatatacaaagaagccaggctccaaagtccacatgtgttaagaattttactcatatgagatgctcagaaaaggcaaatctatggaagaggaaagcagactagtgtttacctaggactgagagtgggaaagggaatggggataaactgttaactggcatgagggatcttaccagaataagcaaaatgttctaaaactagattatagtgacggttgcaggactcagaaaatttactacaaatcattaaattgtacacttaaaatgggtgaattttatgatatgtaaattattcatcaataatgatctttagtttggtgtagtctggcttttttattagccatgacagaaacctacttaggaaagattcctttatgtccacctgtaatgacccatgtgagtactttcacagattccctcagaccttctaattcatttctatgtgcctcttcatggcttctttgggtctttgccttaacagcctgcatcacaggctttctttggaatgccatcctggactactgaaaccaccttccccatttatcagagagactggagtgactgcggtttttggatctccagggtgggtcttagccaattaatagctgctgcaggaggatggagagcaagcttccttaactttatggggaacaaactctgagcagtaatgcctgctcctgataaggctgatggcatcttttcagtatttttgtctggaaatgcacattctcagcatgttttccttcccttttttgctttgtggatgtaagattagtcaggttctgggagctcttctttaataaattccttgctcaagaacctgcacctcagggtctgtttctggcaggacttgacccaagatgctgacccttccaggagcacctgttttgatgttgcaaactttcaaaaataattgtgagaaatttactattatcctagtatttcatattctttttttacaagtcccagacttcacatattctgtaattgctgaggatgccctgaaaggttcttcctgccctttttcccttacatacatttagatctagcctagacattatcttgactcaagaagtagggctggacacagtggctcatggctgtaaccctagccctttgaggggctaaggtgagagtgtcaggagtttaatgctacagtgggctatgttcacaccactgcactccagcctgggtgacagagcaagaccccacctctattaaaataaaataaaataaaataaaaaatttaaagcctccctcttaaattctaatataaattgagtatttcacctctgactacatagtatcctgtgcttgtatatttatagcatttaattcacttcataaaaattccctctttattcttgatctttccttctcaactgtgcaaatctgagagcagagattttatcttttattttcagcttcctcatgcctagtataacatatagaaggtatgtgattaatacttattgattcaaaataattgagtaatctatatttattaatatggaatgctgtgtaatatataactataaatttcagaaagttgcagagccatttatacatataaattttcttatatagttatctattatatatacgtatttgaaaaataagcactagtgtctatgtctgtgtattggagggcatttatgatttataatccataatttaaccttatgtcataattttacccaagcaaatagttaatgcaatgtaagaaataaagaagaaaaacatgcaaggagggagcttgagaactgatagtgtttatgaattaccagaacagggaatattgttttagttgtggttgttgttgttgttgttgatattgttcttgtcaatattaatgttgttctgctacaggagaagcaaggttatgttcagtatcagttatattccgacatgtacattcagtattactcatatcctgacatgtactgccttttcagcttacacataagctgaaagaagccacattgtttggctattattaggatttatagcactgtagaattattatagttaacaataatatattaaatagttttaagtagctagaagaatattgaacatttccaacacaaaaaagataaatatttaaaatgatggatatactaattatcctcatcagatcactgtacattatgtgtattgagacatcactataaacctcacggatatgtacaattattagttgtcaattaaaaaataaaataggccaatcttggccgtgcatcttggtgtagtgagcaggctcggaggtgctcatcgctgctgtcatggttagtttgctaaactgcgtcgtcactgtgtccccccagaacatgggcatcggcaagaacgaggacctgccctggccaccgctcaggaatgaattcaggtatttccagagagtgaccacaacctcctcagtagaaggtaaacagaatttggtgattatgggtaggaagatctggttctccattcctgagaagaatcgacctttaaagaatagaattaatttagttctcaggagggaccacaagaacctccacaaggagatcaatttcttgcaagaagtctggatgatgccttaaaacttaataaccagaattagcaaataaagtagacgtgatttggatagttggtggtagttctattttataaggaatccatgaatcactcaagcagtcttaaactatttgtcacaaggatcatacaggactttgaaagtgacacrttttttccagaaattgatttggagaaatataaatttctgccagaatacccaggtgttttctttgatgtccaggaggagaaaggcattaagtacaaatttgaagtacatgagaagaatgattaatatgaaggtgttttctggtttaagttgttccccctccctctgaaaaaagtaggtatttttaaattagaaaaaaaatacttatgttgactttaaatctacggataattatttctaagcaatgtgttcttattccccagtaacctacactatatctgataccatttatgaaacattcttgctgtaactaagtgcctccccaagaccctgactgagtccccagcatgtgctacagtgagctgccattccacaaccttcacatgtggcactcttgccagtccttgacattttcgggcttttcaaatgtcggtagtgtttattaaagatgaagatgcacatacccttccactgagcagtttcactagtgggaaataccaaaaacttcctgtgtgtgtatccagaggtttgtagacaaatgttgcaggcttgtttgtaacagtgaaaaaattgaaaacaacctggaagtccagtgattgaaaaatgaatatatttctgtctcagactggggaacccaaagcagattccaagactgaaatttcagtgaaagcagtttacttgctaggtcttaccagaaatcatcaattgaggtatggagaaatggaactgagaaggtaaggaaaccagtttaaagtcagtaagcaggttctcattggtaacaagctccatactgctgagatacagggaaaccgaggggagaaagctggagtatttatcagccactccttggttgtcagctccctgtcctgcaagtggcgggaaagtattccagctgcgctatagcaagtcccaagtgtttgcaataagaagctgctggcatgcacgggaatagtgaatgccaaacacttaaagcaattccatgtttaagtatgtaagctcttcatactatttttttttttcagacagagcatcacttttgttccccaggcagactgcagtggcacgatttcagctcactgcagcctcctctttcctgggttcaagtgattctcctgcctcaggctcccaagtagctgggactacaggcgcgggccaccatgcctagctgattttgtgtttttggtggggatgggatttcacggtgtcggtcagtctagtgtcaaacccctgacctcaagtgatctgcctgtctcggcctcccagaatgctgggattacaggcaagagccaccgcactcggcagatcttcataatttttgtgtagtaaaaagtataaagtcacacatggtttctttgaaatagtttataatttaaaaaaatacaaaagcaggaaaaccaattctaatttcaagtgagggatgatggtagtttgaaccaaagggctgcatgtagtatgaaattgtgatttaagatatattttaaagctggaagtagcaggatattctgatggagtttaactttggttttgagcccactgagtctgagatgcctttgagaaatgaaggaagtagagagagaatacaagaaaaactggccgggcacagtggctcaccctgtaatccctgcactttggtaggctgaggcaggcagatcacttgagaccagcttgggcaacatggtgagccccatctctacaaaaagtacaaaaattagctgggcattgtagcacacacctgtagtcccatatgctaggggaactgagatggaaggaacaactgagccctcgagttcaaggctgcagtgagtcgtgattttgccactgcactccatcctgggtgacagaagagaccctgtctcaaaaaagaatctgaaaacaatggaaccatgccttcagaattctagaaagaaagttattgtcaactgataaatctattcagccaaataatcaagggtgaaggtgaaataatacatttttagacaagcaaagactcgggttatctccatgtaccctttcttgggaagctaatggagaaaatgctccagcaaaatgaaggagtacacaaaccagagaatgacatggatccagcaaatagcatccaacacaggcaatatttcagctatggagctggctttaaaaagaagcagtaaaaatattaataggttagctgggtggaatggcccatgattatagtctcagctactcaggaggctaagcaagaggatggcttgagcctaagagttccagaccagcctggccaccatagagagatgtcttctcttaaaaataataataggttattgccagattaggggcatttgggaagaagttcattgaagataatgcaaaggtaaaaaagtaagggggaagtgttagttaggcaatcattaattctagggcagaaagaagtacaggataggaagtaagagcataatacactgtttttctcaacagtgagcaatatgtacatagtcataatgatgtggtgactgcttaggccctaaatctggtaactactttgggacaatatgggaagaaaggtgaagataatgatggtgtagaagctaaatcctcatctgtcatatcaagaaatcactatataatgtataaaataatcaagaaatgactaagtagttatgtaaggaaaaaaatagaagacgttgctaaaagagttaaaagtcattgctctggaggattaggagggatggggcaggggactgctaggatgtattataaactgaagagtctttttaaaattacaagtatcaatatatgcattcacttgaaaaactaaaaaaataataatttggaaaaactcatgaaagtaactaccagaaggaaaaactaagagaatgaaaagtgcttgcctcgggaaagaacaactgccaggactattgttttcattgtaagacttttggatccatttgattcatttgcatacatttctttaatgaaaataattctaccttaataaaaagttaccctcattcaaaaaaataaaaataaaaaataaagtcagttcaaaaatgtttcagacaattatcaggcctcagcaagtagaaataaataaatatacagtcattcttcatcggctgaaaatcatatcatggctgtagaatggtatgtgaatttttattttcattctctgggtatggcagtagatataagacaggccatttggcacacattgagagatgtgtgtgcatatatgcatgtgctatttcatgcacacatttaaaaacgtaatatcatttgtaactttgaggagtctagttggttgctatatgagtaatcattatgttgttctatatctattaatattgttgatcatcaccagtctgaaagaagctaacataaaatcacaaaatgccatgaagctgagaactagtgaccccaggaggaaacgaactgactaatggcaaaatcttcagagttatgcctaaaatcctcattctcatgaaatgctctcttttagaacatttcatttgggacacatatggcttcaccagataaacctttttactttacactttggacggtcaacccacagatgtcacatttccaacaccactgaattctctgaaaataataataatacaaaaaggtaaagggaaagaatttgtcactttgacttggcagactaaatgatgtagatctcaggaggctggcactgaagattttcctcttgggtgctaaactgcagcataagaaagaaatcaacagataattcaatagaaattgtagtattcgtcctttgtttttttccttccctttttctgttttatctttctcttttttttcttttattttctgtcctccttctccaactttttcttcatctgatttcttcttttctccattttttattccctcttccttctcacttccattcttcctccttcccatttttcagccttcctttcttccctcctttcttccttttcttgtctcctcctaccttccttctttttctcctcctcctccttcttcctcatcatcttctggtttgtactattgaaaactttgcattaaaactttgcattattaacacattattaacattattaagacaatgagacccttctctaaaaaaaaaaaattagccagatgtggtggcacacacttgggaggctgaggcaggagggaagctgaggcaggaggatcacttgagcccaggagttcaaggctgcagtaagctgtgattgcaccactgtactacagcctgggtgacagagtaagtaccttgtctcaataaaaacaaacaaaacatttgtatttctgaggaaacattcagacagcaaaccatgacttgagaaaggatattatcttatagggcaaaactcattctaatttagaaaatttaagacgaaaaattatttcacttaagagaaagtgtgagaaatagatcattaaacaacatatgacttgtcattaatttggtaacttcactgaaatagcagtgagtataattaatacagttgattcaaggggccaatggttctctattcaaacttctgtatatttaaaaatatataaactttgattgcatatcaaatctgtggttaaaatatcttgagttggccaatgatatattttaaaacttccatgaattattgtacgttagtacattccttattttaaaaatgatagacttcatgtgctgtatttctcaaatgaaggcgaagaacacctacgttgttctcaatgttttatttcaatacttaaggtatccaggacataataagtctttcttctaaaattaagtaaactgagaaggttcttcattctaattctacttctctgactcatttgttcaagaatagaactcttgggacagccaaacctgattctctttttatttcctccaaaggcacttctctaaccaactgtattccaccttaagggaatcattgcttatccagagtcctcgtatgacctgttgacagtggtttaaatatatccattcaatgaagcatgaccacataaagtattggtcaaactttgatacaaaaactgaaaattttgttaaacagccagattaggagtcagtaagtctgtagggcctgagattccatttttctaataagctgtctcatgatgcagaaactgttagtcatggaccactatttgagtggagtgggagtcaagagtactcacccatggtctggcctacttctgtatgaactaggtgaaagttcttgcattatgtggcaggtcatagctgtgtttttttgtgttttttgttttttgagacagagtcttgctctgtcacccaagcctgagtgcagtggcatcatctcggctcactgcaacttctgcctcccaggttcaagtgattctcgtgcctccgccacccaagtagctgggattacaggcatgtaccaccatgcttggcttatttttgtatttttagtagagatgggggtttctttatgttggtcaggctggtctcaaatgcctgacctcaggtgatccactctcagcctcccaaagtgctgggattacaggtgtgagtgaccacgccccatcaggtcatttttgaacagctattatatggttctggcatctatcagaaaaaataaatatatataataaggcacagcctctgcctttaagaacaaaccataatctagttagaaagcatagctctaaacataaacttggtgccatataactgactaggctgatgataatgacagggagaagtaactcagttatgtgattccaaaacaattagtcaacagcagcatatgattgcctgttcagaagtagagtggaatcgacgtccacggaagggaaaatgtgttaagcatggaggtggtccatgaaggatagatgggtgagagcgggtgtggttaagaaagcattgacaacattttaaaatggaaaaaataaaaaaacaagaaacacccgtatctgggctttatgattggttttcccctacactatggtctccttcagagcagagaaaatgcccatgcttcctactgtatgcgccacgctttttggcatatagcagaagagtaatgaacatctgtcaattgtacatatgaaattaattgagaagagatgatttggctgtaatgattaattggatgaaggataaatttatttggagaaataataaaatgactaactatgtactgagatgataagaataacattttgggggtaagcttgattaatatttgtatctagttacctattgtatctagttacgtatctatcacatgtatctagttacctatattgtatctagttacctatctattgtattgtattgtacctaatgttgtatctagttacctatctatcacatgtatttttaaataaagaataaaaaggagtttgcatagaatatttattaagagctaagagttttcaagtgaagtgtttgatgtggcactaggtttaggaatctctagtccaatgataaaaataataagttaaaagttattgagtctgagtataaaaatcaaattttatacagtgattttttcacactgcag

SEQ ID NO: 93331 - DNA, 13264 bp, Homo sapiens
tccaggtgttagcatttattaagaagctaactgctagtgagggacagatggttattttcccagataattctaggctcgccaatatccacacttgatttttaacctatttcttagaaattaacttgaagtaaatagctaatttttttatttaggaaaaaataggtaagagaaaaatgaaaaattgatagaacatcaaaaaataacttcacaacggattgttatagcaattttgattgaggccacgtgattgaaacatttccaaacacctgattatgaagggcaatgatttaatgggggggggtgtaatcaatagtttgaaataaaaagaactgactggagttgtttttacaatgccttctctcatttttcttttcttttcaaaactatgcctgcacacagaatgcatgcgatttgttaatcatgatggagatctcagatgcttttgaaggtaagcctcctggtatagatgagtaaaattttccaggtatcagctccatgaggactgtcgggaatcaggaggtccatgtccccaccaaacaaacacacacacatacaacacacatttagtgtactggctgccaatgtgtgagctccacagcatccacttattgttctgtatgtgttcatctttgctctgcaactaattggtgtctatgttaaagaagaacaggcatcttgccttattcatctcttacatctttcagagtgtccagcacagacatagtaacataccaaaggctcaccaaagatcactaattgttggttaaagtaagaggcagaataatgacccaccccaaccacaaagacgtgcccatcgtaaattccagagcctgtgaatatgttatattacatagaaaagaggaatgaaggttgcagatggaattaaggtgctagtaagccaccgtaagataggaagattattctggtttattccattgtgcccactgtaattactgaggtgttttattgtttttgtttttgtttgagacggagtctcactctgtcgtccaggctggagtgcaatggcgcgatctccgctcactgcaagctccacctcccgggttcacgtcattctcctgcctcagcctcttagtagctgggactgcaggcacccgccaccacgcccagctaattttttgtatttttagtagagatggggtttcaccctgttagccaggatgatctcgatctcctgacctcgtgatccgctcgcctcggcctcccaaagtgctgggattataggcgtgagccaccgcgctaggccaattcctgaggtttttaaaagaaaaagaaggaggcagaaaaggagtcacagccagagaaggaaaactgaagatagaagggtcaagacgacatgatatgagaaaggctttttttttttttagattcagagggtacatgtgcaaatttgttacatggtatatcgcatgatgctaaggtttgggcttcaattgaacctgacacccaaatagttacataacacccaatagatagttttcaacccaagttccctacctccctccctgctctagtactctccagtgtctattgtttccatctttatgaccatgtgcccccaaagtttagctcccactgataagtaagaacatggggtatttggttttctacttccgtgttaattagcttaatataatagcctgcagctgcatccatgttgctgcaaaatacgtgattttattcttttttatggccacatcgtatcccatggtgtatatgtaccacattttctttaacctatccatcatggacgggcacctagattgattctatgtctttgctattgtaaatagtgctgcagtaaacatgtgcaggtgtctttttggtagaacaatttattttcctttgggtatatacctagtaatgggattgctgggtcgaatgctaattctattttcagctcgttgtaaaatctccaaactactttctacagaggctgaactgatatgagaaagtcttaaccagttgttgcttctttgaagaagaaggaaggggccacaagccaaggaatgtggtggcatctagacactggaaaaagcaagaaaatgaattctccactaaagcatccagaaacacagctctaaagatccccagttttagtccagtatgacccatgttggacttctaaaccatagaattgtaagatactaaatttatgctgttttaaaccattatgttcatgataatttgttacagtagccatagaaatctaataaaattgagatacttctttccatttgatttattttctttgattttttatttttttatttttatttatttatttattttttgagatggagtcttgctctgtcccccaggttggagtgcagtgacgcaatcttggctcactgcaagctctgcctcccggattcatgccattctcctgcctcagcctcccaagtagctgggactacaggcgcccccccmaccacacccagctaatttttttgtatttttagtagagacggggtttcaccgtgttagccaggatggtcttcatctcctgaccttgtgatccgcctgcctcagcctcccaaagtgctgggattacaggcgtgagccaccgcgcccggccttctttgattttttaaaagaagtgactatcaagtttttatatttattgcccctaaccatcaccaaacagtcagtcatcagcagagaggacaacagtgactgaggcatatgcgaaagggaaatttggcacattatccaaagaaagctgcttcaccatttaaaatagtttcgtgtctcacctccagtgactttcttatttaagaaaatcaatggtccacttaaaattcccttgtgcatgggaatgtggtgccatgtaaatatttgtttgctgctgtctctctcagagccaagcaccagctttgcaggtgggattacttaattggcaattattaaataaatttaaaagagccatgattagcagactaattgctgaccagcagttctattgaatctgtttccaatgcaaatgtctcctcttctcttggctcaaggtaatcaagcttttctttgcaatttttcagaaatctttgaagtgtttctgcacactccaaatagtcactcactagtatgaaagttttcccttgaaagctggaatcaggcacttttgcctctggaaagggaaggaaaagtggcagacctagttgtattgtattgttttcttagtttctccagggagaaaagggaactgatcaacttaaaaagaactagttacccaggatagctatttaacggagaaagacaaacctggtaatcaaaatagactggttatattcaatactgaaggataaatttctttataaggtgctgtgttgtactgatactgtctaagatctctttagtggaaaatttatttgaggactacctctaatcaccagaaaatcaagcatttcatgacatcatctgagcatccttacctggactctgcctctctcctacctagcactccctttgcccacagctccgctccaaccctgtccctttttagtgccaagactgcttcaagttgctgctcatccagcggtacatcccccattcttccttagttatttttatcttttctcacatttctaaataacaccacttctttaggtagaaacttcccaccacctggcttatctgaacctctagcctatatccatagaattatgttgagtaaacagcctgtccctattactcctattctgccgacaccatagatctgctgtggatgtcatccattgacctaccccaatcggaagccagaaggcaagggagctaggtgattgtagaagtcagcctcctgtagcaaagagcagggcagaaaagtaatgaatgaattcagaatggtggggatgaaacagagaatagccaacacagggtctctttttataggacaaccaaaagttgtatacatcgttctacttttggtctttattgagactcttagtaatgtttgttaaattcccactatgtgtggtatgcatctttctttgaaataacaagaatataaacattcttcagttgccccctccttctttcctttttgttttttcttcaaggttttgctgaacggctaccttcccctggatttcttaattcgtttatttctactaaataaataagcctggtgcctcccttcacctatataatagatttccctttgcatctttattgtctattcaacattgacaagtacatttggcaaatggtaagcatgcaataaacattaactatttttatttttattcctctcctaagaaattcttgcctaattaaataagggcaaaaggaggctattgagataatgagaaaatttatagatttttaaaaattttcattaatctaataaagattttaaacctaacttccagttttagaaacaaggaggtgaagaaacaagttgaacaacacccctccaccaaaaaataaaaaatccagaacaaattaaaaatatgagtcactctacaagaaaactgcctactttcttcaataagtcaacgtgcagtaaaaagggaataggggactttgtatatcagagtttatctaacttttctgtaaaagaccaaatagcaaatatttcaggctttgcaggccatgtcatcttggttacaactactcaactcttaaagtcataggtaatacttaaacaaatggaatggctgtgttccaataaaaatgtatttaccataaaataggctgcaggccagatttggccagctcctaattcctcttctatatttaaggaggttaagaaatataacaacctaacaaataagtacacaatgggcatttttaactcaaaagtttttatcaaggtgtgggaataggggaaggggagttgaaagaagtcacaggtttcgggggcatgcaaaggtcagtagagaaatgaggcctgggcagtgtgttgttggaaaaagtacacacacaaaatggcaccacctgtaggctatttatatatatttattttatgtccagcagtcgtctatttgatatggacaggaggcatgagggtggggtccctggagagagggctttaccctcaagcctggaccatggccctaagtgagaacaagaatttcagtttttgtgcccaaatgttgccttttggcccaaaatacctgcctattctgtacccatataaacctcagaccccaggctccacaagcagcagagcagcagacaaggagagaaaagaggaagcatctgaacactgagagttcacctgagcatggtcggaaaggagatcgaccaaacagaacagccgagctccaggggaagataatcttcccaccccaccccatcccctctccagctccccatcccactgacagccacctccatcactcaataaaatccccacattcactatccttaagtccatgtgacctgattcttactggatgcgggacaagaatccaggattcactgagtgtgggaacccaaaaaggctgtcacattgactcttcactgagcggtttaacacctaagccatccccagacagcaggactaagagagcactgtaatactcctagacactgccatggggcaagggcccaaaagcactcaccctggctcctgcacctgctcacctatgtgctccccatcctgtaaggggtttgagcatgtggcagccaaacaaatgagccacactcctgttgcaagtcccatgaaagggtacagggaactctcccatttcatcttcacactacttcctctgacatcccatcaccatggcactcaaaatgtaatgacagcacatatcttttacatatttgttgcaaatgcagcaatttggacaatatattcaagagagccatcattatcccaagtctgcatctcccatccaccctctcctcaggcaattgtgctttgggtggtgaggtgtcatctgctatttattcccttaagtagtcctcaatattatcctgaataattcttttttacattaccaaaaaaagtcagttaaaagttacagaattcagagagtgcggacvtccagtttcgcagtgggagtcttcattgcgccagtgactaaaaagagaattaaatatgggtgatgttgagaaaggcaagaagatttttattatgaagtgttcccagtgccacactgttgaaaagggaggaaagcacaagattgggccaaatctccatggtcttttcaggtggaagacaggtcaggcccctggatactcttacacagccgccaataagaacaaatgcatcatctggggagaggatacactgatggagtatttggagaatcccaagaagtacatccctggaacaaaaatgatctttgtcagcattaagaagaaggaagaaagggcagacttgatagcttatctcaaaaaagctactaatgagtaataattggccactgccttatttattacaagacagaaatgtctcatgacttttttatgtgtaccatcctttaatggatctcatacaccagaattcagatcatgaatgactgacagaatattttattgggcagtcctgatttaaaactaagcctggcttgtggttaaatgaatatgttcagtttttgaattttaatagtaactccaattcagtaaatgctatcactgtttaccccttttaaagatatgattagacttcattagtaatgttcaacttttcacaaagatgatgagtgccatcttaaaacttatactggagattggttttatatttagatttatataactggttatgtgaatatatttaaatactggggaaattccttcactgtcttagaaccaagcaagattcacatgtgttttgtgttcatttgcctcttaaaggcaagggttgaagataaatatggtagcaatgtctatagttttggtcttaactacgccaatctaattataattccctgtatttaaaatggttccctttacttattgaaaggcattttagtgtggtttatgtgtaatattaaagattattcaacacctctcacatcttaaagatctctaaggtcacatgcttttaaaatagtagcaagttaaacttcactcttgaattctttacaatctaagtcaaactaagttatactttaggattgtctttaaacagccattcagaaatataaaactgtagaactgggtatatgtgattgggaatggtgcttttgccaacttaaaaggattaaggtaacggagatatgcacaaattttaaaattatgtgtgatcacaagactaaagataattaaaaagaaaaccacaaaaaaaaaggttacaaaattctaaactgattcttttcaaaagagaggtacattatggaatgtgttaaactcatagttccatttttaaaaaatgttaaccataatmtttttatttttaattcaatttcattttataattgacataataattgtgcatattcatcaggtacatagtgaagtttcaatacatataatgtatattgatcagaacaagataatcagtaaatccatcatcataaacatttatcatttctttgtgttaggaatgttcaatatcctccttctagctgtctgagactataaaatatattattgttaactatagtcatcctacaatgatatagaccactataacttattcctcctatctagctgtaattttatattataattctattaaaaagagtaaggtaagagccccaaatggtgaaattttctcttttcgttcctggataaagctgaccaccagttttaacatatctagacttcaatttttttattaacaaaaggacaagtgtgaactagaatatacatccaacattgtgacattgaccagaagtcttttgcttcctatacttatcactaagaaccactcttgtggcaataacttaagactgcactatttatacttagatttttgtggaacatttctgataaagtttttttattatttagacaaaaatttaaaaggtcaaatggtaataaataaaaaccaagatatataagtcaccacttaaaaaattatatcagtggggatggagccaagatggccaaataggaacagctccagtctacggctcccagcgtgagcaatgcagaagatgggtgatttctgcatttccaaatgaggtaccgggttcatctcactggggagtgccagacagtgggtgcaggacagtgggtgcagcgcaccatgcatgagccgaagcagggcaaggcatcgcctcacctgggaagcacaagggatcagggaattcccttccctagtcaaagaaagaggcgacagacggcacctggaaaattgggtcactcccaccctaatactgcgcttttcaaatggcacacaggcttaacaaacggcacaacaggagattatatcccggcacatcaggagattatatcccggcacaccaggagattataacaaacggcacatcaggagattatatcccgcacctggctcggagggtcctatgcccacggagcctcactcattgctagcacagcagtctgagatcaagctgcaaggtggcagcgaggctgggggaggggcgcccgccattgctcaggcttgagtaggtaaacaaagcggccaggaagctcgaactcggtggagcccaccacagatcaaggaggcctgccggcctctgtagactccacctctgggggcagggcacagacaaaaaaagacagcaataacctctgcagacttaaatgtccctgtctgacagctttgaagagagtagtggttctccccgcacgcagtttgagatctgagaatgggcagactgcctcctcaagtgggtccctgaccccagagtagcctaactgggagacaccacccattaggggtggactgacacctcacacggctgggtactcctctgagacaaaacttccagaggaacaatcaggcagcagcatttgcggttcaccaatatctgctgttctgcagccaccactgctgatacccaggcaaacagggtctggaatggacctccagcaaactccaacagacctgcagctgagggtcctgactgttagaaggaaaactaacaaacagaaaggacatccacaccaaaaacccatctgtacatcacaatcatcaaagaccaaaggtagataaaaccaaaaagatggggaaaaaacagagcagaaaaactgcaaactctaaaaatcagagctcctctcctcctccaaaggaacgcagctcctctccagcaatgaaacaaagctggaaggagaatgactttgacgagttgagagaagaaggcttcagatgatcaaactactccgagctaaaggaggaagttcaaacccatggtaaacgagttaaaaactttgaaaaaaaattggacgaatggataactagaataaccaaagcagagcaatccttaaaggacctgatggagctgaaaatcaaggcacaagaactaagtgatgaatgcacaagcctcagtaaccaatgcgatgaactggaggaatgggtatcacagatggaagatgaaatgaatgaaatgaagcatgaagagaactttagagaaaaaagaataaaaagaaatgaacaaagcctccaagaaatatgggactatgtgaaaagaccaaatctacatctaattggtgtacctgaaagtgatggggagaatggaatcaacttggaaaacattctgcaggatattatccaggagaacttccacaatctagcaaggcaggccaacattcagattaagcaaatacagagaacaccacaaagataatcctcgagaagagcaactccaagacacataattctcgtattcaccaaagttgaaatgaaggacaaaatgctaagggcagccagagagaaaggtcgggttacccacaaagggaagcccatcagactaacagctgatctctcagcagaaactctgcaagccagaagagagtgggggccaatagtcaacttcttaaagacaagaattttcaacccagaatttcatatccagccaaactaagcttcataagtgaaggagaaataaaatactttacagacaagcaaatgctgagagattttgtcaccaccaggcctgccctaaaagagctcctgaaggaagcactaaacatggaaaggaaaaaccggtaccagccactgcaaaaacgtgccaaattgtaaagaccatccaggctaggaagaaactgcatcaactaacgagcaaaataaccagctaacatcataatgacaggatcaaattcacacataacaatactaaccttaaacataaatgggctaaatgctccaattaaaaggcacagactggcaaattggataaagagtcaagacccatctctgtgctgtattcaggaaacccatctcacatgcagagacacacataggttcaaaataaagggatggaggaagatctaccaagcaaatggaaaacaaaaaaaggcaggggttgcaatcctagtctctgataaaacagactttgaaccaacaatgatcaaaagagacaaagaaggccattacataatggtagagggatygawttaacaagaagagctaactatcctaaatatatatgcacctcaaacaggagcacccagattcataaagcaagtcctgagtgacctacaaagagatttagactcccacacaataataatgggagactttaacaccccactgtcaacattagacagatcaacgagacagaaagttaacaaggatatccaggaattgaactcagctcagcaccaagcagaccgaatagacatctacagaactctccaccccaaatcaacagaatatacattcttttcagcaccacaccacacctattccaaaattgaccacatagttggaagtaaagcactcctctgcaaatgtaaaagaacagaaattataaaaatggtctctcagaccacagtgcaatcaaactagaactcaggagtaagaaactcactcaaaacsgctctactacatggaaactgaaaaacctgctcctgaatgactactgggtacataacgaaatgaaggcagaaataaaggtgttctttgaaaccaacaagaacaaagacacaacataccagactctctgggacacactcaaagcagtgtgtagagggaaatttatagcagtaaatgcccacaagagaaagcaggaaagatctaaaattgacaccctaacatcaccattaaaagaactagaaaagcaagagcaaacacattcagaagctagcagaaggcaagaaataactaagatcagagcacaactgaaggaaatagagacacaaaaaacccttcaaaaaatcaatgaatccaggagctggttttttgaaaagatcaacaaaattgatagaccgctagcaagactaataaagaagaaaagagagaagaatcaaataatgacaaaggggatatcaccactgatcccacagaaatacaaactaccatcagagaatactataaacacctctacgcaaataaactagaaaatctagaagaaatggataaattcgttgacacatacaccctcccaacactaaaccaggaagaagttgaatctctgaatagaccaataacaggctctgaaattgaggcaataattaatagcttaccaaccaaaaaaagtccaggaccagatcgattcatggccgaattctaccagaggtacaaggaggaactggtaccattccttctgaaactattccaatcaatacaaaatgagggaatcctccctaactcattttatgaggccagcatcatcctgataccaaagctgggcagagacacaaccaaaaaagaaaattttagatcaatatccttgatgaacatcaatgcacaaatcttcaataaaatactggcaaaccgaatccagcaacacatcaaaaagcttatccaccatgatcaagtgggcttcatccctgggatccaaggctggttcaacatacaaaaatcaataaacacaatccaggatataaacagaaccaaagacaaaaaccacatgattatctcaatagatgcagaaaaggtctttgacaaaattcaacaacccttcatgctaaaaactctcaataaattaggtattgatgggacgtatctcaaaataataagagctatctatgagaaacccacagccaatatcatactgaatggacaaaaactggaagcattccctttgaaaactggcacaagacagggatgccctctctcaccactcctattcaacatagtgttggaagttctggccagggcaattaggcaggagaaggaaataaagggcattcaattaggaaaagaggaagtcaaattgtccctctttgcagatgacatgactgtatatctagaaaaccccatcgtctccgcccaaaatctgcttaagctggtaaggaacttcagcaaagtctcaggatacaaaatcaatgtgcaaaactcacaagcattcttagacaccaataacagacaaaccgagagtcaaatcatgagtgaactcccattcacaattgcttcaaagagaataaaatacctaggaatccaacttacaagggatgtgaaggacctcttcaaggagaactacaaaccactgctcaacgaaataaaagaggatacaaacaaatggaagaacattccatgctcatgggtgggaagaatcaatatcatgaaaatggccatgctgcccaaggtaatttatagattcaatgccatacccatcaagctaccaatgactttcttcacagaattggaaaaaactactttcaagttcatatggaaccaaaaaagagcccgcattgccaagtcaatcctaagccaaaagaacaaagctggaggcatcacactacctgatgtcaaactatactacaaggctacagtaaccaaaacagcatggtactggtaccaaaacagagatatagatcaatggaacagaacagagccctcagaaataatgccgcatatctacaactatctgatctttgacaaacctgacaaaaacaagcaatggggaaaggattctctatttaataaatggtgctgggaaaactggctagccatatgtagaaagctgaaactggatcccttccttacaccttatacaaaaattaattcaagatggattaaagacttacatgttagacctaaaaccataaaaaccctagaagaaaacctaggcaataccattcaggatataggcgtgggcaaagacttcacctctaaaagaccaaaagctatggcaacaaaagccaaaattgacaaatgggatctaattaaactaaagagcttctgcacagcaaaagaaaccaccagcagagtgaacaggca

SEQ ID NO: 93332 - DNA, 12630 bp, Homo sapiens
cttaagagtcaaggaaagattggtctaaaaagacatgacaactaagtgcaacccacgatgtagaactgatcctgttgttataaaaggcattattgggaccaaattggtgaaacttgaatgtggtttgaggattaagtaatggagatgcatcgttgttagtttcctgatttcagtgttgtatggtggttacacaggacaatgtccttgtttgtaggaaatatacactaaaatattcaggaggagaggagtgatgagaattgggtcagcaatttatgcttaaacggttccagaaacatgagttatttgtattgaacttgcaactttttctgtaactttgcatttatttcaaagtaaaatgataataaaaggaaactttaagctgcagtattgagactaccaataggggtagagagggactatttaagaggcaatgacagcctcccaaaggtgagagatgagggtggtttgaaacagacggtagctctggcaggggcaggaagggaatccgattatggatatacagcataccgaagatgctgcatgattttctgatggattagacgacagatatgaaggaaagaaagaaaaaaaggaaggaaggaaggaaggaaggaaggaaggaaggaaggaaggaaggaaagaaggaaagaaagaaagaaagaaaaaagaaagaaagaaagaaagaaagaaagaaagaaagagaaagaaaggcagatattcaacgattccagtgtctggggcctgagcaactagaaagatggagttaacatcaatgacccagaaaaggttatagttccaccctctgcctccttccattcctccccccttgctttctttctgtgtcctgactgaaaatcacagagtgccttgaccattctgtgacccagccagctgcaggtttttcccagcagatgtgagcccaatccaaggcattaaacattcccaggcgctgataaaggtatctaggctgttccccaaaacactgaaagaaactggcctcagctgagtcaaattccttaaaccctcatataaagcccatgctctgagccccttgcagcagacacacctacgtagaacacccgtctccccttgctctccgcaccaaggattgctgcagcactctrtataagtttccttagtaaatgctttgaactggtcacctggccttcagtgcttctttctttagaaatctaaccagttccatctccagacgggttgagagactcccttgtgggaattcccctgcccctacttccgggatgattctagcaacagatttggcagtatgaaacagtacggcggactgaaagcagggtatggatgggaagatcaagagttcagcttttaatctattgagttcaatatgtctattggatatccaagtagatcaattagactttggaatatatgagtacagagttcagaagagaggagtttgggatgagatataaatttgagagtagtcaccatatgtaagttggaaaactagatgaaatcattaaggatatgactatacatagaagagagaagaagaccatatccaaggatccagatttatatatatatatataaaatctccaaacatttattactttaaaagaaatatatcagccgggcacagtggctcacacctataatcccacactttgggaagccaaggcaggcagatcatttgaggtcaggagtttgaaaccagcctggccaacatggtgaaacctgatctctaccaaaaatataaaaacttagctggtgtggtggcatgtgcctgtaatcctacctactcgggaggctaaggcaggagaatcacttgaacccaggaggcgaaatttacagggaaccaagatcgtgccactgcacttcagcctgggcgacaaagtgagactccatctcaagaaaaaaaaaaaaaagaaaaagaaaagaaaaagaaaaacaaaaaaagaaaaggaaaagaaatatatcagctttattcataattgccaaaacttggaagcaaccaagatgtccttcattggataactggataaatcaactatagtgcatccatacaatgaaataccattcagcactaaaaagaattgagctatcatataatgtaaagacatggaagagacttaaatacatgttgctgagagaaagaaggcaatctgaaaaagctatatactatatgattccaactacatgacattctggaaaaggcaaaactatggagacagtaaaaagttcagtgcttgccagaggttaatggagagagacagatgaataggtggaacatagaggatctttagaggagtgaaatactctgtatggcactgtaacagtggacacatgtcattatacatttgcccaacccataggatatacaataccaagagaaaccctggttataactaaggcagctgggtgatgataatgtgtcaatgtaggttcataagttgtaacaaaggtaagtaactctggtgggggatgttggagcgtgaagtatatgggaactctctgtatttctattttcaattttgctgggaacctaaaattactcttaaaaatagactttttaaaaagagatacttataataacatttaaaaagtttgtctctttgatttgccacatcaaacttatagttctgataagctgaacaatcttatacaaaattaaaaatatatatacttgtctcctaaagatacctagagaaaaagagaggaagattagttatgctgaatatagcttttgctttaaaattaaattcatctttttaaaatgccacttgtttataataaaatgaccagtgacttgtattggcctgaacagttctgtattttaccttcttgtctcagtggccctctgtcttagattctataacagatcattgtcttaagggccctgccaaaggctacctaactctaggatacaaatgtcagtctcatctcatgagtggggatctgaagtcagaaacagagagaaaggaagggaatgattttgcagattttcatgtagtagacacagtagattatagtagacaagtaatcaatatttgctaagagaatatagacatataattgatactaattgatgatagaaagaatgaatgtgtttattaatttgcaaagtgattggaatgctcagcttatactcaggactttttttctcattaaattttagacttggaggttgtacccctctgggcttatttaatttcctacataaaataacattttgccttgaatatttatcaaaaatttaaagtatcttaaacatccttaaaccaattctgcttttccatttccccattattgtcaataatgtcatccttttgttctcatggcataatatgcatggagctgctctatgtgccctgacagtgcagcgactccactccatgttaagctcaagagacacttgagccataaaggacaaagttgtggccttagccaacagagcccttgctccccaaacagtacaatctatgacataatccaccaggaagtcccaagccattagttaaaatgtggaacttcagagaaagggagtgtttgttttcacaaagaaatcttgatgattcttcctgacttcagcctgtcctctgtccctttactttctcagtacctccactctggccagagtttgcccccatctgcctgcctgcctcctgcttctttcagctgccacaattccataccgtactttgcccactgggactttccacactggtaaggaagcaaagtagaaaccaaagcaaaatgtgctgaacagaccaaacacacattcatatggataagggtataatccaagctataaaactcttagaagaaaacagggggaaaagcttcatgacattaaatttagcaatgatttcttggagatgataccaacagtatagaccaaaaaaaaaaaaaaaaagaaaagaaaaatagataactggacttcatcaaaattaaaaactttaggccgggcatggtggcttatgcctgtaattccaacactttgggaggccgaggcgtacagatcacttgaggccaggagtttgagaccagcctgggcaacatggtaaaaccctgtcgccactaaaaatacaaaaattagccagatatagtggtgcatgcctgtggtcccagctactcaggaggccgaggcaggagaattgccttaacctgggagttggaggttgcagtgmgccaagattgcaccactgcattccaacctgggagacaagagtgaaaaactcaatctcaaaaatataaataaataaataaaaacttttgtgcatcaaaggacactatcaacagagtgaaaaggcaacacacagaatgggagaaaatcatacctgataaaggattaatatccaggatacatttaaaatcctacaactcaagaaaaacaacaacaacaaaaatctgatgaaaaaatgggtcaaggacatgaacagacatttatcgaagggtatacaaatgaccaaataagcacatgaagaagtgctcaacatcactacgcattggggaaatgcaaatcaaaccacagtgagataccacttcatacccttaggatggctagcataaaaacaaaactaaacaaaaattaaccagtgttggcaaggatgtggagaaattgctgtatgttgctggtaggaatgtaaaatggtgcagccactgtggaaagtggaatggaagttccccgaaaattacatataaaattacataatccagcaattccatttcttgggtatatacccaaaggaaagagatatttgttcaccagtgttcatagcagcattatttacaataactaaaagacagaaacaacacaagtgtccatcaataagtgaatggataaacaaaatgtactatatacatttaatggaattacgcagccttttggaacaaaattctgtgacatgctacaacatgggtgaaccttaaaggtattatgtttaaatgaaagaagccagtcacaaaaggacaaatattgtataattctacttatttgaggaacctagagtagtcaaattcctagagacagaaagtagaatactgactcccttgggctggatgaggggtgaaatgaggagttagtgtttatcaggtgcagggtttcagctggggaaggtgaaaaggctttggagatggatggtggtaacagctgcacagtaatgtgaatgtagttaatgccacaaaactatacacttaaaagtggttaaactaatacattttgttatatatatttgccacaatataaaatataatctggctgggcgcagtggctcatgcctgtaatcccagcactttggaagtccaaggcagggtgcatcacttgaggtcaggagtttgagaccatcctggccaacatagtgaaaccccgtctctactaaaaatacaaaaattggccaagcatggtggcacatgcctataatcccagctacttaggaggctgaggaggggaaatgcttaaacccaggaggcggaggttgcagcaagtcaagatggtgcactgcactacagcctgggtgacggagcgagactcagtctcaaaaagaaaaagaaaaggcaaagaaaaaatataatctaacttaagacataatataagacataccagtcttgaattttattaatctcaaaacataaaataaaatagaaaaaagttataaaaaaataaaagaaagggaagtcctagccgatgtaataaagcaagaacataagataaaatgcgtaagtattggaaaggaagaagcaaaactattgttatttatagacagtatgattattaaaatcctattgaatctacccaaaacaaacactagaattaataagtgaaattagaattcttggagcatataaaaagtctaattttttgccacctatttgcctatttgcctattgcctatttgcctagttgtcctatttgccaccagcaaacaactggaaaataaagctttttaaaaataccattaaaaaatatcaaatccctaaaaaggtatccagtgaaaaatatgcaagattttagggcggccatggacgacaaggaggagatgtaccagctctggaaaatccgcaagaccatcatgcagctgtgccatgaccgtggctacctagtgacctaggacgagcttaaccagacactgaaggagttcaaagtccagtytggggacaagccaagtgaggggcagcggcggcgcacggacctcaccgcgctggtggcccacaaygatgaccccaccgacaagatgtttgtgttctttccagaggagcccaaggtgggcatcaagaccctcaacgtgtactgccggcgcatgcagcaggagaacatcacgcgggtcctcatcatggtgcagcagggcatgacgccctccgccaagtagtgcctggtccacatggctsccaagtacatcctggagcagtttctgcagcagaaattgctcatcgacatcacagagtacgagctagtccctgagtacgttgtcatgaccaaggaggaggtgacagtgctgttggccctatataagctccgagagaaccagctgcccaggatccaggcgggggacgccgtggcgcgctactttgggataaagcatgggcaggtagtgaagatcatccggcccagcgagatggcaggcaggtacctcacctaccggctcatgcagtagccacctccctgacagcccctagaggcagacacacggacaatgacccccgtcacctgcaggatggatgcccctgccctgccggagtctagccccccagctctctcccggctgctcctcctctgggctccccaaggcaggcagcctccactcaagagctcccatcctgggatgagtcttcccatggcccagcccgtcccattcacctgtgtatttatgcgagatccagcctcaggaggtacaagacccccacagggaggtcacctgggggcagctggtgcctggcgtcytcgcccagactgcactgggtccacagtgttgggggtttggggcccgtgtctcccaccagccactgcttcctcccgggctctcagcctcccacccctcgtcttccctacctcagtggccctgatgcgtggtggcccccacccagtcttggctccttactccattcacaactgcgcaggctctcaagccaccacggtgtgagattccaactcagcagagttttcggttgttgtaggaggttgggtgttttcaaacattaaagacattttgagtaaataaatttgtatgtatgagtaaatacaaataaatttgtatgtatgagtaaataaatatgtaagattttatccaggcacagtggtgcatacctgaaatcycaacctcctagaggactacttgagcacaggagtttgaggtcagccttgacaacacagtgagtgcctctctctgtctctctctctgctccctccctcctccctctctatctctcctgctctctctctgatttctaactgaaagctgcaaaacattgctaaaggaaattaatgaagaacaaataaatgtttatggacaattctctgaaagctggaatgttaagatgtccattattttaaaattgatatataaattcaatacaatccctattaaaattacagtcaattttttgtaaaaattgacaagatgagtctaaaatttatacaaaaaagcaaaggaactagaaacaactttgagaaattacttaattttaagatttactaaaaagctacaataggcagggtgctgtggctcattcctataatcccagtactttgggaggcccaggcgggcggatcacttggggtcaggagtttgagaccagtcaggccaacatggtaaaaatccatctctaccaaaaatacaaaaaaattagctggatatggtggcatgcacctgtaatcccagctactcgggaggctgaggcaggagaatcgcttgaacccaaaaggtggaggttgcagtgagcccagatagcaccactgcactccagcctgggcagtatagtgagactccatctcaataaaaaagctacaataattaagagtttggtataggcataagcacagataaataaatcagtagaacagaaaagagagttcagtaatagatatgctaaattgatttttgaatgaggcaccaagtcaattcaatgggtcatttggggttttttttcaatgggtcattttttttttttaaacaaatgcttctggaacagtagaatatttgtacaggaaaaaaatgaaccttgatctcatgtcactcaatatacaaaaattaatttaagatggatcataaacctaaccataaaaaccaggactataaagtttytagaagaaaacatagaaaaatatctttgtgaccttaggagtccacgaacatttcttgaataggacacaaaatgcattaataaaatattaatagactggatttcatcaaaattttaaattttcactctttaaaagacatcatttataatataaacagacaagtcacacataggaaaaaaatatattcaccatatatgtatgacaaagaatatatttgtattcagaacataaaaatatctcctaaaactcaataatagaaagccaaccaattttagaaatgggcaaaagatttaaacagtcacttcatgaaagaagatacatgaatggtcaataaactcacaaaaatttgttgaatgacagcagggaaatgctgattaaaactacaatgagacagtatttcattcacactgaaatggcttaatccatttggatggctgactaaaccaaatactgatgaagatgaagagaaactagaactcacatacactgttggtgggcatataacaaggtacaacctcattggaaaactctctggcagttatgtataaaggtaaacatatatttacatatgaaccagtaattccacccatacgtatttaccaaagagaagtgaacatatattcacaaaaaaagaaaaacttatgtaagaatacttatgaaaactggccaggcacagtggctcatgcctgtaatcccagcactttgggaggcygaggcaggcagatcacttcaggtcagaagttttagatcagcctggccaacatggtgaaaccagtctgtactaaaaatacaaaaaccagccaggcatggtggtgctcacctgtagtcccagctacctgggaggctgaggcaggagaatcgcttaaacctgggaggcagaggttgctgtgagccaagatcacaccactgcactccagcctggccgacagagtgagactctgtctcaaaaaaaaaaaaaagaatacttacaaaaactttatttataataggcaaattctagaaacaatctcaaatgttaatcaatgggaaaatgtataaacaaattgcagtatatttatacaatggaatattactcagaaatgaaaagaaacaactgctgatatacacaacatgtttgaatcttgcagatatcatgctgagtgaaaaagaaaaacagacataacaaatatatactgtgtggttccacataaatgaaatccaaagacagggaaacttaattaatggggatggaaatcaaaaagtggttgcctctggaaagaggaggaattgactggaaaagggtacgggagaatttgttttattttatttatttatttgagacagggtctggctctgttgcctagcccaggctggagtgcaggggcacaatcatggctcactgtagcctcaacctggagtatgaaagaattttccaagctcatgttaatattctatatcttattttgggggtggtaaaattgagtcaatccaattgtcaaaattcaataaatcaaacatttgataaaggattaatatccaaaatatatgaagaactcaaataacgcaatagcaagaaaacaaataatctgattaaaaaatgggcatcaagttcaacagaactgaaaaggaaaaaaaaacacaagaatctgaatagacatttctcaaaagacgacatacgaatggccaaaaggcatatgagaaaatgctcagcatcactaatcatcagggaaatacagattaaacccacattggggccagttgtggtgtatcaggggaaccacccccaatatttcaacgtaggttcttttctgttttccctaagtgtcggccagtctgagaaatgaagggaaagagtacaaaagagagaaattttaaagctgggtatctggggaatacatcacatgtcggcaggttccacgatgccccccaagtcgcaaaaccagcaagtttttattagcgattttcaaaggggaggcagtgtatgaatagggtgtgggtcacagagatcacatgcttcacaaggcaataaaatatcacaaggcaaatggggacagaggagatcacaggactggggtgaaattaaaattgctaatgaagttttgggcacgcattttcattgataacaacttatcaggagatggggtttgagagcagacaacctgtctgactaaaatttactaggcgggaatttcctcatcctaataggcccaggagccctatggaagaccggggcttatttcatcccttatcttcaaccttataagacagacactcctagagcggccattttagaggcctccccctaggaacgcattctctttctcagggctgttccttgctgagaaaaagaattcagcgatatttctcctatctgcttttgtaagaggagaaatatggctctgttccacccagctctcaggcagtcagacttgatggttatctcccttgttccttgagcatcgctgtcatcctgttcttttatcaaggtgcccagatttcatattgtttaaacacacatgctatacgaacaatttgtgcagttaacgcaatcatcacggggccctgaggcgacatacatcctcagcttatgaagataacagaattaagagattaaagtaaagacaggcataggaaatcacaagagtattgatttgggaagtgatagatgtccatgaaatcttcacaatttatgttcagagattgcagtaaagacaggcataagaaattatagatgtgttaatttggggaactaataaatgtccatgaaatcttcacaatttatgttcttctgccatggcttcagctggtccctccgttcagggtccctgacttcctgcaacagtgatgtctcatgcccataatcccagcactttaggaggccaaggcaggaggattgcttgagcccaagagttcaagaccagccttggcaacatggcaaaaccccatctctaccaaaatatacagaagattagctgggcatggtggcatgcacctagtccaagctacttgggaagctgaggtgggaggatcacctgaacccaggaaatcaaggctgcagtgagccatgactgcaccactgcactccagccttggcgacaaagcaagatgctatctcgaaaaaagtaaaataaaataaaaatactttgaaactatattaattacattagtgtgatatggatgtagaaatatgtagataaataaaatatttttaaaatccagaaacaggaccatacataaataagaatttagttttctcaataaaggtggcatttataaccagttaggaaaaaacatacttatttaacaaatagtattagcataaatagctacttgaaaaaataaaaccagacctttacttcacattatatacaaaaaaataatggcaaatgtgctaaagagctaaaagtgaaaaacaaatttaaaaatcagaataaaatacaaaaagaatttataatcttaagaatgtaaagccctttttaaattatgaaattccagaattcaaaattgaaaagactgatttaattaaataaaaataaaaatgtgatgattaaatatactgtaaattaatttaaaagacaatactggtataaaatattaaaacataaaacaatattcaatctatatacaaatcaaaggttataaaaaggtaactgacaggagacatataactggacaaaaaagcctatcaaaagttgtctgacttcactgataatcaagggggaaaaagtgtctttatattatatttctcccaccaggttaataagagtttaaaaggtttataacacctaaaataagcaaagatgcaggaaaataagcactgttaattaataaatgggtaaactctttgtaaaagggaatttgatagtacttaaaatttcaaatccatatacctctggcccaggtatgccatttctaggaatctgttttatagaaattttgtttacatgcacaaataaatatgtattagaatcttcattatagtattggctaaagcctttaaaaatagaacaatataataggggaattaataagcaaattgttaaataaaccatgaaacaatcatatggaaagtcatggaactattaccagaagaaaacagaccaaattttctgacataacaaaaattttacattcatagtacaatttgaaaaacaatgcatacacaataagcctatttacacattttgaatatatgtggatattgtgtaaatgttcagaaaaagactggaaggatacacttcaaacatttcacagaggttacctctgggaagggtagtgggagtaagcaaaaattaagacaccatttaacattttgttccatatatcttctattgtttgaactttagcttgtacctcctttatctgattggact

SEQ ID NO: 93333 - DNA, 23797 bp, Homo sapiens
gtatctacccagaggaaaagaagtcattatgtgaaaaatacttgcacgcatatgtttatagcagcacagttcacaattgtgaaaacatggaaccagcccaaatgcccatcagtcaacaagtggataaggaaaatatggtacatatatatatatatatatatatatatatatatatatatatatatacacacacacacacacaaatatatatatatactatggaataatacttagccataaaacggtctaaaataatggcatttgcagcaacctggatggaattggaaaccattattgtaagtgaagtaactcaggaatggaaaaccaaacattgtatgttttcacttataagtaggagctaaggtacgaggaggcaaaggcataagaatgatacaatggactttggggacttgaggggaaggatgggagggggtgagggatagaaaattacacattggatacagtgtacactgctctggtgatgggtacaccaaactctcagaaatcaccactaaagaacatgtccatgtaaccaaacctgttccccaaaaacctactgaaatataaaaaaatgagttgattagcagaacaattattttgtagtaaccatccacaaattgttgtccaacttcaggagaatgctgtgcccagtgtcagccaggccatggagaaggaaataaccttgccaggagaaaggagtagcctgtgaatctactcaggatatggccagacccgcccatgcagcctctagtgaacaaagctcacccttaatccaccccactccgcagtcatacatatttgaaaatgcatttttggtcacaggagtacttggtgctagaataggaatgagccagcacaactgctatcagaaaactctcagatactatggatgatgatgccacatcatgctgtccctgaggttgcctaggcaggtctggccatgtcctgggtagagtcccaggctacttctttctcctggcaagagcactgggcttgctgacactgagcacaccattctccctagggtggactctgatgttgtggatgcacgagagaattgttctactaatcaattcaacttaattcaatctcaacttgtctcagctcaagttagctttgttcagctcatcgggattctgctcaactcaactttactcagcataattcatctgatgcatgcatctaggcttcccataaagcatttcttaagtacttacctgtcaaagtctgcattgagtctgggaatccagctggggttgcttccaccaaccaatccacctccctgttctaatctaaatggtatctgtgtattgtggagagaacactggacctacagcaggactgccctatgttctcaacttagccctgccatttacttactgccttaggcaattttcttaacctttctgagccacaattttctcatcggtaatgcaggaataaaaataatacctaatttgtggagggtttgtcagaattaaattcatagaaggcactcacaaatggtatccattaaatcctccctctatggacctataggaaagactaagcagaaaaaagaaaatgacccaaagctcatctgaacacctggagaacaggacaactcactagaaagttgtttactagtgaactatggtgtggtcccatccccaccgccatagtgcagtcccaggtcttgtgtctgctgtagattctccatgttcctaaaggtcttttttgacaactgcaccgaattatttttgggaaattgccatgacatttacccaagttactttctttgcatccctgggctcaacctgactctcgatttcatgtgctcagaatcagtacccgtgcatttgagttcatctttagcattgcacttggtgctatgccagttcttcatcattagcccattcccttacaaacagggagaaggaatggagaacaaagggaacagaaagagtggtggcaacctattcagcccagcagtccagcagaagactggcagaggcaaaattaaggacaccctgtagattgatagcagaggaaaaggagacaaaatttttaaaatgagcagcgggacatccaagaaagtgaagccacatcagggtgggttcccccaagcgtagatgtacgctcttgcctccacaacatagaccaccatgtcattaaacatcacacaccatcagtgccaactgtgatctgaaaatgggtgggcatctgagtcacatgatacccagtgttctgtattcttgggtccttaaacttaggaaggctttgccttgatcactcgttgttccccacttgttgctaaaatcaaaaccaggtttctcatctaaaagaatgccttcagttcagatgctacaggcttatctcacgtgaatatcctcttcccttaggtattcgatggtctcagatgcagaaacagaaagcattttcatggaacccattcacctctcctcagccattgcagccaaacagatcatcaatgaaggtaatgcaatcaaaakctgggtggaagcaaagtccagtggtcatctggagacccttagaggggggccattggaagacrtcaatgtgcctctcaggtgctgcccatcacgttaggaagagcagatctgcagaaggcagttctgccaaccctacctcctcaactttgataggatggaagtggaaataattatgcatcagtgtgaacagggacaaccagagaggcagcaccaatctgtccctagggcctcctgctcaatttttggttacctcaggggtcctgaggtggcttatggcagaggcacagacctgagagcccgagaaatggccagaagcatccagagggttctcttccaagggagtctagacttagacctgcacttccaccagtgcttaaagatgcttcaaactgaaggatgcatggggaggagggaaaggcttgggtggggagcacccaatattcaatatgttaatatttacacagtaaaattttgaagcagacaacatatagttatttttcactcaaagatacttatctggattagatgaatttttttctaatcaattttaaggaaataatcttttgcaatttctttcttcccctttcttctcccttctccctgggtagcctcacaactctggtgagatggggtggagtgggataaggtgcacactgatgaagcagggcccagctggcctttgggcttaatctctcaaccaccgctggtggccacaatcctttccttggtctttcattattagaatcacatgctactctttgtccattctaactctggtactggtcccctgacccatttgggtctccaccagggtctctagaggacatttggacctcttgcacacttcacatagaaccagaaatttgacttgctgttgctcactgttctgggcactctaggaggccccatcttctcaaagacccatctgctttgggggattttttttctttttcttccatacctggggtctctgttgtcttgctccaagatatcttgtcccaagatatcttgcccactaacccaggcagtgtcttcaccctggtccagttctctctgaattgctcccagcaccactatagctctagaaagtcttttcttcctcttttgtggttggaaatttccctaaccttccactctgcatcatctctgctttgtgcttcattctgtggaccattctccatgttttggttcttgataagtaaaagtccagctttaggaattgaggggagaaaaaaaataaaaaacattttctctctttgaaagcttcactttcaagtctatagaatgctatggacattcagtctagtttgaagccaaaagatgtgcaatgccttgttttatcctggctcttttctattcttcccttctctgggggcatcaaacctaagtttcattagccttagtggctgaagggctatagggagagaaaaaacaatatatgctcactagtgattacaggggtaaaaatgtgtgctgaaaaccttccgttttaatgaaagtctgcatatgccacacatccgagagtgtaggggagaaatgtgtgggctttactttctgctgaagaaatgtcaggtaatagaaagaaattgatgcagggagagaggcaagctctacagaggctgaagtgtgaaccagagacctagtgaaagcaggagttgccatcaggggtgaagggctgggacatttgtttttaaattgaaaagaaaagaaatggaaacaacaacctgctagataaatagccgaggaagacaacaccgtgtattttaatgaggtgtcaggagtcccattttttatatgtagtaagggaaagacatctaagtagacacgggaaggggagcggactgaatttgctatgaaagaccccaggagagccaggggagaaaactgggtagtggagaaaataggaacacttcatctatttttaaacaaaatagagctctgggattgcaggagttttcttctttctgcgtttgaaacggagatcagagaacgtttagagctgagccctgatgcagggatgtgggggtccctcaggggggttagaggagggaagagagaagggaaatgaaatcctgagccctaggcagaacccaaggctccctggatttgcagtccatgagcaacaagccctgcttacagacccctgggaggagcagattccacgaggggctggaccaagtctaccttccaaatgtggctggactctctgcagcccccacccagagactgcccatcagggaagagatggtgccatcaagaggctatggggaacacagaggaaacatctttccagcttcttttctctctctctctctattcagtattttggctaccatgtgagaggaacgattttgttctttgttatttttgtctaacttaaagaaagaaagcatcttacatttccccaaatttgataaactgtgagcaaatatattattagaagataaagattcaccccagatgtgagtgaattggggtttgagttcatctggagtttgagcttttctgacctgttgtcagaaaggccctgagtcacgttttgagattagaatgagagctcatggccaacctttgccacctgtctgtgggctgggaggctgagaatcataggtccttacattctagtagggggaagaagacaatacaagaaataaatcagtaaattaggtgtatattagaaggcaatattgcataaattactgctgaaagttttacttttcccagggttatttgcaatccatatgtaaaagagtcaaactaacagagtgaattatactatgaatgaatgccattcactcatttggtaaatacttctacttttttttttttggtttttttttttttttttgagacagagtttcgttctttttgcccaggctggaatgcaatggcatgctctcagctcactgcaacctccatttcccaggttcaagtgattctcctgcctcagcctcccaagtagctgggattacaggcactctccaccacgcttggctaattttgtatttttgtagggacagtgtttcaccatgttggtcagattggtcttgaactgctgacctcaggtcatctgcccaccttggcctcccaaagtgctggggttacagacgtgagccactacgcctggctggtaaacacttctgagcatccactttgtactgggcactgtgggagttattaagtatgaatcaaagtacacctaatacttaaggaacttggtctaaaaaattatcgaccagcttcagagaagcatgggagggagtaaaagaaattggatcccctttacccacatctatacagtcttcttgctgaccctgattacaagtgtttgggccagtgcagcaggtaccctgggcccaattaaagtccttcctgggagatcctgctggcattcagtccatgcccagaatcctggcagcaaactggccaagagcatgttctccccaggaacaaggaaggccatgatgttcctaactctctgatgagaatgctgcctgtctcctctagaactcaagccaccgggggtcagagcwgacgcagagtgtccaggcatgctggagtctgctgaacagctgctggtggaggacctgtacaaccgcgtcagggagaagatggatgacaccagcctctataatacgccctgtgtcctggacctacagcgggccctggttcaggatcgccaagaggcgccctggaatgaggtggatgaggtctggcccaatgtcttcatagctgagaagtgagtctgactgctcttcatgaccctttgtcctaaccctctggttagtgcctgagacagacgaaactcccccaactttcaccaaaggcgcccataggtccatccagcacaatgaggctgcctagccacttaccctgccccagcccagagaaaggcccctccatccacctgcattcggaggtctccaggcaagatgccgccatgactgcttatcctttgccctcttgccaggactctcttgtccctcaagaaggcctctgggcctcctttcctgccacagagtcttgccgacttcaccatctcatgacatctgtagctaccacagaaccggacactaggagccattgacaataatactgacatgcatatgtaattaccaacattggaaaatgttcacaatacagtaagaaagaattagattacaagagaagacatgtacagtgtgctgctaattgagcaacagatgtatgtgtatgtgtgtgcatgtttttgcatagacaacagttaggaaatgtgagaaaatgtgaacaatgtttctctctgggaggtgtttttacaagcagtttttattttcttctttagatttcctttaacttgtacaggtttcctaaggtagacattgtttttataatccaaaaactattattttctaaaagtttatcagcggtttccagaacaaaaacaactcactcacatcctatttctttaggatgccagtgcataattgcgaccacttggttaattagtgaaacaaatttttgctgactcatcgaatacttaatgagatgttttcccagtgtaattatccagatatccagaagcaaaggaggaaatttggcctcaggggagggaatagggaaaacagctttgaacagtgggtcttatcttcaccaaggagtaatcagttgcctagaacttgatcctcagagctgggcaccaagtcttaagtgatctttaaatagatcttcagatacagaagcattcatcttacsgtcactaagaacccaggcatcgccaggtatcctcagctaaaagcttttgttccttctcggrcaacctgtcctcagggcctcttcaaactaagctgcacttattcagctacagcaaaaagagctctgaactagaaatctaaaacactagttcttgttgtctttttctcctttcacaatcttgggaagttataagagctctcagattgagttttataatcttcaaatgggaataaaactagagttcctgtctacttcttaagtttattgttaggataacataaaataatgcatgtgaaaggattttgacaattatagcatgccatattaatgtggaatacacttaattttattatttgtgcctaccacttttgtgccttgatgaatgtccattcccaaggcatggggttttaaactagaagtctctggatcattcaaatgtttccttacacatcattttgttggcctcttcatctcgcccttccttgcctaactgcatgtcttttctcccttttgctgaggcyaagtcatcaactctttctataatggtatttgcagtgatccccagacaaccaggggcagaaaaggaggcacttgcccagctgtggccctagactggctgaggcaggctcaccgtcacagtggtgacacacctttctagttccgactcttgcaaacaggtccctgmctyttcccgcaggagtgtggctgtgaacaagggsaggctgaagaggctgggaatcacccacattctgaatgctgcgcatggcaccggcgtttacactggccccgaattctacactggcctggagatccagtacctgggtgtagaggtggatgactttcctgaggtggacatttcccagcatttccggaaggcgtctgagttcctggatgaggcgctgctgacttacagaggtgagagggatctgccgctccaggctgctggaattccackggggaaaagtaatgtggggaatgttatgaaaacctgattagttggcgtgtgtgaggggtatctgtcttaagaaggctgttttctctaagaaaaggagaaaagacaggataatcattcatccagtaagtaattactgagtgcytagcaagtgccaactactattctaggcactgtggtgaaagacacaggcaacgcttccagcctttgactgttacactgtaagaggggacagaaaatgaaaaaaagagaaaaaaatgtcagatggtgataagtgtgaggcagagactaactagaacaatgtgctagagtgactgactagctccttggagagcatgggggaggaggccttctgacaatgggacatttaagccaagtgacaaagggctagccatgggagaactggaagaagagcattcctgcagaagagaactagtagtgcaaagatccaaaggtggaaagcttggtgtgttcaggaatcaaaggccagtgtcgatgagcatggtggatgaaggttgaagtggcagaggttccccatcaaacaggaagctaaaagccagggtaagaagttggagcggcaccttgatctgatttatgttttggaaaactccctccctccaccttggagaacagaccgagttgggaaggtagagagtagtgctttggggttgctattgctatatccaagtgaaaggtgacatgagactagtctgcagaggtcacaggcctcagggaggagaggtggagcccaggcaatggggccgacagcctggctgggaagagttgaggatatggtgtccagaaacctgggtttgagtccaggatttgctacactgtatatacaatgtgaccttgggccatttcctttagccctaggaactgcagagaacaaagacaaaaatatcaaatcctaaagttgctgtgaggaataacgttttaaaaatgcatataaaataactccyttgggacaacacctggcacaataaatgctttaaaaattatagccattgctataataatattgttaatgatttcctggaaagggcattgcctgtcaccaccaatggccaggttgggtaacttctaagggaaaatacaagcacacatattttcttttttttaattatttttactttttatttttagagacaggatgcagctctgttgcccaggctgctggagtgctcactatagccttgacctcctgggctcaarcgatcctcccacctcggcctcccaaagtgctgagattacaggcgtgaaccaccatgcctggccaaatacacatattttaaatatgtatatgtatgtgtgcgtgtaaattacatatatatatatatatatatatatatatatatatatatrtatatrtatatatatatacagagagagagagaggtatgtatgtgtatatatacagacatgtatacacatatacatatatacacacatacacacactcacatatatatacagttttcagttttctccttttttcaatgcttaaaaactccttttttttttttaggcggagtctcgctcttgtcgcccagtctagagtgcaatggtgccatctacggctcactgcaacctctgtctcctgggttcaagcgattcttctgcctcagcgtcccgagtagctgggattacagactcccactaccacgcccagctaatttttgtatttttagtagagaggggatttcgccatattggccagagtggtctcgaactcctaacctcaggtgatccgcccgcctcggcctccaaaagtgctggaattacaataagccaccgcgaccggccaaaaaactccttctttttaaaatgtaggacgtttgaccaacgtgggattgaatgggtctgtcggtcgcctgcggcgtaaggagtgtgtcccacctcgctcgcaggtcctggagcgcaccggcagacctcgaggcggagcgggtacgctcgcaatagctccaggcgtgtggacacggccacgagccggcggtcccccgcagcatcccagggcggatgaggcagatcccagaatgtggaacgcatcccagaagcgatagccagccttggagggtggagggaggaagaacgagcccaaacgcggaggcggagtcggtgccaggagccgcgagggctcagcaggaagtttcctgtcgcgggtgtaacccaggcgctgccttccctgcagcatacccaaggcgggctgggtcatgctggccaggagccagcgcgtcagctaccccggccggagaccgtaggtcggagcgctgagtgtccagatcccttgcagggtccagtgcgccctgcgggcatctcctcccgattcagcctcactctccctgccaggcagcgaaaggcccttattgttgctgtgcttgttgcttttgtgggtccttcctactccactacagagagttcgtggcatccctagaattactccctgagccttaggtcctgtggttttctctgctttaggagacttgggagtcagttcttgaccagaacagggaaagaaacacctggcgccggcgttttacatgataatcacaaagagcctatgagggggtgttgttatttacattgtacacactgggaagttgagacctatggaagattaagtggtgactttgtatggtgcacggtgtaataatcaagactctcttggttgctagtgggtggaaaccatctcaaactccttcacaagcagcaaaggcattaattctgaagatgcaggaaagaagccaaagacaggagcctggcacgccgggcaggcctggaacaaggactggacgatctcaggactcttggtttccctcttctttctctctctacttcagatagcaaatggccatccacaggcctgacattaaactagctaatttcctgcctcagtcccatttccaaatttcctggcgaatttgtcagatactggtctttttgtgtaccctgagttccatcagcagtggcaagtggggtggcttctgggcaaatacaggtgtggagggggataccttctgaagaaagggggaattatgaattgggagggtatagcacaattgcctgccatataaagacatactgagagtgtagagaattcaaatccaggcttgctcaartctgatgctctccccagtagctgtactcttaaaaaaaaawtttttttttgaaggtcctttttttgagacagagtctcactctgtcacccaggatggaatgcagtaatgtgacctcagctcactacctccgcctcccagattcaagcgattctcaggcctcagcctcctgagtagctgcaattccaggcacgcaccactactgctcagctaatttttgtattttcagtattgacaaggttttaccatgttggccaggccagtctcaaactcctgatctcaagtgatccaccacctcggcctcccagggtactgagattacaggtgtgagccactgcacccagcctgtactttycaaattttaaaaacagggaccctcttcacaatcagccctgctggtaatcaaaatggtaactctgctaattagaaaaacactaccttcctcaaaccattttactgttggaaaaattttcaccataacccaagtgtattttgatattttgattttgatgtgaagaggccccctagagttgtgcagagaagaatctatacagcatcagcctgcctctaacagagaagacagaaaatcctgttgctgctttggatgaagtgggtaaacatccctgagtctcacccacccagcctctctcttgtccctctggctgccctttaggctcctcagaggagtcccagtgtgctaggaacacagcaggaaaaatgtggcaccccaacctggtctccgccagactgagtctaagtagtatttgatgctcctatgaagaagactggctggtcatgtcctgaagtgtcctgaagtgagttggtctcgtgattccacctccaaagaaaaccagtgagacttagagactagccacagtatatggtagcctggtcagagggtggaggggaggtccttgtaasggacagctaagccctgactgaggacgagaggagaaaaaagacaagtgcttctatagatgctccttataaggcttttrcttgtttttctttttcttttttaagaaacagaatctcactctgttgcccaggttggagtgcactggtatgatctcagctcactgtagcctttrccwcctgggtttaagtgattctcctgcctcagcctcccgaatagctggaattacaggtgctctccaccacrcccagctaatttttgtayttttagtagrgacagvgttkygccatgttggccaggctggtctygaaytcctggcctcaagtgatccacccacctcrgcctcccaaagtgctgggattacagatgtaagccaccacacccttgtttgtttatttttgagacagggtctcattctgttgcctgagctggaatgcaatgggacaatcaccactcactgcagcctcaacctcctgggstsaagtratcctcccacctcagcctcccaagtagctgagactacaggcgcttgccatggttttttgtttttgttttttttagagacgaggtttcgctatgttgccaggccggtctcaaactcctggcctcaagcgatcctctaacttgtcctcccaaagtgctgggattacaggtatgagccaccacaccctggcctgtggctttgactctgctgatttacctccctctagtggctgctggctcttggcaataacacctttcatcattactgggcctcaagtcccctgaattttctgtctctgacctcctgtgtgaccaagacatgaccttaactgctgcaaagatataatactgaaagagtcacctcccatctcatattgttagagaggayttttaactgawttagcaaacatccccaaagactgttggcaagtagattgatgagagcagggaggaaggtctccagtggtcccagtctgcattttaaacagctattacaatgaaggcataggaggcatatttgtcacattcatgaaggatgcaaagccgaaaaggaggccaggagcaggtaactgatctgttgaatggtagagtcaagactcgcaaaagctcctgtaggctataaaaacagacatccaccaaaagatgttagtaggaatttgtgaaattatccttaagtttaaaaatgactgcacattaaaaggaacacgacttaattgcagtttttaaaaaacgttttacaggtttcagttgacggatgyaaaagataacttgagttcattgtgtgacatatcctcccatattgcaagtttatatggtatcagtaaagccccagtgacccaaacaarggtggggaagggcccattctactctatgtgagtgagtcagtccaaacctgaaatatcttgctccatcctgagtacaaactcctaaaaaaaaaaaaaaaaaaycctgataaattcaagttttgacctagaggaaagtagctagaatagtaagggaacatgagaagatgttcaaataatgtttgaaggactcaaaatagccaggaaaagaaaaatatatatatttcgggaagaatatgatagcaatcttgttaaggatttttgtataaaagccctgtttcatacaatgtatccatagttgactttataatgtcagagcaggagtactggatgcttgttacagaaatttatacttttccctaacatatgaaaaaaattttgaagcactagagtgatccaaaaatggagtgaattgtgtctatgtgtccatgtgagctaatgagctccctgtcactggaagcattcagcagtggctggataacaggtgtgacaggtgatccagcatcagggatgttgtaaagggaattctcaagtttaggatgtgacttatgatgcttcccaacaccaagattctatttctctgtgattcatttatcttagcttctcattccttttctgctttatcacccttccccctgttcttgtatttctcctccctctgttgctcggtttgtgaggagaaagtagaaatgcactccagtgtttcaaatacagggccagtggggattgtgatgtctcccatctgtaatatggggtcagtgatgctcagccctcctgtgtcttgagcccggatgaacttcagaggcaaagtaaacaccttaagtgcagcatattaaaacagcacttaccaaagaaaacaaacaaacaagaacactacaaggaagccactgtcattacatcattttctcttgtgttttcatttcagggaaagtcctggtcagcagcgaaatgggcatcagccggtcagcagtgctggtggtcgcctacctgatgatcttccacaacatggccatcctggaggctttgatgaccgtgcgtaagaagcgggccatctaccccaatgasggcttcctgaagcagctgcgggagctcaatgagaagttgatggaggagagagaagaggactatggccgggaggggggatcagctgaggctgaggagggcgagggcactgggagcatgctcggggccagagtgcacgccctgacggtggaagaggaggacgacagcgccagccacctgagtggctcctccctggggaaggccacccaggcctccaagcccctcaccctcatagacgaggaggaggaggagaaactgtacgagcagtggaagaaggggcagggcctcctctcagacaaggtcccccaggatggaggtggctggcgctcagcctcctctggccagggtggggaggagctcgaggacgaggacgtggagaggatcatccaggagtggcagagccgaaacgagaggtaccaagcagaagggtaccggaggtggggaagggaggaggagaaggaggaggagagcgacgctggctcctcggtggggaggcggcggcgcaccctgagcgagagcagcgcctgggagagcgtgagcagccacgacatctgggtcctgaagcagcagctggagctgaaccgcccggaccacggcaggaggcrccgcgcagactcgatgtcctcggagagcacctgggacgcatggaacgagaggctgctggagattgagaaggaggcttcccggaggtaccacgccaagagcaagagagaggaggcgrcagacaggagctcagaagcagggagcagggtgcgggaggatgatgaggacagcgtgggctctgaggccagttccttctacaacttctgcagcaggaacaaggacaagctcactgccctggaaagatggaagatcaagagaatccaatttggatttcacaagaaagacttgggagcgggagacagcagcggtgagcccggtgcagaggaggcagtaggggagaagaacccctccgacgtcagcctgacagcctaccaggcctggaagctgaaacaccagaagaaggtgggcagtgagaacaaggaggaggtggtggagctcagcaagggggaggactcggccttggctaagaagagacaacggaggctggagctgctggagagaagccggcagacgctggaggagagccagtctatggcaagctgggaggcggacagctccacggccagcgggagcattcccctgtctgcgttctggtctgcagacccctcagtcagcgctgatggggacacgacgtcagtactgagcacccagagccaccgctcccacctgtctcaggctgcaagcaacatagcggggtgttcaacctccaaccccaccacacccctgcctaacctgccagtggggcctggagacaccatttccattgccagtatccagaactggattgccaatgtagtcagtgagacccttgctcagaagcaaaatgaaatgctgctgttgtcccgctcaccgtctgttgcaagcatgaaggcagtaccagcggctagctgcctgggggatgaccaagtctccatgcttagtggacacagcagctcctccttgggtggctgcctgttgcctcagagccaggcaagacccagctctgacatgcagtctgtgctgtcctgcaacaccacactgagctcacccgcggaaagttgcagaagcaaagtgagggggaccagcaagcccatcttcagcctytttgctgacaatgtggacctaaaggaacttggccggaaggagaaggagatgcagatggagcttagggagaagatgtctgmgtacmaaatggaaaagctggcctcagacaacaaaygcagctccctcttcaagaagaagaaggtcaaggaagatgaggatgatggtgtgggtgatggggatgaggacacwgacagtgccatagggagcttccgatattcttcccrcagtaattcccagaaacctgaaacagacacatgctcctccctggctgtctgtgatcactatgcaagtggcagcagagttggcaaagagatggatagcagtattaataagtggctcagtggcctcaggacggaggaaaaacctcctttccaaagtgactggtctggaagttccagagggaagtacaccagatcgtccctgctcagggagacagagtctaaatcctccagttacaagttttccaaatcccagtcagaggaacaggacacctcctcctaccacgaggcaaatggcaactctgtaagaagcacttcacggttctcatcttcctccaccagggagggcagagagatgcacaagttctccaggtccacgtacaacgagacctcaagttcccgagaggagagcccagagccctacttcttccgccggaccccagagtcctcagaaagggaagagtccccagaaccacagcgcccaaattgggccaggtccaggractgggaagatgtggaagagtcatccaagtcagacttctctgaatttggagccaagaggaagttcacccagagctttatgaggtctgaagaagagggagagaaagagaggacagaaaacagagaagaagggaggtttgcatctggacggcggtcccagtatcggagaagcamtgacagggaggaagaggaagaaatggacgatgaagccatcattgctgcttggagacgccggcaagaagaaaccaggaccaagctgcagaaaaggagggaggactgagctggggaaaatctgagaacactgaaagaaaccactcacgttagcatagggctcagggcacacgttgccaccactcatcgcaggatgaggatacagagargatcttccagaggggcagagccaaaatgagaggtaccaagcataagggcagcagaggtggagtagggaggaggcaaggagggggagaaccatcaatacgaatacgaggtccgaatgctggaccaactgataccattttctgttgctcagcgccctctaagctttggtgtttcacttaatgtatttgrcagtgttcatcacaggctagagaggtgagcttggaaaagcactgtagtttgtcagagactccagtttacatccagaaaggccatgaacataggacacgcttctgtctgtagaggcttcatatgagacccagaaagtctatcctatggcaagtctgacctctcctggcaatgctcagttctgattttttttttttaatgttttgagtctccattaaaaatggtatgttggcaaatagttcttctttattctggtcatgtttaactttttggatattagaagaaaaccactttaaaagacacaaatgtattatcctgagccagtctcaccttgtttcacaaaagctgtgcctccagacaatgccatcatagtctcattataaaaaataacaaacaagtatttggcctatgatacaatacagcaggagattacacttggaaaacccttgagagtaacaaagggaactagagaaagagagaatgagttttattgtggtgagaatggcaagatgtaaagtagagagaaggcctctctggaaggcagaaaaacaaaaacagagcatggtgagagaagaaaataaacccagtacaaggagatggagacatgtttttataaaatctagtggtcaccttcgcttcttattcctaggaggatcactgggtaatgcagtggatagtacacttgattcttctctgtgctctgagtgggctaagttggtgagaatgttttacctttgttcccaaggcatttcttcccctaaaacgcaggttgagttgccaaatcagagagacactttgagcactttacaacagtgattgacggactggtttctacagttcctttcaagctgcggcaccttgaaggatttgaaaacaactttgtgctatgcaggggtctgagatgtcttgatcaatcaaaaaatccaattcaggtgacacaaatggtggtgaaatgattaatgagagggaaaaagagtaagaagtaatccaccaatgagacaaatagtacgtgttaattgtgtgatcattttttccaaaaatggagtttcatgggacgtggagattatgtaaccttcctatgtagattagttcagcatcacatatttcaaagaacacaaagataaatatatcaaggcaaacaggagctgacttgaacacaaactcacaatgccacatagctgctgttaaagcaactgaattaatttgcttgccttccctctatcactttagcccaccattcagttgctgatggtactcatctctccttcactgattgagcgggggagaagaggacttgggaaaaaaaaatactgctcagtctttgtcccatttacccctttttcttcatttgttcatctttagtcagtctcagcccctagtttccaatgctggacgggtcattcccaccacagaaaatggtgttattagcctggcatggtgctgcgtgcctatagtcccagctacttgggaggctgagataggagtatcacttgagcccaggagtttgattccagcctgggcaacatagcaggacccccatctcttttttaaaaagtgttgttctaatacaccccacagcaagaaggctgattgtggtccattttaccttctggatgagctctcatttcactcctatagagaagtttctgatataggcacaattaattgggcatctactctagaaggctgaccttctggagagaagaatcggaatattctttgatgggtcccctgtgcccacccataaggagccaattagctcagatctctatacatgtctttttgttttttcactataactaacaaaatatataaattgatctcactcatgtcaaagtagacaagaaattaaaaaaaaaaactattcttagtaactctcaacccataccccactgaataagtgttgaacgaacatttcaagcatattggtttaaagagtcaccccagtttttctccatccctggatgtgagtctggggaaacagaccatggagactgcctagtttgcttttagttgagctcttaggctagaggggcaataatgacccccatggcccacatatagaccagtttggctcaccagaggaaaccagatgtctcacagtaaagctctcaagaaatgcctttgctttctgtgtctctaaagatagctgcctcgagatcctgtactcagggaggtgtctgccagagaattcagaattcttaatttaacttattcctggagtttagagtrtattttgggaaatcacatcaatagaaagtgtattggatttatcatgaacttgaagaaatatctgagatttgaagtgttagaatcccaagggtgacttctgaattctacctaacctagcgtgttaagttgcaagccagtcttccagcctccgaatggcaattaaagatatctcagtaaaagtccccacaggaaacagatggcacacccaaagtggtgactgataagaatttaatgcagggaccatttacagaggcataggaaggaacaagggagccaaaaagaaatagtaaagcacccgtgtactagcaacattgataccaccctagcactgaagggacaaagggacaaagctgtttccagagcccagcaagagtcatcaccatggagaatgccacctgacaacctggcagaggagtagggggaataaataccccagtttttgctcctggttttctgttcaatgctagtaacttccatggactaaacctaactggaagcaagtgggtaggagagcagagtagtctggagaaggacaataagtagatctggaggcaaacagaaaactaccagcacagaggtcaatatgtttaaatggagaggccatctctgtaggagtttttccattgatgtctgtcttaaatgaccaggaacactatacaatgaacacaaaatcaactctctcttaagaattcatcaacaggccagttgcggtggctcacacctataatcccagcactttgggaggccaaggtgggcagatcacctgaggtcgggagtttgagaccagcctgaccaacgtggagaaaccccatctctactaaaaatacaaaattagctgggcatggtggcatatgcctgtaatcccagctactagtgaggcaagagaatcatgaacccaggaggcggaggttgcggtgagccgagatcatgccattgcactccagcctgggcaacaagagtgaaaccccatctcaaaaaaaaaaaaaaaagaattcattaagaattcaaatagagtttcagctacataaaaccaactatcagagtcaatgattttgttttacagaaaataaaaagaggaaactgacctgaattacttgagcccactcccgagtcacagaaacagttcactaggagaaatctcccacgttattcagcacagagaatcatgcactgaaaggggccctacaagatgaaaatcccgctctgactcctgaagtgagggctgggtaagagaggggcagagagagggaaaacagatttttttcttcatccaaagttaaggccctggaggaaatgagatatgtgggggctgtgaagaaataagaaataaggtatcaggcagcatcccagcaggaagcagaaggcatgcccaaattagggtgattcaaagggggcgttttctaaaggagctgtttacaaaggagtggacatggtacaacgtacagggtacagggacagggaaaccaccaggcacagtgcacactccaaggccaggggcctctcctaggtctggagagacaagggaggagctgttactgggcccctagagacacagagggctatgtggaggggctgtcttaagagctgagaccttgcgtctagggagccagcctgatgcgaccccataggaaaggaggcagaggactttagcccctcttactctgacctccrtcaacctccccacaggccaaacccaaccaaaacccatagggaagagagttggtgtgtgcggtccattctgtcagccccatggggccccagggagagtggggagaagggtggatgtagatccgaaagagcaaacagaagatatacaacaagggcgaaatttcaggctggtgacatgttgttggtgctgagttatgaagaccctgcttttagtatcttgaatattgccagaagaggaaatactgatttttctggactcttaaaacttatttcttgtgtcgtttgggagaattatcaaccaacgacaactgaataactagtaacctgccttaaagcatgctacatagaattgcctttgtgtgaagaatcttgaatacaaatctatacctgttcttaggaacatctacacttcggagttctgatccaaggctcttgctttaaagcatcacctattttgtgaaccctgcaataagtcttccctcagctccacttgctctgcaagatgcctgccatctgtcccaggtgccacacagaaaccacctgcccaccaccctcccacacacatacatgcacgagtgaatttcatgtaaaacctgtattttaagtcacaccatcccccaaaatacctgccagatgtagtgtaaacccatccagccattttgcctcatagaggtaattaacaatattctataattttaatctcataggttccaaacacttcagcaatcattttcagacactgtgatccttacagtgtctgtaagcaagctgtgcatatagatcagccgatgcagtagccaggccacaccactgcccgccattcagtcccctggatcctgagtggaagtccctcagagcagggagaagacccacttggattagcttcatctgtctctaggttcctgaagacagaagttggattcacctttggtggcaaccaagaaagttgcctcaaaccaatcattcgattccatttagctcagcttgataaatgtttcttgaatgccaaccttgcactagcactgcaccagggtactgtgctatcaagagcgcatgctacatgaagtcatggaaggtggagacaatctcaagttagagaaaggcccactccctcatgagaaagaatttttgaaaaattgtctgagttaaagaaccctcaagctatctgggtctgaatttaatagtgtgccaagtatatcagaagagcatcaaccactcacgcttgaaacctcacagtcgggttcgacaccttcctttgcctcttgcctgcacctgggccaggtaattctgcccattgcatttgctctctccattctgttatcactaccacctccccaaaccaggtatcagagtgaagccctcaagaaatgcctttgctttctgtgtctccaaagatagctgcgttgaagctcttggtgtagcgcctggcacgtggtaaacatttaatataagtgttggttgtttttcaattggattacaaagttgtgttctcaactactttaccacattatgtccaaaataactgacaaatattatagaattatatataacaatgtacaattactgaattctgcttaatgctatgaactgtctaggcacattaaaatcatgtcttatttctttataaccccacaataatcctgaggggtagacattcttatccttatgcaccaaattcctataataagaagcagactgtggcaagcatggatagacataaacaaagtgctgtgcgatatcagaggagggagagcctcatgtggccaaggtggctggaagaggtttatcagaggagaagctcctagaagaaccttggagggtagggggatctcagcagggagatwgtaggttggggtggggaagctgagccagggggaaaagcctgagcaagggcacagaagggtgttccaaatgtggtgcggttcacacatggccggaaggtgaggtgctcgaagggagtaatgcggtagggctggaaagggaggggaaagtggtccttgaatgccaagcgaagaagtttaagattcatttcataggtaataggaaactgttagagtttttaggcagaggaaaaaagaaccagaattgggaacttgggaaattaatttggtcctagagtagatgcaaaggaggtgaagctggaactggctaacaaggttactgcagtagccaggtggtatataaaggagaccttgtttcccacatagccctctgtgtctttactatatctttttggctcccttgacccttcctatgcctctgtaaatgatccctgcactaaattcttatcagtcaccactttgggtgtgctgtttccttttaagcaggaaaaaa

SEQ ID NO: 93334 - DNA, 12782 bp, Homo sapiens
cagattacaccactgcacttcagcctgggcaacagagcaagaatctgtgtcaaaacaaaacaaaacaaaacaaaagaatagtttgatggccatatagttcacagagtttatactacgtctagatgatctgaggaattcaaagtcagctctgtgtttctccatttgttcaagactacttgtatgcctctctgaaaaaaaaattttttttttttggagacagagtctagctctgttgcccaggctggagtgctgtggtgctgtctcagctcaccacaacctccacctcccaggttcaagcaattctcctgcctcagcctcccgagtagctgagactataggcgagcaccaccacacccatctaatttttgtatgtttagtagagacagggtttcaccatgctggccaggatggtctctatctcttgacctcgtgatcctcccaccttggccttccaaagtgctggcattacaggtgtgagccaccacacccgactaattgtctctgaaaattttatatttgtgtttgttgaggtccagcatgtttcatttccttttttaaattttagattcaggggtccatgtgcaggtctgttacatgagtatattgcaaaatggttaggtttgggctttcagaaaaccaatcaaccaaatagttaacatggtaccccatgagtagtttttcaaccctgtctctcctccctcctccctcttggagttcctagtgtctattatttccatctttgtgtccatgtgtactcattgtttaacttccccttgtaagtgagaacaagtggtatttgattttctgtctctgagttatttcacttaggataatggcctctagctccaaccatgtttctgcaaagggcataattttattcttttctatagctctgtagtattcaatggtgtataatgtggtatataacacattttctttatccaatcaaccactgatggacacttaggttgattccatgtctttgctattatgaatagtgctgcaataaacatacaactcctgaaatgtttcattttattttattttattttatttcgttttattttattgagatggagtcgtgctctgtcacccaggctggagtgcagtggcacaatctcagctcactgcaacctccatctcctgggttcaagctattctcctgcctcagcctcctaagtagctaggactacaggtgccccccatcacacccagctaatatttgtattttagtaaagatagggtttcaccatgttggccaggctggtctggaactcctgacctcaagtgatctgcccaccttggcctcccaaagtgctgggattacaggtgtgagccaccrtgcccgggtcctggaatgtttcttatcaagtgtatggctgtctccatggccaagcataaatgtcaagttcttttgcatgcctataaatgttcttcatgatctgacccctacctaccttagtagcctcatttctcactctttcttgtggccacagtatgtttcattcatcatgaacaaccttaatatgccttattctattgtttgccttttatttttatagatgccttcccctttgttgggatatgcatctggacattcccttcttatcttcaagatctatttccaatagctccttctttttaatagggcaaggactaagatgaggcaagtgaggtgtccgaagtgctaattttgtgcccctcagcacctcctttgccctaccccgcacctagcccagctctttaatgcctccccagatatactccactccttccccaagaacagtctgtcattccttcctcgtgaaaactctgtacctttcctcattatagtattgattgcactgggttgcttttttcttagaacagagactatgttttatcatctttgtaacaccagcaccatgactggcattgtgtgtttgatgaatagtaaattcatggccaatctatatgagcatttcctttgttccaggcatgattctatgcactttacttgagttgacttatttagccctcacaacaacctatacaaatattactacctcagtttttatagataaagaacagactaaaaagcactaggtaaatcccacaacatcgcacaatgagagtggcaaaaattgggatttgaacctgggtccttctgacgcaggaccctgtgtggataactgaacaacgtgactattcccactatattacactggataagaatcaaggagcaaaagactgtttctcttatgttattcggaatctaaggcaatcactacaaaaatttctgtctcaagggcagggaggctttatgagatgggatgacactttggcctattgtgccggtgaacaaagtctccaaatgctgactccttgtccagtctccaaaggctccagtattgggggagatgaacctgagtgctggtctcaatctagaaatgtaaaaacaaaaggtccgagcaatgctttagacagcattgaccaaggacaattattgtccaaagggatttgaaccctatcgatcagccagccggaaaattctgccttgttggctggatcatttgctagtcagaggttatagagacaacattctcctctgtcagcccaaatccatcagccatgagcagggagcaccggcagctagtgtggctgcttcccgctctgcagtgttaacttcttacataggacaactaactccccatgcttttacattctctgctattcacagtgtgtacctgaaaacagatagttgttttctaggtcaaaaaatattcctcatcaccataccagtgggaaattgatgccaagccagaagtcccaaattcaaatgcttgtcacataaatgagggaacttggctgagtgaggagtagggtaaactataggccatatgcttgttgcttgcctgcctgcctgcctgcttccttccttccttccttccttccttccttccttccttccttccttccttccttcctttctttttctttcattttgagacagagtcttgctctgtcacccaggctggagtgcagtcgtgtgatctcggctcactgcaacctccaccttccaggttcaagtgattctcctgcctcagcctccctagtagctgggattacaggtgcatgccaccacgcccggctaattttttttgtatttttagtagagacagggtttcaccgtattagccaagatgatcttgatctcccgacctcgtgatccgcctgccttggcctcccaaaatgctgggattacaggcgtgagccactgtgcctggcccacatgctttattaatcatacctttttattttctgtgtttctgatgctttgacagctcaggtcttgctgaccctggaaagactgtctctcccaggtactgtcaattcctagagatagtaaatgactcacctgtgagctccttttatatgcaaattaaccaatccagagtggatacccccagacatctccgttgtacccccgaacaccagatcctttcactctgggccactattccctgccctgatcaccccagagtcaagcactagacaactagggacaacccctacaccccaaagcccattgaaagtattcccactagccaattctaaacctgcttaccctgccctgcctcacgtttgaccaaggaaacctcaataaagattcttgcctaaattttccctcactctttctacctcctgcccaaccctagtacctctgggctcaagcgatcctccagcctcagcctccaagtagctgtgacttcaggcacaaaccccacccagccacaaactgcattttcaatagcaatcatccccaatctgttggccttaccatatgtgaataataataatcaaaacctacatttaaaaacatatgcccacatagagggaaagagcccctactcatttcttgatgattattgccagccacgaaccagcccaataatacattctgatttttttttaatataaagtctcactctgtcacccaggctggagtgcagtggcatgatctcagctcactgcatcctcacctcctgggttcaagccatccttctgcctcagcctcctgagtagctgggattacaggagcccgcccaccaccacgcctggctaatttttgtatttttagtaaagaccaggtttcaccatgttagcaaggctggttttgaatgcctgacctcaggtgatccacccaccaaggcttcccagagtgctgggattatgggcatgagctactgtgcccagcccacattctgattttttttttttttttttttttttttttgcgacggagtttcactcttgtcgttcaggctgaagtgcatcggcatgatctcagctcattgcaacctcctcctcccaggttcaaggaattctcctgcctcagcctcttgagtagctgggattaccggtgcccaccatcatgcctggctaatttttgtatttttggtagagatggggtttcaccctgttggccaggctggtctggaactcctgacctcagatgatccaccctcctcggcatcccaaagtgctaggattacagacgtgagccactatgcccggcctgtgactttttttttttttagagaagctagaagcctggattttattagcctccgaaggtttaatgttgatttaaaatgttgtgttgttcatgtgtgtactgaaacactggagagctaaggaaaaagaaatagaaaatggaacagccaagcagagttgcagcagaatatcacctacattttcccatgcctaccccactgaaattggccagactagcataaacacatagttctaggtctcaggaacaatgtctttgatcattacaaaaggaagtcagttggctgtaagtatttggctttatttctgggttctctatttggttccactggtctatgtgcctattttaataacagtaccatggtattttggtgactatggccttatggtatagtttgaaatcaggtaatgtgatgccttcaaatttgttcttttggcttagtcttgctttcgctatgcaggctcttttttggttccatattaattttaggactgttttttctagttctgtaaagaatgatgatggtatcttgatgagaattgcattgaatttgtacactgcttttggcagtatgatcattttcacaatattgattctccccatccatgagcgtgggatgtgtttccatttgtttgtgtcatctatgatttctttcagcagtgttttgtaattttccttgcagaggtctttcacctccttggttaggcatattcctaagtattttatttatttatttatttgcttatttacttatttatttttgcagctattgtaaagaggattgagtttttggtttcattctcagcttcgtccctattggtgtatagcagtgctactgatttgtgtacattgattttgtatcctgaaactttactgaattcatttatgaattctaggagcttattggatgagcctttagggttttctaaactcaagtttgtattttcataatgttactcctttatcatgggaatctttcaagtttattcacatttgcatcctgctaaatgacaattctatgtcttcactctatgttcaattgattccatcattttctggcagtcatttaggcctcaagttttcttttctaagatttattcattttaaattaatctatacaatgaacaacaaattctttgtagagtttgtttgttggtttgcttttagtaagatacttctaaggccttgcatatctggaaattgtctttctattgctttcaaatttaaatagcaaatttacttttgagttacaatcttttctcctcaaaattgtatatgggcagtttcctccaggatatactgtgaaatgaaaaagccaggtagagaaatgtgtctatatcataccaccatttctctaaaaaaaaggggagatacgagagactggagacgtccagcttcagagcaggaaccttagttgcgccagcaacgaaaaacagaactaaatatgggtgatgttgagaaaagcaagaagatttttgttcagaagtgtgcccagtgccacaccgtggaaaagggaggcaagcataagacagggcctaatctcttcgggtggaagacaggtcaggccattggattctcttacacagacaccagtaagaacaaaggcatcacctggggagaggatacactgatggagtatttggagaatcccaagaagtacatccctggaacaaaaatgatctttgccrgcattaagaaggaggcagaaagagcagacttgatagcttatctcaaaaaagctactaatgagtaataattggccactgccttatttattacaacacagaaatgtctcgtgacttttttatgtgtaccatactttaatagatctcatacaccagaattcagatcatgaatgactgacagaatattttgttgggcagtcctgatttaaaactaagactgggttgtggttaaatgaatatgttcagtttttgaattgtaatagtaattccaattcagtaaatgctatcactgtttacccctactaaagatagaactagactttgttagtaatgttcaacttttcgcaaagatggtgagtgccatcttaaaacttactggagattggttttatatttagatttatataactggttatgtgaatatatttaaatactggggaaattccttcactgtctcagaaccaaggaaaattcacctgtgttttgtgttcatttgcctcttaaaggcattgttgaagataaataaggtagcaatgtctactttatatttttgggcttaactgtgccaatctaattagaattccctgtatttaaaatagttccttttatttattgaaaggcattttagtgtggtttatgtgtaatatcaaagattatttaacacttctcacattttatagatctgtaaggtcacatgcatttaaaatagtagcaagttaaacttcactcttgaattctttacaatctaagtcaaactaagttataatttagggttgtctttaaacagccattcagaaacataaaactgtagaactgctgtgtgtgatcgggaatggtgcttttgccaactcaaaaggattaaagtagaggcgatatacacaaattttaagattatgtgtgatcataagacttaagataattaaaaagaaaaccacaggggaaaaaaaagaaaagaggagatgcacacatgtacacaatatatctaattaacgtgttaaagacatatacattataatatgttaaactgtgttaattaatataatgtgttaatatagtattacatgttgcatactgaataatattaaattagcatatgttaatgttatcacacagtaatatattgttttatacatttattgttatacattatagcatattatattattgtttgttaaatgtatgaaattaacatatatgttaaaaacagaataaaccttaacacttaaaatgtttaaattaaaaaagagaggaaatattttgaaagattcgggggttgaaaacagactcctttgaatggacctggtattatagctctgtctttgaagctatgtttgtactttacataatcataaaacaaaattaaataaagaaaaatacaatccccagactacaaaagtacatttaaacagatgaaccaagttgtgaactcagtaggtaacctaacctcacagcaaaggaaatagcccaagtggctctaaaacatagtaatttaactctgcgtctctaatggaatagatcctaagaacaaaagaaaaggcaaagaaagtcttaaattgtttccagtaatagcacagcattgtaggtgatagtgttgatactgttattgtaagataataaatcaaatgagtaattacatcggtgtcatcaagaactgagatttggggcttggtgggaaggagatacagacatgaaattgatgaggtcaaataaaatcccttaagcctgattttgaattggatataaacttatgatgtactgtatctaaaaaaatacatatgtcctagccctgtccaccaaagagtcctagaaataataactaactcagggcacggggcatcccgggtacccagatcgtagtctttcttcccacgaaaaagaaccaaagatctttgatcttcggagaaagggttgattctgtatctgagggaggaaatgtgtaagtctgaaaacatcctgttgtacaagaaagctatcatagacaactaaattaatccttcattgttttttggcacttaatctgaggtcagccttcatttcttactttgcagatagtttatttccccgtcctgcttgacagttgaagtattctttatctttcaggttatatctaggagttgggctcttcataatttttctgctgtctgaatgggtcttttatttttgctagtggaatttatgtagaatgttactaatgctcctcatttcatgatagaccttcattgtttgtgtggttcttacattatatgtttatttattgccttttattctatatactcttcagttcytctctacgtcttcctccctttggcaacgatttgaatgtgttagatgtgcggtcttctattttctatgtccttgtaaaactagtagtgttgttttatgcatacatatttttaattcacataaatagcatcacgctgtggacctcatttgattcttacatttttacactcaactacacattgctctgggtgcatttcatctgttgcttctgacctgaacatcattacacggtgtgcataccatgccttttgcttatccatgtctcgttgattgaacctagattcatttaatcatagcctttaaatctccactaccacaaacaacactttgatgaacgttctcagagttgtcaccttaaaaacctgtgtgagtgataacttctctgcaaaaacatccgtaagtgagaatttttggtcatatgagacctgtatatttaatgacgatgtatcactggtgtgttctcaatggctgtgccagtacagtattcacaagcaatgcatgagggttatagtgtccccatctctgacaagtctttttcaatcttacatcctgactgtgctctatgcaatcttctatattttttgagtatttatttacctcttttgtttgtgtcttttctttgataattgaaaattattcaacagctgaaagtaagttatttgtccactgtagttatcaactttcatttaatattcttactattttatcttgttttcagttcttaatccttatcatttttttctaagaactagaaagcttctaaaatgtattctttttattttcaattaaatttccctctctgtcagttctatactttactgtttctaatatactatttaaaaatatatcctatcaaaatgtaaattggtacagccattatggaaaacaatatggaggtccctcaaaaaattaaaaatagaactaccatatgatcatgcaatcccacgtctgggtatatatccaaaggaaacactggtcattagagaaatgcaaatcaaaaccacaatgagataccatctcacgccagttagaatggcaatcattaaaaagtcaggaaacaacagatgctggagaggatgtggagaaataggaacgcttttacactgttggtgggagtgtaaattagttcagccattatggaagacagtgtggtgattcctcaaggatctagaaccagaaatgccatttaacccagcaatcccattactgggtatatacccaaaggattataaatcattctactataaagacacatgcacatgtatgtttattgcagcaccgttcacaatagcaaagacttggaaccaacccaaatgcacattaatggtagactggataaagaaaatgtggcatatacacaccatggaatactacacagccataaaaaaggatgagttcatgtcctttgcagggacatggatgaatctggaaaccatcattctcagcaaactaacacaggaacagaaaaccatacaccacaagttctcactcacaagcgggagttgaacgatgaaaacacatggacacagggaggggaacatcacatactggggcctgtcagggggtggagggctaggggagggataaaattagaagaaatacctaatgtagatgacaggttgatgggtgcagcaaaccaccatggcacgcgtatacctatgtaacaaacctgcacattcggcacatgtatcccagaacttaaagtataataaaaaaaaaaaaaaatgaagtcagtatctcaatgagatatttacattcccatcttcattgctacattattcacaatagccaagatatagaaaaaacctccatgcccattatcgaataagaaaatgcagtaagtatatatatgtaatatatgtagtggaatattattcacagaaagacaaatactgcgtgatctcagttataggtggaatctaaaaaagtcaaactcataaaagcagagattagaatggtggttgccaggggctaaggagttggggaaatggggaagtgcttgtcaaagagtacaaagtttcaattatgcagaaaagtcctgagaatcgaatgtacagtatggttaccatagttaataatactgtattgcacacttaaattatgctgacaaagtagatcttaagtgttctcaacacagggggaaaaaagacaactatgtgaggcgatgaatatgttaactagattgagtgtgttcatcatttcacaatgaatatgtacatcaaaacgtcatgttgcacaccttaaatatatataatttctatttgtcaattatgcttcaaaatgcatgagaaaaaaatttttgagttggctcaactcctaagcctgaacattctcttaatactactctcttcaactgctttggcttgttttcttttcctgaatccagccatatctgatttaatgagaatgagataattaactgtatgtgtaaaatttggctgtatagttatggtgctattgtagtgtgtttgttaaaataaaagtttttggctgggcacagtggctcatgcctataatcccagcactttgggaggctgaggcaggcaaatcacttgagttctggagtttgagaccagcctggtcaacatggtgagatcctgtctctactaaaaatacaaaaattagccgggcatggtggtgcacgcctataatgtcagctgctcagtagactgaggaatgagaatcacttgagcctaggaggtggaggttgcagtgagttgagattgtgccactgcactccagtctgggtgacaacgtgagaacctgtctcaaaaaagaaaaaataaaataaaaggttttaagtctaaaaacaccggggcctgttgtggggtggagggagcggggagggatagcattaggagatatacctaatgttaaaggatgagttgatgggtgcagcacaccaacatggcacatgtatacatatgtaactaagctgcacgttgtgcacatgtaccctaaaacttaaagtataatacaaaaaaaaaactaaaataaaatacatttaccctatcttgtagtatctcacttttatgctgaatcttttatttctaactttctcacagccagattcttcttcactaaattcttattatgctattttgaatttcatgtttcataaaatgcaagcacttttacattttggatgaacaaaatagaaactttctaaaactgacttgtttctttcagtaggtttataatactctcttttacttcttgtttattttacatcacatattcatatgtatattcatatttcttacatatcttccctttttctgagctttgtatggtgaatagaatggttttgtcaccaaacatggtgaatctattgtttttggattccatatctttccatttggatgctttcaaaatatgcctgtcaaatcatgtgctagaaggctgatagcaatagttgaaccctttctcagttactagggttttttcttatatttacaggtcctttgaattttttccttcacccttgatgttgagtaatttcactagaatgtgtgttaattatttggtatcaatgtttcctagttcatgttgtttccttccagtttgcaaataaagagtcccttttattcaggaaagttcttttctatgatttttttttcattccatttgttctgttagattttccagggctgccaattatacatgtattgccactcctttgccctccaatcctttctaactctttgttctttctatttattttttttactttccaaaccctatattctatattcttaattatattttcagcaatgctaactcttgtcaatacttccatcatgactttcatatattttatgttgttttattttttcctccacatttcttaagttctactaagtcatttttctactcttaatgtcttctttgagccattttatcttacttgattttctctttcatttctttgattttgtagagaagtgtttgtatcatttttccctgaaatgctacatgaactttctaggctatagtctacatttgccttttagtttattttctaaattttatttatcttggaataggagtcatttcttcagagaagctgtaagctaaaagatactgtgtatgacaagctgggcaagtgagcagggagagctgaccactcagaattggggattctgtctcagaacactttcctctccactgtgctatttagtctcctctccctgctgttagcatttttatccttctttaggtggtggctttgcatatgtctgttgagggaggtcatccta

SEQ ID NO: 93335 - DNA, 15337 bp, Homo sapiens
taatgttaaacagatattgatcccagttaaacacatctgagtttctgtatgcagaaaatatctcttggaggactaatatgtcctaaattatagtgaaaacttgtttattatgaaattatatgtaagtttttaagcataccactttttgtgtttttcagatacattattctacatgtggaatttacatttaccaagcaaaaagtaggaattgtttcaggaaagactttagcttttataatttttaaaaatgttcccatagtagttgttgtggtttctttttttgtttttgtttttctaagatggagtctctgtctcccaggctggagtgtagtggcgcaatctcggctcactgcaacctccacctcagcctcctgagtagctggggttgcaggcgcacgccaccatacccagctaattttttgtattttttgtatttttcagctaactttttgtatttttcacggtgtttcaccatgttggccaggctggtcttgaactcctgacctcaaatgatctacccatctgggcatcccagagtgctgggattacaggcttgagtcaccgtgccttgggattgggtgggatgggaaagggaacagaaaattgctactttttttttttttttttttagacagagtcttactctgtcacccagactggagtgcaacggcatggtcttggctcactgcaacctccacctcccaggttcaagcgattctcctgcctcagcctcccaagtagctgggactataggtgtgtgccaccacacccggctaatttttatgtatttttagtagagacagggtttcactatgatggccaggctggtctcgaactcctgacttcattatacgcccaccttggcctcccaaagtgctgggattacaggagtgagccaccatgcccggccaaaaattgctactttttgctgattacattttgtattattagggtgggtttttaaattatttttgtcacataatatgacaaaaatgtttattattttgtcatattaaatgacaaaatgtttaatgtttttgattttaaaagtagtggcaatacaccagctaaatggtgatttgggcccagtgcagtggctcatgcctgtaatcccagcacttcaggaggtcgaggcgggcatattgctcaagcccaggaattcaagaccagcctgggcacgaagacaaaatcctatctctacaaaaaatgcaaaacttaactgagcattgtggtgtacgcctgtagtcctggctactctggaggctgaagtgggaggatcacttgagcatgggagattacagtgagccaagatcatgccactgcactcaatcctgggtgacagatggagaccgtctcaaaaaaagatgacgtgaactagggcataaggaatggaaaaataaccaacttgaaagactcatggaaaatagaaccagtattaactttttcattctgttcattcccaccgacctacctcaagtcagcctctccaccagaacattgcaataatcccagcctcgtttttgtgaacaaaggaaagaataaaagttactggagaaaagccctctccagtgttaatgtaattgctgttttgggcttgttagcagggtctctgtaagattatttcttacaaaataattaccttaccgcgtttgtcttcctaaaatgtttatttggggcattttttttttcttttttgaaagttcagatactcctgagtagatgcagttttttttgttttttgagatggagtcttgctctgtcacccaggctggtgtgcaatggcgtggtcttggctcactgcaacctccgctctgcctcccaaattcaagtgattctcctgcgtcagcctcccgagtagctgggattataggcatgtgtcaccacacccggctaatttttgtatttttagtagagacagggtttcactatgttgaccaggccggtctcaaaactcctgacctcatgatccgccctcctcggccttccaaagtgctgagattacaggcaatgagccaccacgcctggccatctaatttttgtatagtagagacagtgtttcaccatgttggtcaggctgattttgaactcctgacctcaagtgatccgcccacctcggcctcacaaactgctgggattacaggcatgacccactgcactcagccgttccaggtgttttataagcagcatttaatctttaaaaatcaccctacgagagaagtaccatgaacccaaatcagattttaagcccaggctactgtattctagttaatttacttttggtctttaaaaccaagaattccctaagtattttaggattttctaaacttgtaggttggtgagggattgtccataaatattacaaaatagctgaattaaaacattctttaaaaagtgatggtaggccaggtgaggtggctcatgcctgtaatcccaacactttaggctgaaatgggtagataacctttgagcccaggaatttgagaccagcctgaggaacaaggcaaaactccgtctctataaaaaatacaaaaattagccaagcatagtgctgcatgcctgtagtcctagctacagctactaggaaggctgaggtgagaggatagcttgagcctaggaggccaaagctgcagtgagctgtgagtatgccactgcactccagcctgggcaacagagcgagacccgtctccaaaaaaaggaaaaagtgatggtgatgtatttaaaaataaactcgtatacatgatttttacatttttttttacaatcaaatgcagctataatagtcagttattgggattatgtgcaaaccatctgttactcctacacaccctagccctttgcattcctctaactactgtcattcccatgtatcttagtcaacttaaattcatatacaaaaggcagaatttgacctcttataacccctaccttttcccagtttttcacttgatactgaacttttcttgcctttcataattacaaggctcaacttttttcattgtgaatttcaaccttcttgttttcagtcataactcctaaaccttcctaactgtcaagttctggccaagcacagtagcacactgtaatcccaaccctttgggaggctgagatgggagaattgcttgagcccaggagttgagaccagcctaggctcaagaattgcttgagcccaggagtgagaccccatctttaaaaaaaaaaaaaaagaaataaaattagccaggcaaattcgccaggcatggtggtacccaactactccaaggctaaggcaggacctacagagctacagagcctgagaggccacagtaagccatgaatgtgccactgcactccagtgcgggttacagtgacagattgtctcaaaaaaaaaattttttttgagtacctcccagagtgttctaagaggttcaaaaaacagtttatgctatcttggactttcactagattgagaactttagtgtgaagtcaattttgaactatccttttatattcaaggccacagtctctaacagtactgtccaaaagaactttctgcggtggaaatgttttacatctgtgttgtccaataaactagccacacgtggctgttgagtactaaatctgactagtgtaacaggaaacacattacctggctagcggcccctactagacagaatatttggtcagctcttactatcccccaacttccatcctttgcccaacccagcctgctatacacaagcctagcgttatcttgttccttctcttgcaaaatcttaaagatccttctaagctgctcaatgtttatgaattcattcaacatttgaaattgaccagaaaacaaaaagtagtaaagtagtattttcccttcatacatatataaacttgttagtaaagtttgaggtgggactacactaaacatggaattctatttataagtaaaaaccacaaaaagtttgcttaagaatatcactgtatttattttccctcgggtaacttttctatggcttcaccattttctcttcaaaattgaagaaaaatatcccaaagtttagaactggatcacttggccctttctcttcttatctcctcccagttcaaaatgcttgcatctcttaatrgccagcatcctcttggatctgcagttaggctcaacacattccagccttagcacaatcttctttgtggtcttagccttcttccggaaaattggctttgtctgcccaccatagccactctgcttccgatcatagcgcctccttccctgggcatamaaagaatccttgcccttcttatactgtgtcactttgtgaggctgatgyttgccacacttcttacagaaggttcttcgggttttaggtacgttgaccatctttgcagcagggctgttttgtctatatgatgaaaactgtagtaaaatatttaaaataagatagcagacgttaaacattccgaaaagtgaaagtgctatacaagtatatacaggaaaaccgtacacataaatgagtaatatataaatccaccacgtactctttttccatatgaataaacgcacatacaagtacatacctttttgaaacacttcgtttaaattactggaggactaatttgtcgacctaaagaactgaggcaaggccgagcacggtggctcatgcttgtaatcccagcactttgggaggccgagaagggcggatcacctgaggtccggagttcgagaccagcctgaccaacatggagaaaccccgtctctactaaaaatacaaaattagcctggcgtggtggtggtgcatacctgtaaggagaatcgcttgggcggggtggggaggggcggaggttgccgtgagccgagatcgcaccattgcactccagcctgggcaacaacagcggaattacgtctcaaaaaaaaaaaagaactgaggcacaattcatataagtagaatgtttatttggggcaagtttgaggattgcaacccagagcacagattcaaaatgccctgagtagcagcagttgcaagtgggtttttagaggaaaaaatggcagttcctaaattgtctaccaagaatttacattaaaataacacaagcgattgattggctatacatcattctttttatgacaaattccaggaacgcggacataatgggtgaagcagctagtcaggaataaaatgccaggcattaagtggggaggtgtctgaagtcccatactgctgtctctctgggcccggcaaattttgcacatctcaaataattaacaatgctccgagccattcttcttttctcatatagaacaagactcacgaaaaccgacagcagcagctttaggaggcccaatacagtccgttttccgtacgaaatgagtttaatttattgtgactgctccaaaagaaaagtgcggttcatctaattttcttccgaaaaggaagttaaggaccagagtttctttgacccccttccccccacccacctcctccattttccagctctagagaatggctggggcagcgcgcgacgttgtagctacggttacgacccgccccgttccttctacgagaaccacatcagcgtagtatcacttttcccctccgaagcacagtcacccgtcagcagcctcgagggctgacgtgtccttatcaagccggcgcgccccgcgattctatagccgccatgcctgagacctttttcctgaagggagaagcctgctctcgaactaaggccggcgagggccataggtctcgccttccctttcctaagaaggcctagtcctacccaggattctgagcaagggaggctcctattggagccgctacagcctcgttcttagcttaccgagaaacagcgcccgacacctggcccttcgcagctctcgcctttcgcagctctcgcctaacaggaaagggaagaaasaggcggaagtgggaactgcacctgagcgacagtactgcaaaccaataggcagccggccacggcggtcaggcgccttcggtcgcgtctggaaagcaccaaccaacggtctaaggggcgggccggaggggtgtgggccggagggccgcggtgtgccgcggggcagttgcgggttgtcataacggtcccygccggagtgaggcgaggccgcgtcgctcagttctggccgtctagggcccctgtaaggatgagagcgcagaggacgcagggccgctggaggcgcaggtaacgaagctagkgtgcggttgggaccgcggctgagctttttccgggacccgtggtgctgaatggagaggacggagacgaagccgagccgcggctcctagcggcggcgccgaygctcgagctgtagctgccaggcgaggatgtgtggagcgcaggcggcgcggggtaaatgagaggtctcgggccccaggacccccggggcccgggatgagttagcgagggcagccgcgggggccagttccgaccgtgacaggccaaggcgacggccgccgcccgcccgccccttccgtgcagaagcagctgctcctttccgcgcccgcccgcctgcgctcccggccctggagaccatgaggttccgcatctacaaacggaaggtgctaatcctgacgctcgtggtggccgcctgcggcttcgtcctctggagcagcaatgggcgacaaaggaagaacgaggccctcgccccaccgttgctggacgccgaacccgcgcggggtgccggcggccgcggtggggaccacccctctgtggctgtgggcatccgcagggtctccaacgtgtcggcggcttccctggtcccggcggtcccccagcccgaggcggacaacctkacgctgcggtaccggtccctggtgtaccagctgaactttgatcagaccctgaggaatgtagataaggctggcacctgggccccccgggagctggtgctggtggtccaggtgcataaccggcccgaatacctcagactgctgctggactcacttcgaaaagcccagggaattgacaacgtcctcgtcatctttagccatgacttctggtcgaccgagatcaatcagctgatcgccggggtgaatttctgtccggttctgcaggtgttctttcctttcagcattcagttgtaccctaacgagtttccaggtagtgaccctagagattgtcccagagacctgccgaagaatgccgctttgaaattggggtgcatcaatgctgagtatcccgactccttcggccattatagagaggccaaattctcccagaccaaacatcactggtggtggaagctgcattttgtgtgggaaagagtgaaaattcttcgagattatgctggccttatacttttcctagaagaggatcrctacttagccccagacttttaccatgtcttcaaaaagatgtggaaactgaagcagcaagagtgccctgaatgtgatgttctctycctggggacctatagtgccagtcgcagtttctatggcatggctgacaaggtagatgtgaaaacttggaaatccacagagcacratatgggtctagccttgacccggaatgcctatcagaagctgatcgagtgcacagacactttctgwacttatgatgattataactgggactggactcttcaatacttgactgtatcttgtcttccaaaattctggaaagtgctggttcctcaaattcctaggatctttcatgctggagactgtggtatgcatcacaagaaaacctgtagaccatccactcagagtgcccaaattgagtcactyttaaataataacaaacaatacatgtttccagaaactctaactatcagtgaaaagtttactgtggtagccatttccccacctagaaaaaatggagggtggggagatattagggaccatgwactctgtaaaagttatagaagactgcagtgaaaatcacagttacaaaagcgacagtcttctatttttgatatttgtccaaacaggacatacaattgaataaaagagtttaggaactggtttctgctttaatacaaaaacaaaatcttgtaaaaggtgtccaaatacatagtaatcttttccagttatgtctgattaagatttaaaactgaaggtttcattttgggagtagggttttaaagctcaatctgttatctgctaaaattgattattgttgatatgagagaagaggggaaattttatttaaattgcatttattaatctttttatctgaaactttgtacacttttccactttcaaaacctattttaagtacagcaaaatttatttaaaactgtsatagcagtaaaaagtattacgatgaaattgttagggtattaatggaacaaacccagtttcactctcttgacacacttattaggaagggattgcttcactggtttaataatttaaaagttatgtttgttaaacaccctgtcagaacagtcattttcagtattagattcctgtactattgtgttttgagtgtgttttggaaccttcatagaacacactttcttttggaatgtatttgattgataagaaagtttaaacattgttttcacctcaatgtagaaatacagtggttttgtttttttttttcttttagtgctgacaaaataaaatactcatttttgcataaaaaggttcctaatccttttgcagaataagttttgtttactctttataccaaaattcagtgaaggcattctacaagttttgagttagcattacattttaatatttactattgctacattgtataattgagtttgaaataaaacccagcttatgacaatgcattccctgtgcaagaaactgtttggctttcaaattacccaggcattgaaaatgaatgataaaaagttgctgtgtaagggaaatacagcctaaattgtttttgaaagccagaaatgatacaaagttcagtcatgccaaagtgaaatactttctagtgccagctttaacttaaatcatacgttttaaaaggacagatacagaaaattataggaaacaggcttaaattttgctccatatttaatgtagacrtttatagaagtttcccttaatttgtaattgcattcaaccgagaatttctcataaaagactaatttctgtgtaaagatattacgggctgggtgtggtggctcatgtctgtaatcccagcactctgggaggttgaggcaggcagattgcttgaactcargagtttgagaccagcctgggcaacatggcgaaaacccatctctactaaaaatacaaaaaattagccgggtgtagtggtgcatctgtagtcccagctacttgagaggctgaggtgggaggatcctttgagtctcgaggcagaggttgcagtgagcctagagcgtgccactgcacgccagcctgagcaacagagcaaggctccatctaaagaaaaaaaaaaaaacgttacttaaacttgtaactattaaatggcagtctcaaaattattgcatcaatttaagattcatagtagtttaagagcacatatgcttatctaaggtgaggcaaatagttctcttgctttacgagctacctttagacttacccacggcccagtctggtgcaagattttgcctgggggttataaataagggtgaatcaggaggctttgtacctatttctggtactctgacctgacatcactagttcaaagaactaaaaaattaggttatttccaggactgagctaagaaggccagagtgtgaagtagtagctgtttttgaaacaaatagatcagctcctggctttggggttagtgattaaatcaacaaatatttccctttctgtatttccttcctttcattttctttggctgccctaaaattttttgtaagaaaaaaacctgttaggatcttctctttgcctcacattttaggtgttataaaggaaattgattatgcaggaggctgagatgagaggatcacttgagcctaagagtttgaatccagtctggacaacatagcaagacccatctcttaaaaaaaaagaaagtgattaggaaacactggcttttttttgtttttctgtgtaataatgtaatgaaggcaattttcctatcagagcaaattgccagattttaaaaattccagttttactcttaaatttctataaaaccacaagatgttttaatatttcaataacttctaagaaatacttcaaaattgaattttgaaaatcattactaaataactaaatctattatatatactttatgtaacaaaaatatatatagtttgtgtgacaaaatatagagctgatgaaaaatactacattttatctggtgaatttgtatcgtaattgtttagattaatattggttagtaaagttctttcccctctaagctctatttcaagcttaaatatgtcctacttagtgagactgagaaacagttttgaaattctaccccccacacatgtacttataattccagttaaatgcattcttgagaattactttgtgtgacaaacacaattagtgaatatttttaaattttattaatgacaaagcaaaaattaacacagaagtatatatacataggttgtattaaaactaaatgttttaactctcaaatgttttaactctcaaatagaaaacatacacatctattacaggaatcacaaaacttatctccataaggaaactttaaactccagaggcaaaaaaaaaaaaattatctccaatttcccccatgagaatcaaaattgcaattttttaaaaaaaattgcaaattttaattttatactttaatacctttagttttaagacaacagttaacagaatcaattttagatacaggtattttttaaccttaatatttaaaagtccaaaattatatagaattaatccaaatcatatagcaaagaattctgaaaactgaatgcacaattggtcacatgatctttaatgacctgcacactaccatcctgcatattggtttcttttatgctgtcgaatccaggtatattgtgaaccgtagttttgttcagtaatgaagataggtgatctccatctgtttctttctcttcagttattactgactcgtttaagttayctttttcctcatttgaacaagtagcacttttttcttttataaattcagattgcatttttgactcaggttgctgagattttccaagtatcatttgagaaacatcaagagactcttgttgaaagcatgtaactaaaccaaagctatctatttgtagtgctttaactgctatagatgaatcagaatcagttgtaggggtgttacaatgttctatatattccttttcagttagatgactttcttcatttactctttcctcctttccttgtagctgatcagagttactacattcttgcaactgtgtcaagagaaacaacaaattaataattattttaaataatacaaaattaaattgtactaccctctggaaataaaatttttaacagttgtgaggtaatagcccttacagacctgcaggtatacatccaggcttccctgtcaaaattcatcctccaggctgggcacagtggctcatgcctgtaatcccagcactttgggatgccaaggcaggcagatcacttgaggtcaggagttcgagaccagcttggccaacatggcgaaaccccatctctactaaaaacacaaaaattagccgggtgtggtggagcacacctgataatcccctctacttgagaggctgaggcagaagaatcacttgaacccgggaggtggaggttgcactgggccgagatagtgccactgtactccagcctgggtgacagggtaagaccctgtcaaaaaaagaaaaagacaggcagcatttgaaggatgactttttttgttttgagacggagtcttgctctgtcgcccaggctggcacaatctcagctgactacaacctctgcctccaggttcaaacaattctgcctcagcctcccaagtagaggggattacaggcatgcaccaccacgcccggctaatttttgtatttttagtagacacagggtttcaccatgttgcccagtctggtgtcgaactcctgacctcaaatgatccacaaagtgctgggattacaggtatgagccatcacgactagtctgctgccagtctttttttttttttttttttttttttgagattgagtctggctctgtcgcccaggctggagtgcagtggcgcaatcttggcttactgcaatctttgcctcccagattcaagcgattctcctgcttcagcctcccaagtagctgagattacaggtgcctgccatgacgcccggctaatttttatatttttagtacagacggggtttcactgttggccaggctagtctcgaactcctgacctcgggtgatccgcctgcctcggtctcccaaagtgctgggattacaggtgtgagccactgcacccagcctactgccagtcattttttaacaatgtaaacctggcactaatatcctgattatatcctttcacaacaataatccatacttttcaacatggtctacaaaactatttaacagttataagcacattgttgaatttcttaaattttcttgaattcctctaatttttcagagccgcccttctaatacatatgtctgtcgattgtggtagttactaaatcatttgcatcttcaatactgaagactataaaaatgaccaaaattaagattgaattagaaagaacgtacaaattgtataacatagttctcatggtttgagagtcaaaaaagattgtatgtccctggactagtactcaaacttcctaagtgttagtttctctttgttcctcattgtagggttattttgggattaaataatgtgaaaatgaatagcaaagtgtttagcacataatacatacacagacaaaaggcttttcttggctgggcgcggtggctcatgcctgtaatcctagcactttgggaggccgaggcgggtggatcatgaggtcaggagatcgagaccatcctggctaacacggtgacacccaatctctactaaaaatacaaaaaattagccaggcatggtagcatgctcctgtagtcccagctacttgggaggctgaggcaggagaatcgcttgaacccaggaggcggaggttgcagtgagatgagatcgcgctactgcacttcagcctgggtgacagagggagactccatctcaaaaaaaaaaaaaagaaaaacttttcttctcttaacatcactctgcccaaccattatgtaaattttgtttaaagttatgatattaagaaatcaataatttgttaggttttaactctgtgcttcattactcctctatagagcccatcaacttccttacctttgcattaatttgaatcttattatcagtaacttgaagaacttcaattaatggyggggtcaaggacatagactgtttgaatggagagctcaggacctcttcaagaaactcattaacattttcttcattgacaaataacctttcctaaaataaaaagggaaaaaatattctgcctaataagtcccacttgacaacagttgtatctcaaagcagctcacaaaaattctcacattgttcagggttacactttttaaaatgtttattttaatgttattcctatgagctgtcttagaaaaatttaagtttggtattgtacagagcaataagagttgtactgagaacaaacataaacgtatagaaaaagaacctaaaagaaagaggtcttggtactttttctgtctattaaacctgaccttttagtatttttctttctttttttgtttcttttgttttgtttttttgagacatagtctcactctgttgcccaggctggagtgcagtggtgcaatctcggctcactgcaacctccgcctcccaggttcaagcaattctcctgccccagactaccgagtagctgggattacaggcgactgccaccatgccggactaatttttgtatttttggtagagatggggttttaccatgttggccagactggtcttgaactcctgacctcaagctatccacctgccctggcctcccaaagggctgggattacaggtgtgagcaaccacagctggcctcttttagtatttcagaagaataacatcatctctagggctataaatgggatcccagatacaaaatataattcagctttaaaacatttcctaatgaggtggctaagaaatatacatgaaaagatctattcaaattttgtgtgaccttttagttcttgggcaggtaagagccaattacagtattttatttcaaataagtggtgtgtttttttgtttgattttgtttttgagacagagtcttgctctgtctcccaggctggagtgcagtggcataatcacggctcgctgcagccttgacctcccaggctcaagtgatcctcccgcctcagcctctacagtagctgggaccacagaacatgccaccactctcggctaagttttgcatttttttgtagagacagggttttgccctgttgcacaggctggcctcaaacttctgcactcaagtgatccacctgctttggcctcccaaagtgctgggattacaggcgtgagccaccaccacacccagcccccgcccccctttttttcttttttttgccttgagacagggtctcactttgttgcccaggctggaatgcagtcgcacactcatagccccctgcagccttgacctccctggctcaagcaatcctccacctgtgcccccaagtgcctgggtacctgggactacaggtgcatgccataatgcccagctaatttttacatttttggggcctggtgtggcagctaacgcctgtaattccagcactttgggaggccaaggtgggtggatcacttcaggycaggaattcgagaccagcctggccaacatagtgaaaccctgtctctactaaaactgcaatcacgtgaacccgtgaggcggagattgcagtgagtccagcctggtcgacagagtgagactctgtctcaaaaaaaaaaatttgacattttttgtagatacaggtctcactttgttgtccaggctggtctccaactcctggattcaagctgtcctcctaccttggcctaccaaagtgctgggattacgggcgtgagccactgcacccagccaagtgtattatatttttaagcactgggatactccagtgtaacattagcaaactgtatagttattaaaagaatgaagtagagagcatatattcagggcattttgaatctatgctccagagaaaaagtaaattatgaaaaaaattaggctgggcacagtggctcatgcttataattccagcactttaggaggccaaggcaggtggattgtttgagcccagaagttcgagaccagcctaggcaacatggcaaaactcatctctacaaaaaatacaaaaattagccggga

SEQ ID NO: 93336 - DNA, 14455 bp, Homo sapiens
gtgagccgagattgcaccactgcactccagcctgggcaacaagggcgaaattctatctcaaaaaaaaaaaaaaattgaagtaatcaaagcctaaatggttttataattaaactactaaaaactatcaaaaagtcggtcttaaccaaaaataaaaaaaaggaagtacctgactcagaattccaacaaacattgtcaaaaactatgaatgaaaataaaaactgagaacaatcctattgaatataatcagaatgccaggatgattcaacattagaaatttgttaatgttacataacaagtcaagcagtcaaaatagcatcacttcaaacttcacagggggaaaggggaaagaaggcagaactaaataaaaagactacaaaacctgaaagatgaaaaagggtgaattagggagaaaacactctaaggtggatcttattgttcatggacaaaaagaaagaacatctttagaatttattaagtagttgtttttaggctgggcacggtggctcacgcctgtaatcccagcactttgggaggctgaggtgggtggatcacgaggtcaggagatcgagaccatcctggctaacacggtgaaaccccgtctctactaaaaatatacaaaaaaattagccgggcgtggtagtgggcgcctgtagtcccagctactcgggaggctgaggcaggagaatggcgtgaacccgggaggcagaggttgcggtgagctgagatcacaccattgcactccagcctgggcaacaagagagaaactccgtctcaaaaaaaaagaatttattaagtagttgtttttaaatttgatagaaaacattaaaataaagtggaaagaagggataagaaaatttgatcaatccaacagcaggcagaaaaggaatgaaaacaaatggtacatagaaaataacataaaaagataaatataaatatgaattttcacagtaaacataaatggcttaaactgtcataatgataaaaaaattaatttacttggataacataagagaacttcagattacataaagcaaacatttacagaacaaagagaaattggtaactaatcattagagagatattaacatcccactgtcggaaactgatagatgaaacattatagtttgaagcattttaaacaagtatttggacaacacattgagcaagcattactagattactctatcaatcttcctttgtgtctgactctgttcaaacacagtggatacagaaataaataaaacaaaatccctcctgtcacaaaactacattctagtgagaagagacaacagtaaacaagtattacacatacaacatccaacaaaagaaagcaaagaaaaagggactagctattttaaataacagatttataaaataaatgttttaaaataaaattttgtaaggagccactttagcacagaactgaagatgaagcaaaccatacagatatctgggagaaaagcattgcagtagaagtaacagcaaatgcaaaattcttgagatgagagcaagtgaagggggttagagggacaagaaggatatacggtggctggggcagagtcagcggtagggggtaagaaggcatgaggtctaagaatttttttttaataggatcactttttgtttagaaacctgtagaccaatacaagaactggggactgggagactagaaatcctcgaaacaatcccaacatggctgcttcaaagaaaatagagaatgacaaaataattcacatgccattatggaggtagagtttacttttcatctttcttttgtgatttttcataatcataaacatccacttttaaagaaattggaaaccgtatggtttagctgactttttaacttaatctctcagacccatgttttgctctactttgagttttttctccactatcttgaccatcactgtctatgctgttgtttgttttggcacaactggctttatttcaagctcgttctgtctagtttataatctctatcaacatatcagttatctgcattgccctacttactccttaaaaaataattttgattttaatttttgcttttcaaatttttcttctgatttctattcttggttttggcactaggaagacatgctttttacgttgatcaattcatcagaattcctttccttctgggcaatggaccaacttattgacatcatgtcattttcgaattcttttatttcatcggtgtccttattgctgctcattggcttctgccatgtgacttttctgactaatcaaacactatattctgaatgcaaagataatggtcatactcttcaaaaccctatcagttgccaactttcatatttaaacagcaaaatagatacatgttttatatttccatattgagtcagatatttccagtttcagtttttaaggaaagtttgaagtctaattacaaatgacaacatgaagattatttattttaacccttctttgggttttcttcgttcccctctttttcctgtctcttaaccctttcatttcagtgttcttcacttcactttattaccaagaaatgtgaagtaaaagaatacaactaactttatttgagaaaattttctaccaaaactttatgttccatattaatctcagaatctgaaaccaacttgagttcctaaagtaacataggagacttctacataaagccacatgggagtaagacaggtcaaaattaccctccagcccaaacaactaggaaaccagacaaatataagaaacaaccttattataagacactgggcaacaggtatggcgaagggaacaaagggaaagaaacagggtgacccctaccatggcacaggctttctgcttggcattaatttagaaactaccacacagagataggaacccaaaatgagagctgaaatgagaagacagaaatcataggttcaggtggctcaagaagactagaatttgtgggacagactacccaagagaagagaggtattcagagaaagagctccagaaatctgcagagggatacccttgagtttcaactgaataccaatctgcacatgtgtgatgtgaaatcccagaagactgaacaagaacaacttccagggagagagcaattacagaagaacaattcccagagctcacagaaagctgcgaatcaactgtattgtctctagccaactgtattgtctttagccagagtggcaagacctcaatgactatgtaacacattcagcagagaccagagtgagacacacctttaggagcagggctaaatgagccacagaacaaatgctattctagaccatccctaaaagagctgacaaataagtctcaacttatcctgagagtgactctgtatgaaaaaaataaataagtctcaactgaacaataatgattcccaacttaactactgggcataatccaataatccagctattataagtatgcctcatatgcgcaagaatgtaaagaaaacatgaatatgagagaaacagaagatattaaaaataacatggaactcaaaggtaacatcaaaagataacatcaaatgtaaatttcaggccgggtgtggtggctcacgcctctaatcccagcactttgggaggctgaggcgggcagatcacaaggtcaggagatcgagaccatcctggctaacatggtgaaaccccatctctactaaaaatacaaaaaattagccgggcgcgtggtggcaggtgcctgtagtcctagctatttgggaggctgaggcaggagaatggtgtgaacccaggaggtggagactgcagtgagccgagattacaccactgcactccagcctgggtgacagagcgagactccgtctccaaaaaaaaaaagaaaagaaaaaaagaaaaaaatgcaaatttcacattgaaaagttaacatgtgattagaaatgacaaaagaagatcattatccctaaagacataacaaaaaaaaatctattcaaaataaagaacagtatgaaaaatgacaacacagctacagtgccctgtggaataatagcaacctacctaactaatatgtgtgaggttggggttaaagggatagggacaaaaaaattgtttagtgaaataattagctgtaaattttaaaagctgtattattataagcccacagatccaagcacaacaaaatctgaaacagacagacacacacacacacacacacacacacacgtaccagtaaggtactttatagtcaaattgctgaaaaagattaataaagagaaaatattaaaagcagcaaaagaaaatacacattgcttaaagggggaataaagtaaaaatgactgcaggcttcttgtctgaaactatgtaagccagaagacagtaaaaaacatatttaaagtactaaggagaaaattaaaggaaaaacccttctaaacactgaacaaaacatgcagcaaaaaaaagtatccttcaaaagcaacagtaggctgggtgcagtggctcacgcctataatcccagcactttgggaagccgaggcaggcggatcacctgaggtcgagttcgagaccagcctggccaagatggtgaaaccctgtctctgctaaaaatacaaaaatcagccaggaatggtagcaggcgcctgtaatcccagctactctggaggctgaggcagaattgctccaactagggaggtggaggttgcagtgagcagaaatcgcaccgctgcactccagcctgggcggcagagtgagaccctgtctcaaacaaacaaacaaacaaacaaacagttaactaaaaacttcctccttttttcttttcttcttttgagatggagtctcgctatattgctcaggcaggtcttgaattcctggtctcaagcgatcctcccaccttggcttcccatagggctgggattacaggcattagcctcccggcccagtgttttgttttgaagtgtgctttgtctgatattaacatagccactccagcttaatttgattagtgttggcatgttttatctttctctttatgtcattttatttcaattgtctttcaggtagacagaatataattaggtctaaaatagattctattagtggggcatagtggcatgtgcctgtagtcctgggtactcaggaggatgaggtgggaygaacacctgacaaaaacaacccaactcaaaaatgagcaaagaacttccacagacattttccaaagaagttatacaaatgaccaaaaaaacatgaaaagatgctcacgatgactattagaaaaatgaaaaatcaaaactaagatataccacctcacacccattaggatggctactgtgaaaaataaaaaaaagaataacaaatgttggcaaggacgtggagaaactgaaacactagtgcacaggtgtagggaacataaaatgatatgggccctggaaaacagtacggcagtttctcaagcagttaaaaatagaattgccatatgatccacaaattccacctctgggtatacaccaaaaagaatcagaagcagagtctccaaagagatatttatacacccatgttcacagcagcattattcacaataaataaaacataattaacagttaagtaaaatgtggtacagacataccacattggcagtatgtctatggtggaatactatgcagccttaaaaaggaaggaatttctgacatatgcgatactacaacataaatgaaccttgacaacaatctcctaagtgaattaaaccagtcacaaagaaaaaaaaatagtggatgattccacttatataaggtactaagagtagctaaaatcagagacggaaagtggaacggtggttgccagaggctgagagaagggagaaactgggagttattgtttaatggctataaagtatgagtttaacaagattttttaaaaagctatgaaaatggatagtgtctacattatgaatgtatctcacatcactaaaatgtacacttaaaaatagttaaggggttgggtggccacagacggccgggcgggatgtaaccagccgctgagctgcagcccttccgtgtccgcaggcttcggcccggccgccgccgcccatcagctatggaggagctttacaacttcccggcctgcagagccgggcgcagcaagggccagacgcggcgcgagctggcgctgcgagccaacgggccggcgcctggcgggcacgatcgcaaggtcgcgcagaagctcctcaatggccagcgccagttgcagccccggccgcacccttgcctcacctgagcctgggctcttgctcttgcggaatccacaggtctttcttgaagaaatctgtagtcagaactctgtgctgcatttttatccagagaaggaacaggaagagaagagtgtggtctcctagaaatctagcactggagaaacgaggaaaattcttccaaggatggtctcccactcagagctgaggaagcttttctactcagcagatgcagtgtgttttgatgttgacagcacggtcatcagagaagaaggaaccaacattcaaagcagctgccaactattccaagtttcccagctggaggagccctgacctgcaccttcgcagaagccctgaagcagacaccccagggagcacctaccaggggcacccccggctggcaccagcatacaaagtgagacagggtctcgccttatttcgcaggctggtctggaactcctgagctcaaacaatctacccacctcggcctcccaaagttctgggattacaggtgtgagccaccttacccagagaggcgaacctggattgggaaagtcgacattaatcaactcattattccttacagatttgtatgctccagagtatccaggtccttctcatagaattaaaaagactatacaggtggacaatccaaagttttaatcaaagaaggtggtgttcagttgctgctcacaatagctgacaccccaggatttggagatgtagtggataatagtaattgctggcagcctcttatcgattacattgatagtaaatctgaggactacctaaatgcagaatcacgagtgaacagacgtcagatgcctaatagcagggtgcagtgttgtttatacttcattgctccttcaggacatgaacttaaaccattggatattgagtttatgaagcrttcrcatgaaaaagtgattatcatccaacttattgccaaagcagacacacttataccagaggaatgccaacagtttaaaaaacagataatgaaagaaatccaagaacataaaattaagatatatgattttccagaaatagatgatgaagaagaaaataaacttgctaaaaaggtaaaggactgtttacctcttgctgtggtaagctagtaatactatcattgaagttaatggcaaaagggtcaaaggaaggcagtatccttggggtgctgctgaagttgaaaatggtgaacattgtgattttacaattctaagaaatatgctgataaaaacacacactcaggacttgaaagatgttactaataatgtccactatragaactacagaagcagaaaactggcagctgtgacttataatggagttgataacaacaagaataaagggcagctgactaagagccctctggcacaaatggaagaagaaagaagggagtatgcagctaaaatgaagaagatagagatggagatggagcaggtgttagagatgaaggtcaaataaaaagttcaaaaactaaaggactctgaagctgagctccagtggcgccgtgagctaatgaaaaagaatttggaagcacagcacaaagaattagaggaaaaacgtcgtcagtttgaggatgagaaggcaaactgggaagctcaacaacatattttagaacagaactcttcgagaaccttggaaaagaacaagaagaaagggaagatcttttaaactctctattgaccaccagttacgtattagttgccaatatgccagcttggacatcagtgtttgttggatccgtttgaccaatatgcaccagtttcatccataatgatggatttaacagcgtgacaaaaattattttttcttgtttttcttgatggagattaagatgccttgaattgtctagggtgttgtgtacttagaaagtaacagctctaagtacctttcctacattttctttttcttttttttattaaacagatatcttcagtttaatacaggagaacattttactgttgtacaatcatgttctcgtggtttgattgtttacagcctattccaaaataaaaggactgtggaaggttaaaaaaaaaaawtagttaagggccaggagcagtggctcacacctgtaatcccagcactttggaaggccaaggcaggcagatcacttgaggtcaggagttcgagaccagcctggccaacatggcaaaatcctgtctccactaaaaatacaaaagttggccgggcatggtggcacgtgcctgtaatcccagttacttgggaggctgaggcaggagaatcacttgaacctgggaagcagagactgcagtgaaccaagatcacgccaccacactccagcctgggcaacagagtgaggccctgtctcaaaaaaaaacaaaaacaaaaaaaaaaacaagatggcaaattatattttgtgtatattctaccacaactttttaaaaactcaaatcaaaatctgactgtttgtaaagatcaataaaattgacaagattccagcaaaactaacacacacaaaaaaatgactactatggtttgaatatcatttgtcctcaccaaatctcatgttgaagcttggtctgcaatgtagcagtgttgagaggtggtacctttaagaggtgattaggttgttaagagggattaatgtcgttctgaaaggagttctcactcttggagaagtgaacccacaagagtaggttgttataaagtgaggatgcctctcatgtttggcctctctttgcaaacatgtgcttccccttgcacttctctgccatgttatgacacagcacaaagccctcaccacatgcggcaacccatcttagatttctcagcctccagaaccataaaccaaataaatctttttcctttataaactaccaactctcgggtattttgctatagcaatagaaaatgaactaaaacaggaatgaaaggggatttcactatagactccacagacattaaaatgacaataaggttgggtgcggtggctcatgcctgtaatcccagcgggcagatcatgaggtcaggagatcgagaccatcctggctaacacggtgaaaccccgtctctactaaaaatacaaaaaaattagctgggcgtggtagtgggcacctgtagtctcagctactcaggaggctgaggcaggagaatggcgtgaaccctggaggcagagcttgcagtgagccgagatcacacaactgcactccagcctggacaacggagggagactccgtctcaaaaaaaaaaaaagaagacaataaaagagcagtatgaacaactccacacacataagtttgatatctttaaatgaaatggaccaattcataggaaatgacaaactaccaaaactcacccaagatgaaatatgtaacctgaacagctctgtaactattaaagaaattgaatttatagtatgaaattttctgaaataacaatctccaggcccaggtgctttcactaactaatttctaaccaacactttaagatgatgtaacaccaactctacagaatcccttccagaaaaaggagggaacaacatttctccactcatttaatgaggtcagcattatcctaaagccaaaatcaggcaaagacagtacaaagaagcaaaactaaagaccaatttcctaagtgaacataaacacaaaaatcatcaagaatatattagcaaatcaaactcaggaacataagaagagtaatataccacaccatgtagggtttatcccaggaatgctacacttgttcaatattcaaaaaatcaatcaatgtaatctaccatgttagaagtctaaatcactggtcagcaaactacggtccagaggccaaatccagtcctgtacttggtctttgtaataattttatcggaacatagccatgtatatttgtttacatacagtctacatctgctttcatgctacaatagcagatatcagcagttacaacagacagcatattgccagcaaagcctaaaatatttactatgtgaccccttacagaaaaaaatgtgggaggtcaccaccattagacctgccttacaagaaatgctaaagaaagttcttcaaattgaaacaaaagaactctaaaaacataaaaacatattaaagaataaaactcactataaagataacaatatattcaaattcagaatactccaatactgtaatggtggtacctaaatcagatttaagtctagtataaatgtaaagagacaaaagtattaaatattaactatacatacaacaatttggtaatggatacatgatatataaaagatatacattatgaaatcaataatacaaaatgtgaaaggagacgttaaatgtaaagttgtggtatactgttgaggttgtcagcttaaaatagactattaacactataagatgttttatgtaagcttcatggtaaccacaaaaaaaaggctgtagtagatacataaaccagaaaagaaccaacgcatatcactatcaaaaaaatcatcaaatcacaaaggaagacagcaagagaggaagactgaaacaaacaaacttacaagagtcagaaaaattgacaaaatggcgatagcatctccttgcctatcaataattattttaaatggaaataaatttaatactccagaagacacagattggctgagtgatttttttttttaattttttcatttcattttattttttttgagatggagtctcgctctgtcacccaggctggagtgcagtggcatgatctcagctcactggaaaccccacctcccaggttcaagcagttctcccacctcagccacctgagtagctaggattacagacacatgccaccacacctggctaatttttgtatttttagtagacatggaatttcaccatattggccatgctggtctcgaattcctgacctcaggtgatccacctgccttggcctccctaagtgctggtattacaggtgtgagccaccgtgcctggccgagtggatttttaaaaacaagatccaatgatatgctgcctacaagatacatgaaacagaaaatcaaaagcatatcactaccaaaaaatcgtcaaatcacaaaggaagacggctagagaggaagactggaacaaagaaactacaagagtcagaaaaactgacaaaatggcagtagtaactccttacctatcaataattattttaaatgaaaagaattaagctctccaataagacacagattgaatggatttttgattgtttaagacggagtctcactctgtcgcccagactggactgcgatggtgtgatctcagctcaccgcaacctccacctcctgggttcaagcgattcacctgcctcagcctcctgagtaactgggattacaggcgcccaccaccacacccagctaatttttgtatttttagtaaagatggggtttcaccatgttggtcaggctggtctcaaactcctgacctcaggtgatctacccacctcagcctcccaaagtgctaggaatacaagcgtgagccactgcacccagccaagcggatttttaaaaacaagatccacctatatgctgcctacaagagactctctttagctttaaaggactgaggctgaaagtgaagagatggaaaaagatattccacacacatgttaaccaaagagagcagaggatccttacataaaataaaatagactttgagtcaaaaagtgttaaaagagatcagaggtcaattcatcaggagaatgtaacatttataaatatatatacatgccccaatttggagcacctaaatatataaagcactatcaatagaactaaagggggaaatagcaataccgtaatagtggggaacttaaataccccactttcgacaacggataaataatccagacaaaaattaataaggaaacacagacttgaacattacagactaaatggacctaacagacacatacagaacattctagccaacagcagctgaatatacattcttcttaagcagacacagaatattctccaggatagatcatatgttaggccacaaaacaagttttaacaaattcaagaagaatgaaatcatttcaagtatctttctaacaacaattgtatgaaactagaaatcaatgacataggaagaaagctagaaaattcataaagaaatcaaaagggaaaatctgttaatatggttgtcatatttacaaatcaaggaaaaatgatcatctcaacaaatgcagaaaaaaaacagatataaatgcagtaagacttctatgtccacgggttccgcatctgtaaatccaaatgactatggatcaaaaaaatattatttgtttattactgtctctttagctgtatactccatgaagactagaaatttgttctattcactgctgcacccccaacacctaacagcaccagatgaaacataagcactcaatatatgttttgttgaaagagtagatggttctataactcaggacaaaaatatggattcaataacaaatattgagataacagcctaacaattctgaaaagcaagttacagttctgtctcccactgaacaaaataataaaatttcacagggaatcaaactttaaaacaaagccacttaatactggatgttgtgtcattaagctaagtgataagaaataagacactttaataccataaaggaacaggctaaagtgtcataattagcagaaaatatcactaatgtctacttagaaaatacaagtttatcaactgaaatgttaaaagagttctttaagattgtcagatcaacacagtaacatataaacatcaataacttttctatacagcatacagtagaaataattattctactgtaatagaaagagatatcaacaacaaagttactaggaataactttaataagtaatataaaactctacttatgaacataaaggaagaataaagtatcctgagacacaaacctaattttttttaaaaagggacaaaggatatgaacaacaaattcatttttgaataagaaattcagacacaattaatcaacctatagaatatgataaagtgctcaactttaccaagtaatcagggaaatcgaacaatgatatgaaaaatgaaaactactggtcaggcctggtagctcaagcctataatcccagcactttgggaggccaaagcgggcagatcacttgaggccaggagttcaagaccagcctgaccaatatggtgaaaccccgagatctctactaaaaatacaaaaattagccaggcatggtggcacatgcctgtagtaccagctactcaggaggctgaggcacaagaatcacttgaacctggcaggtggaggttgcagtgacccgagattgcaccattgcactccagactgggcaagagagcaagactctgtctcaaaaaatagtaataataataataataattaataaaaattgaaaagaaattttaaaaataataatttttaaaatgagtgaatgagaaaaacaaattctcaatagaaaaataacaaatacagtccaacaactgaaagagtgaaagtctctgaacacatgagatattcaactaaacaattttagaaatggaaatgaaagcaaggagtatcatttcagataccaaattagcaaagagtgataacacactctgctagtcaggttatgggaaaatcgacactagtaggagtgtaaactgaacaatcaggccgggtgtgctggctcatgcctgtaatcccagcactttgggaagccaaggtgggtggatcacttaaggtcaggagttccagaccagcctggccaatatggtgaaactctgtccctactaaaaatacaaaaattagccaggcatggtggcacactcctgtaatcccagctacttggggtggcttgaacccgagaggcggagcttgcagtgagccgagatcgcagcattgtactctagccttagtgacacagggagactctgtctctcaaaaaaaaaaaaaaaaaattgaagagaaaaacacaaggaaaaaaatccatgcaaaatcaatttttcagaactcctcgattaaaaaataatgtcaaacattaagaggaatatccattttgcttacagacatacctcattttatttcacgtcacagataataagttgtttgtttgtttggggacacagtctcactctgctgcccaaactggactgcagtggcacaatctcggcttactgcaacctccgcctcccaggttcaagtggttctcctgcctcagcctcatgagtagctgagactacaggcacgtgccaccacacccagctgattttttatttttagtagagacagggtttcaccatgctggcca

SEQ ID NO: 93337 - DNA, 47229 bp, Homo sapiens
agagatttgatggtctgctagaggattttagcaaaaagaagaatcttactattgaatgtaatctgagaagctaaggccaacttttgacccaggcagaaagtctttccatggcattttctttttatctacagaataggaaatgtgatcatgcatcagagataatcagagatagtcactaaatattcataatgctaagaacgcagcaaaaaataggaagaaagtggttagatcaatatcaaaggaagacatttaatacaaagtgagtctttcaaaaatatccttggctccagtgaattcaatgaaggattttttgcaaattcctcaaagaatttccttatattatttaaaatgtgctggaatataaaaaattattttgtgttttgtgttgcccagcctattttatgagataagtactattttgttaaaattttatatttaatatagataataaattgactaccccaaatggtggaatgcaaggatagcatattacaaggaaaatgttacaaacaactaacattaactagacaaaggatgaaataatcatttcaaaaaaggttgaggaggctatcagtaaaattcagtatctattactgataaaaatgttggaggaaaaagtgtatcagaaaatataatcatgggccagtcgcggtggctcacgcctgtaatcctagcactttgggaggccgaggtaggtgggtcacctgaggtcaggagtttgagaccagcctggccaacgtagtgaaaccttgtctctactaaaaatgcaaaaatttgcgcgtggtggcacgcgcgcctgtaatcccaactactcgggtggctgaggaaggagaatcacttgaacccggaaggcataggttgcaatgagctgagatcccgccattgcacctccagtctggggtacaagagtgaaactcggtctcaaaaaaaaagaaaatgtaatcatgttcagagaagagaggaaaggatgtagtaagtctagaaaaccaataacagcaactataacaaataattgcaataaaacatttgaaatcctcgataagcagtttgtgtttaaaagttctacaaaggccgagcgcggtggctcacgtctgtaatcccagcactttgggaagctgaggtgggcggatctcttgaggtcaggagtttgagaccagcctggccaacatggtgaaaccccgtctctactaaaaatacaaaaaaaaaattagccaggcatggtggcgggtgcctgtaatcccagctacttgagatgctgaggtttgagaatcacttgaatccaggaggcagaggttgcaatgaaccgagatggtgccacagcaccccagcctgggcaacagagactccatctcaaaaaaaaaaagttctaaataagccaggtgctatggttcacgtctacaaccccagcactttgggaagctgacgcaggaggattgcttgagcccaggaatttgagaccagcctgggcaacacagtgagacctcatctctattaaaaaaaaaaaaaaaaaaattagcctggggtggtggcccacacctatggtcccagtcacttgggaggctgagggaggaggatcgcttgagtctgagaggttgaagctgcaatgagccatggttggaccactgcactccagcctgggtaacagagcaagactctgtttcaaaaaataaaaataaataaataaaaattctaaataaataaaactttgtttttagcgagcataactccctaaaaatccaagaaattcagccaaaacaaagcaacagcatcaataacaaaaaaaatcctagaagcaataaattcaaagttacagggtatatgggtatcagttttcaaagaagcaaatgtatccctaaatattagggagacagaaaatacagcataaagagcttctatttacaatagaatgaaaacaaattacgctcaaggtttactgtgtgcagcacatagtaactattaaagaaaatttaaaagtacaatgagaaaaataaaaaaacatgaattcatggaaagctaaacttgactgccatttgggaaggcagaacgtagtaaagataaaaataagttactatgaaagagtcaattcaatatcaattaaaatcctcgctgcatttttataaaacatgacatattggttgtgacattcagctgcaagagtaatcaggcaagaatctcagaggttttttctaagtaattatgaagcaaatgaatagatcactgatgctaacatatttaccccaacagattttaaaacacatcagaccactggccgggcgcggtggctcacgcctgtaatcccagcactttgggaggccaaggtcggcagatcaagaggtcgggagttcaagaccagcctggccaacatagtgaaaccctgtctttactaaaaatacaaaaattagccagacatggtggcgcatgtctgtagtcccagctactcaggaggctgaggcaggagaatcgcttgaacccggtaggtggaggttgcagtgagctgagattgcaccactgcactccagtttgggcaacagagtgagacttcatctcaaaaaaaaaaaaaaaatcagaccaaagtggcaattatcaaaaccttgtagcattaagataaaacctgaaaactcattagtcattcaacatctattcagggactatttgtggaccagctgccctgtgccaagcactatcctaggagccaggtatatagctgtggaaaaaaacagggaaggtccctagggtcatggagaaccagacaagtcaacaagacaagtcaatcagacaagtcaacagttaacaggcaggataatttcagagggagagaagtgttgtgaagatcaaaagtgatagagagagggctggcgccggaggggctgttttggatttaactatgagagaaggcctctccgaagaggtggacttttgagctaagatctctagaacaaaatgaggtttctaaaaataatttcaattgattgtatctccataaagttgcttttgggcaatgcccatctgcaagactgagctaagtgttattgtcacatagatgatgcatagaaaaacatatgaattttaactttaattctaaccttcttcttaagaattttatgttcatctacattaaacacaaagactgggagaaaacatttgtgttatatatgacaagggtttcctacaaatcaatataaaaaagaaaacaatggaaaattgggcaaattgtaagaatgacaatttacaaaataaataaataaagtccaagaccaggcatggtggctcatgcctgtaatcccagcactttgggatgcccaggcgggcggatcacccaaggtcaggagttcaagatcagcctggccaacatggcaaaaccccatctctactaaaaaatacaaaaaaatcagctgggtatggtggcgtgtgcctgtagtctcagctacttagaaggctgaggcacgagaatcgcttgaacamaggtggtggaggttgcagtgagctgagattgcaccgctgcactccagcctgtcaaaagaaagaaagagagaaagaaaggaaggaagaaaggaaagagagaaagaaagaaaagaagaaatgaaagaaagaaagaaaaccagaaagccagtaaacataagagaaaatgctcacattgacaatttaaaaatgcaaattaaaactacaagatatcaaagttcactgattataatagtaaaaatcaaggtcatctagcataatcaaaggtgtggaaggcagacattcttgcatcctgttgttgggatgcagatagataaacacttttaaagaccaattggcagaatcttttaagattgttaatgagtgtactctatgattcagcaacaggaactgattctacagaaatagaagctcaagggcctgatgatatctatgtgcaagaatgacactctagcaattttattaatggttaaaaaaatggaaaatatctcataaatccatcagtaatgggaatgattgaatagagcatggtcaatacagaatatggaagcctcacagcactgaaaaaaagaagctttatgtacatgacaggttggtagagagttgaatgattgtttaaaagttgaaaaatacctccttttagatatctatttgtataaacatagaaaaaagactggaaggacatgcagcacattgttaccagcagtaacttcagcagtggggagaatctgagtttggagggagggaaggtggggctttcaatttttatcttaaacatttttaatagagaagaaaaatccaatctgttaaagaaatagacgatcatttatcccagctgggaagggagcatttctatttctgaatattcaaggaggattgcatcagcaccaagatgaatgtttccagatacagtcatatttttaaaaagcatgcccaaccaaaatgcaattaaataaatatcaggccaggcttggtgtctcacttatgtaatcccaacattttaggaggccaaggccaaggattgcttgagcccaggagtttgagaccagcctgggcaacacaggggcaccccgtctttactaaaataaaataaaataaattagccgggcatggtggcacatgcctgtggtcccagctacttgggaggctgaggtgggaggatcacttggacctgggaggttgaggctggagtaagccataattgcaccattacactccagcctgggcaacaaagtgagatcctgtctcaaaaagtaaataaacaaatatcaaacaacagaatgggaaaatctatgtgacgtgcataattgaaaaatatatataatggttgacagaaaagtatagatgcttcagattattcttggaaggaggtagaatcctatggacatgcaaaacatatatacagttaatatagtcaaagcacttactgagacaccagagaaggtcaatggaagaggtaagtacatcattttaaaatgagaaaatgcaacgctatcacatggaaaagcatatttttaccctcactgagaagagctgcatattaatccacaaataaaactactactgaattcaagctacctattgagcacatactatatatgtcacatagtgctttttgtagagcacctcacttaaggtagaaggtatcctcttttaaaaataagaaaagagaggtacagaggttaggtaacttgctcaaagccacacagctgacaagtggaggagttgggattgaaatccaggactggttccagagcccaagatctgatctattctgctagctgatctcctaaaattaaaagatcaaacccaatgttagtggaaaagtgtgccttgctaaaaagcacacacagagtacctgcttttttttttttttgagatggagtctcaaaaacagacgggagaatattagtccaaactgcaactgcaccattttgtaagctccctgctatggttttttgtttgtttgtttgtttgtttgtttgtttgtttgtctgagatggagtcactctgtcaccgaggctggagtgcagtgatgcaatctcaattcactgcaacctctgccttctggattcagatgtttctcctgcctcagcctcccgagcagctgggattacaggtgcccaccaccacacctggctaaattttgtatttttagtagagatggggtttcaccatactggccacgaaggtctcgatctcagcctcccaaagtgctgggattacaggcatgagccaccgcgcccggccgaatacccgctttatttttgagtcatctatttggcatacctctaagcctccaaagtctgcaggaccacacaagaactttgttctagttctgccctcagactgaaactctttctgtagcagggcctgctccaatcgtcctcaaacccaaagactgagacttctaggttcttggttaaaaccttcatgaggcctttgcgacagcagacctggaccatcgccaaggcaagacttctggattcttggttagaactttcaggaggcctttgtgatgccagacctgggtcattgccccagcaaccacagggcctgggactggggggttcccagatccttgaagctcactccgcctcctcactctcactgcatttcccaccttcctgtgggccttgcggcatcttcatcactgaggcacctggttackcttcacctcttgtttcctgccctcactgcattccctcacctctacctttttatccttccaccctaggcttctctcctccctcttccctcactcctgactcttcctcttcccagcggacggctggaggaccgctcagtctctcctctctcacttcccttcctctctctcaccttcaccacccaacacctccctccctgcctctttctttctgctccctcattctctccccaccactctcttctcgtggcccccttgccygcgcgccctcttcccttccccttgcctcactctctcagctttcttcccacagttgagctcgggcagctctttctggggatagctatgggrctttgggggaagaaagggacagtggctccccatgaccagagtccaagacgaagacctaaaaargggcttatcaagaaaaaaatggtgaagagggaaaaacagaagcgcaatatggaggaactgaagaaggaagtggtcatggtgaggccacccaaagtgggcgcygacagctgccctctgaaaacactcctccacctatctttaacatcttaccttgagaatgaaacacacaggccagagccacatctcttctctgttaggctttggagggaaggagagggttaaaaaaaaaaaaaaagatacacacagagagacagggcagctcaacarcaagcacaggtatattgcagacacctgtggaagtgggggatcagcttaattccacagtccactgccacttacaggctgggtacttatagggatggatgggaggagtctgggctgtatggcctgctgcctggcaggatatcgataagatgttctcatgatgaggtgatttttggcccttgtttccacagaatataatcatggtattccctggacctttgcccagcaggatgtgatagggatgtttctttagtggggtctttgtctttaattgggccttcgtctgccctgtggtcaggtggttaggcaggctgtttctctggcccgaacccccgtgaaatgtttcactttgaccaaggcctgtaaaatagtggggagctaggccgggcgtggtggctcacacctgtaatcccagcactttgggaggctgaggcaggcagatcacctgaggtcaggagtttgagacaagcctggccaacatggtgaaaccccgcctctaaaaatacaaaaattagctggtcctggtgatgggcccctgtaatcccagctgcttgggaggctgaggcaggagaaacacctgttgggaggcagaggttgcagtgagtcgaaatcgcaccactgtacaccagcctgggcaacagagtgactccatctcaaaaaaaraattgcagggagcttacaaaatggagcagtctcagtttggactaacattctccagtctgtttctccccctctccctggaaatgacctgggccaccccctgtccctcaatgcctctactgtcccctcaggatgatcacaaattaaccttggaagagctgagcaccaagtactccrtggacctgacaaaggtgagtaagaagctccctgaggaggcagagagtctccaactctgactgtgaggctgccaggacaaaagctgaactaggaatccagccccctaacttcaagtccaacgttcccacccctcaccctctgcctggccamgttccatggacactacctggaaaaagctgcaaatggtaactaccctcaaagagagtgtgggactagataagagaataagaatgctttagggcagtgctggtcaaacgtcttgtccttaggtctcctttacactcttagaatttatctaggaccgcaaagaacttgtgcttatgtggcttaagtctgtctatatttaccatattagaaattaaaattgagagttttaaaatgtatttctcaattcatttaaaaataacaaaaataaagttatcatatattcatatatgttttgacaaataactgtatttttcaaaacaaaaaaattagcagcatcttacatttttgcaaacctcttcaatgtcttgctttttaatagaagatagctggattctcaaatattttctgkataaaatctgttgtgatgttatgccagttggccttcagaaaattccactatatactcttaagaaaatgagagtaaaaaaaggcaaacaatgatttagtattactatgaaaattgaccttgtggaccccctgaaagggttttggggcccctcgggtgtttcaggcagaggttggggagtggctggtggtgattggcaggttctactatcattttcattaacaggaaaaagcacataagcttgtgcacaagagtggaatgagaatctatgcattcatgttttttgttrgtattcttttctatttatgttttttaaaaatttatgggccaggtgccgtggctcacacctgtaatccaaggcaggcagatcacttgaggtcagtagttggagaccagcctggccaacatggtgaaaccccatctgtattaaaaatacaaaaattatcctggcatagtggcacacatctgcaatctcagctacttgggaggctgaggcaggagaatcacttgaatgcaggagaatcacttgaacctgggagatggaggttgcagtaagccgagatcatgccactgcactccagcctaggtgacagagcaagactctgtctcaaaaaaaaaaatggatatgtagatgtacatatttatggtatacatgtattattctgatataagcatacaatgtgtaatgatcaaatcagggtatttaggatacccataacctcaaacatttatcatttctttgcatgggaacattccaaatccactcctctaattattttgatatccataataaattattaactatagttgccctagtgtgctaccaaacactagatcttattccctctaagttggagagtcaaagcgtggtgttaatatgttatcaacattaagtattatatttcatcatgacattggccctgcacattataattatctgtatgtatttatctccccactggagcaccttaagggtagggaccattcttattcatgttggtatcctcagcacctaggacccgagataggttctcaagttcaaaaaggtttgtgaatcaatccataaacaaaaaccttcctatgtaagcatgctaaatgacatccctcctctaatgcaaattttgaaacctcaccttatccaggaagaacttccagactgaccttctgaaagcgtctttagtctctagacccattctggggctccaaatgtcaggttcccttttgctatggctgttcctcttttcacagctctctatccaaccctatttcttctctgcacagggccatagccaccaaagggcaaaggaaatcctgactcgagrtggacccaatactgttaccccaccccccaccactccagaatgggtcaaattctgtaagcaactgttcggaggcttctccctcctactatggactggggccattctctgctttgtggcctacagcatccagatatatttcaatgaggagcctaccaaagacaacgtgagtctcttcagctactactrgccagccctatctctgcttagccccagacactcttttgctcagcagcctagcactcctgaagtcctctggcccaaatccctaattacattattacattaatgtaataatgtaataaatgtacattaattataaatgtaattgattgtaattaattacaatgtaattgattaattacattgtaatgaatgtaattaattataaaatgtaattaaatgtacattaatgtaataaatgtacattacataataatgtaataaatgtacattaatgtaataaaccaaaatccctaatactccactttctaagttccatcttggttcctctcaccttttaatctaaaaagcttctggtccagttccctgaggtgcacaatgtccccgaaaaacttgctgttctttgatgaccttcccaattgatccccaaagcactttgcagtccctttctcttctccacaattttaacctcatctccttcctcccagcctccctcacaatccaccccctccatccagagattagccttcctggagagaaagatacaggccttctctgaccaggaattttgctgacggctcaccatggctcagggttccttccccaggaagccaagtgtactggtcccacctcagattcttctctacccctctgctctcaactcagtcttacggtctcttacacctggtgaaactgctgtgccccttgcagactgattttctgaggatgaagaagacgacaaggtcycactgataaacgctttctttccccaccctcagctctacctgagcatcgtactgtccgtcgtggtcatcrtcactggctgcttctcctattatcaggaggccaagagctccaagatcatggagtcttttaagaacatggtgcctcaggtaggattggagtgggaggatctagtgggagcaggagcaggatgtggccaaatacacaatgatgaagtcccrtggaaaattatatcctatgataagtgagctgagtgaggttggtgatgagggggtcaaggtactgtatcagtccttaaaagtacctggaaaagctgtgaaaccctgagaaagacataaygtcacctatgaagtgctctgatctagaaggcagaatctgaatctaaagaggaaacaccatacaaaccccaaataagaacattctatttttttaaagagacaagtgttggtgggggtgggagcggggtgcggtggggggtggctggattcttcaaatatcgatgacctcaaagacaaagaacagctgtggggatgttccagattaaacagaccaggcatagtggctcacgcctgtaatcccagcactctgggaggctgaggcaacaggatcacccaggagtttgagatgctatctctacaaaaataaaataaaataaaatagctggtctacatctgtagtccaagctacacaggcagctgagacgggaggattacttgaacccaggaatttaagtctgcagtgaactgtgaccaacctgggcaagaccctgtctcaaaaaataataataataataaaaagaggctaaagaggcatgacaactattccgagggtggtggctcccacctgtaatcccaaccgtttgggggaccgaggcaagagcactacttgagtccaggagttcaagacgagcctgagtagtatagtgagaccttatctctacaaaaaaatttaaaaattagctgagcgtgcctgtagtgccagctactcaggaggctgaggtaggaggattgcttgagcacggaaggcagagattgcatgccattgcactccagcctggtgacagasagagacgctgtctcaaaaaaaagmcagggacgtggcaactaaatgcaatatctaaccctagatctgattctgtgccagaggagaaagtaatgctttatttttacttttttattttgagcttttattttagattcggggatacatgtgcaggtttgttatataagtaaactgtgtgtcacagggatttggtgtacgaattatttcatcacccaggtaataagcatagtacctgataggtaggttttctgtcctcacgctcctcccaccctccaccctcaagtaggccttggtgtctgtttttccccttctttgtgtccatatgtactcagtgtttagcttccagttataagtgagaacataaggtatttgaytttctgttcctgttagtttgcttaggacaatgtcctccagctccaccaaagataatgcgttaaaggatgtattgggtcaattggcaaaactggaatactgacagattaatacagtagattaaagtatcaatgtgaaacttactgaaattgataactacattgtggttgtttaagacaatatcttaattcttgggaaatgcacaatgaagtttttaagataaaagatcatgatgtaggtaacttaccctcaagtagttcaggaaaagagtatacacagagagagagaggatgaaaacaaatgacaaagtaactggggtgaaatgttaataggtgaatctggataaaggttatataggtgttcttggtgctatttttattcttgcaacttctctgaaagtttaaaattattttcaagttaaatgttttttaaaggtacctggaaagaatacgacggtaaacagaggttcctaggcacgggactggaaacttgcaaaggaataggctccacattttccctataatatgatcatgttccagtagtatagcccaggatttccttctctttttggtatcacttaattccttccttgggtaagagttttgggacaaagtgtttgggcagttttggagactaggagtttaggsatggtcggttagcttttgctacctaacaaactaccctaaaacttagtggcttaaaatagcaagctcctgtttctcataattctgtggctgtgctgttgttcctcagctggggctggatggtcttagatgacctcatccacatgtctgggcccttagctgagatgmctgggacagctggggcctttttcttcgtgatctctctttttacagagaggttagcttgggcttgttcataggrtggcagaggattctcagaaacaggaatgcaagccccagcatgaaagcactttttttttaattttttgagacagggtctcactctgtcactcagactgaagcrtagtgaygtgatcacggctcactgcagccttaaccttctgggctcaagcgatcctccaactttagcctcccaaacagctgggactacaggtgcatgccaccacacctggctaatttttttttcaatttttgtagagacagggtctccctatgttgcccagtctggtcttaaactcctgggttcaagcaatcctcccacctcggcctcccagtgtgctgggattacaggtgtgagccaccagtcmcggcctgaaagcactttttaaactcctctttccatcacattcattctatgggccaaagcaagtcacgtggtcaagcccaggtttaggggtagagagatagactccacctcttaatgggaagagcgtcaaagtcacattgcaaagggccctgcaaacagcatcatgggaatttgcaatctgccaaagacaccttcaagaatgatgtgrtgggtgacagtaagaaaggggagtaaggaggagggagaccartaacagaaggttttaggctaagagtgggatgaggaaagccaaaagttttggaaatgatcctgcactatcctctcatagcaagctctggtaattcgaggaggagagaagatgcaaattaatgtacaagaggtggtgttgggagacctggtggaaatcaagggtggagaccgagtccctgctgacctccggcttatctctgcacaaggatgtaaggtgaggggatgccgaaagctatgtgagggacccaagcgtgatctcatggcagggtagacacctgggcyrttagagaaagtayaagcttattactcagaatcttgagaagttacaagtgcagatttgatgttagagacaacagatgtgtaaatttgtttctctcagtctgtcagtgatgatgttggtgaccagatgaagacatactatttttgtaaataaatctgccttttttcctatgctcaccttacaacgcgtcccctctcccatcccaggtggacaactcatccttgactggggagtcagaaccccagagccgctcccctgacttcacccatgagaaccctctrgagacccgaaacatctgcttcttttccaccaactgtgtggaaggtgaatatcgaaccataagtagcatagattcaaaagcaggcaccaaaacataaagattttaataactgtcttctaaaggtagygaggtaggtaagagccagtaaaaagtcgagcttctccatcacgagctgtatgacctctggtgaaaggtcaaggtcatcatttccacattcgcacartgatgacagtaaaagtcgttactctgtagattttcgtgtgaattgagataatatatgtaaartgcccagcacaagacctaatacattgtaagtgacctacaattattagctattattttagcttgtgaatggactatgctgtttaagctgaaaatggcacagaggggaggaaaattgttcagccctgctaagtcattcttctcttaaggtaagccctaacttctaactagtcccctatccaagagaagatattggcattggaaacttgaattaccagaggtgccacttagactttaccacttaaactttggctttgctcctagaatctaggaatccttgaactgggagacagttctggcaaagtggtaataaaaagggactgaacatcattctgtcaatctctcctttgccctttccccttaaggaggcctgaagactccatggagcacacttgaaaactattattcatgcttaagaacaaatgtttggttatctaaaaatagttcttttgtttgttttgtgtttttttgaaacagagtctctctctgttgctcaggctggaatgcagtggtgtgatctcagctcactgcaacctctgcctcccaagttcaagcaattatcctgcctcagcctcccgagtagctgggattacaggtgcccaccaccacgcccagttattttgtgtatttttagtagagatgggttttcaccatgttggccaggctggtctcgaactactgacctcaagtgatctgccctcctcggcctcccaaagtgctgggattacagacgtgagccaccatacccagcctagaaatattttttatttgaatgcatagtatttgttaaatattataaatattatctctaattcccacatgcgcacaataccagatattatccctattttacatgtagcagactaaggttcaaagaaattaagcaccatatccaagagtacaactcaatagaaaggaggcgggtcagggattctaatgtaggtctgtctccatatctcgtgctccttccacagaccctgctctgtgctgaaagattgctatttaatttgaaaataccttaaagaagaagcgtaatgttaagacagaatagactatgagaaagaatccaactagaaaataaaatacatatattaaaaatgttttaaaattgattggacagaagcaagttagcaagctttccccaaaaacactagatgtctactattagattttaggaaaaaatttgcccaaatttacccttacaaagtagggttttcatcagctaagtatatgttcagataaagggtatggaggaaagtggatggtggcatttcgactgggaagcaagggtctgtttagatagaaaatggttttgtaggaggctaaaaaaacccaacatgtggccaagaaggtggagctaggtagaaggagctgggcggaaggactttcagttgaggaatttctcagcaattcacagaccgatagcatttaccctagatcaatttgccctttaacctttaccctagacttttaacctttgccttagaccaatttgcaaattagtagcataactttaacctttacccttgcctcccatgtctcatcaccgtagaccttgacatggctgtggcacagacttctctttgggttctcatgcatcttcaagggagcccaagctatttctctggcaatacatggaaggtgtatgaagaagccagtctggcctggggtgctggatgcttggccttctcagccttccctgaggttgacatcaacccaaccccatctctagacacactgagattaattattaaatcccgtttctccaagtgtgaggaaaccatagcagaaggaataaaatagaagaactagactaaaccatgacacaagatatatgtaggtgacaccatacactacccaccctcctccacccgrcccaaaataggaaactcctcagcatctctcaagtatttcagcatcttcattccataggacccaatatatgcctttggcaaccagtttgaagcccatctatagaatgcctcggcctgggaatcttttcaggattcctcctccacataaacactgacctgacctgtctgctcctcgagtaggaccctgctctcagactcatacagctaaaggcaaccttagaaaacggagaccaccacgtgcagcaatgttcatgggagctcccagattagagatgctcctactaagtcacaagtatgagtctatattggtcctactggaaaccctaagttcatctaaatgatgagaagaaagagaaagaaactaattttcaagtgcctatgatgtacctaaccttctagactcttaaaaatattcagtcctcacagtttagtaagtgctttcattccatttcgaagatgaggaagcctgactctcagcatttaagtaacttgccccaaggaaaagagctagtaatttagaaagctgaacttccggccctgagtctttctgcttttaaaataaatgcagtttcagtgatatgttgcctaagtgattctgactctgatttcaatggtagaaatttcagtcattatggtaaagcaggaagaattactttaagaaaagaattttgtcatgcccctcatttcaaggtgagtggcctgcatcatgtgtgtgtaaagccaaacatgatgtccaagctgcccttctgactggggcagtgctggtggagaggaaagagggacctcataagcacagaagcccagctgttatggcccgtgctacccagcagaggtcagattggctccagccagcaaagcagggagggggcgcaagttacagcaggatttctcaaccactcacatttggggctggataattctttgttgtgcgggacaggagagctgtcttgtgcgtggcaggatgtttaacagcatcctggcctctacccactgcatgccagtaggagccttctcccaccccagtagtgaccaccaaaaatgtctccaagcattgccaaatgtccccagggaagggggttggtgggtagggattgcctccagttgagaaccactgtgttaggggataaggggatgttggaacatagggctctaccagaagggtaaccactattcctgggatctagaaactcctcagctgctgagggcaagataagaactatataggcaatagaagatactcagattaagtataataaaggccttcttgacagtgaaggaaattaggcaataaaattgggtatttcaggagaactgtgagacctcttcagagatttttcagactagaagacctttatttgtataaactaaatatgaggagagcagaacataatgacctctcagagggccttgagtctccagtttgtttttgaccattgacagcttgctctttgtgggaaccaaaccaaacagcttcctcaattcagactcggcatgtcttgggtgaccatctctgatggaaaaaamaagaaacagcttttttttttctctacactcacgctgaacacagaacacttctgtgtccaacatgtgtagacagttctccccaccaacaaccagttctccaaaggacaatgattgggtgtcctataattcaattcaactctgacacaatccacctggagatagcatcagatcccacaggttagggctcagccccacaagacagtccctaactctagaccccagtcacaagtcctaggttatggcctggctataaattggggttcccacgactccctcctcaggtttgattaatttgctaggatggctcacagaactcagggaaacaccttacttaggtttacccattattataaaggatattacaaggatacagatgagcagtcatatggaagagacgcacaggacaaggcacgtgggaaggagcatggaggagcgtctgtgccctctcctgtccagggtgccctccagtaaccctccacatggtcatacacatagacactttccaaacccagtcctttgaggtttttaatggagatttcattacataggtataatcggttacattattagccattggtgatcaactcaaccttcatccctcctcccttccaaagaggtcagtccatgaactgcaagttccaactctctaatcacatggttatctgccctggccaccagccccatcctgtggctatccaggaaaccaccaagagtcacctcattagaacaaagatactcctatcacccaggaaactccaaggcatttaagagttctgtgtcagacactcctatcactcaagaaattacaagggtctcaggagctctgtgtccagaactgggtcaaagaccaaatattagaacaaaagattctcctagcacccctatctttaagggtttttagaagctctatgtcaggaagtgggggcagagaccaatatctatacytcttatcatatcacaacatcacattgccctctcctgcttcatccacaggaaccgcccggggtattgtgattgctacgggagactccacagtgatgggcagaattgcctccctgacgtcaggcctggcggttggccagacacctatcgctgctgagatcraacacttcatccatctgatcactgtggtggccgtcttccttggtgtcactttttttgcgctctcacttctcttgggctatggttggctggaggctatcatttttctcattggcatcattgtggccaatgtgcctgaggggctgttggcyacagtcactgtgagtagacagggtggaaaatggcctcagggcagacaaaccaccccagggaaaagggatcactagcgtctcttttgttgttgaacctttcaagtgcagggtcttcctgatatgtaaataggtatcaggaataatttagctctcawtattacactgactccttctgcccatatatttcggtgtcttctctttcctcaatgagagaggaagcaagtttcaatggaaagtgcattggattatcagtcactgagagtgagttctagtattggctaaatcacttaacatctccagacctcaatttattcatcagtttatggaggaagattaatttggaattatagaatcctacaggaaaggacttcaaagatcatataaattcaacctttcaaccagtgctgaatatcctctataaaacccatgggagatgattattatttctattaattgrgaagcccacccctttctgtctcaattcgtttcattgttgtcttgctctatttacatttcactgtgttaagcagaactataaatccctgtttgtcctaagtttcccagctgaagaaacacaaaataagtcaattctttctcttctacagactagccctttagatttttgatggtagccattatgtcccctcaaactctggtggtagcaggtgaaataatccctcttcccttagccattcttcctatgacatggtctgtaggccacctgtcttgatgatcacctgttgagggtatgctctagtttgtcaatattcttaaaagagaaatgacaataatacttggggtgtgtttggactagcacaaaaatgtagggactagtgatattatgtaaatacattataacccctaatcctgttattagaagcccatacttagataaccacagcctaagaattcattagcttttaaaacaatcttgcttcacacttgacttacattgccttcacaatcaacaaaagtcttttggtttaaatgatttttcaagtccttttcaatgctgtgatattattgttatctcctccacgttctttgtttaaactattggtctgccgggcgcggtggctcacacctgtaatcccagcactttgggaggccaaggtgggcggatcacgaggtcaggagatcgagaycgttctggctaacacggtgaaaccccgtctctactaaaaatacaaaaaaaaaattagacaggcatggtggctggcgcctgtagtcccagctacttgggaagatgaggcaggagaatggcttgaacctgggacgtggagtttgcagtcagcagagatcacgccacagaatgagactccgtctcgagaaaaaaaaagaactattggtccaacaccccctccacacctagcatcttataccaccataaaagattagctatctatgtggtccctggaaagattggacttaaagaggtgtggcctaaacttgaatgaaaaagagattgctgaatagaaaagatgcaaagatcctgagggagcagaatattccaggggggaataaagaggatccctgtctatgataccctggtaaagaaatacactcttttttggccaggcayggtggctcacatctataatcccagcactttgggaggccaaggcacgcagatcacttgagcccaggagttcaagaccagcctggccaacatggtgaaaccctgtctctactaaaaatacaaaaattagctgaacatggtggtgcatgcctgtagtctgagctactcgggagcctgaggcagaagaattgctttaacctgggggatggaggttgcagttagccaagatcatactctgcactccagcctgggtaacacagagtgagactctgtctcaaaaacaaaaacagaaaaagacattttttttaaatacactcttttttgaaactcttaccataaagcacaaaccacaatcactttcctaatttcctttaccacagccagaaatgaaatgtgtaaagagtaggtgggaacaaaagggaartaagtacaaaaaatcaaaatagcattaaaaatgatcaaatatccacaatgcaaaatggtgtgagtattccatctcccatgtgtattctctcctctcttcttggctttaggtgtgcctgaccctcacagccaagcgcatggcrcggaagaactgcctggtgaagaacctggaggcggtggagacgctgggctccacgtccaccatctgctcagacaagacgggcaccctcacccagaaccgcatgaccgtcgcccacatgtggtttgatatgaccgtgtatgaggccgacaccactgaagaacagactggtgactagtggtattggtggaacaagagtggagggatttgggggatgtgatgagtgagctgagagagaatggtgagtccagacagacaggagggagcctgaaagtggagtggagaagagggaggtgtgaaggaaaagaaatgctgctcctgtgaagtatctgggtgccaaagaggatgtgaataaccgcttgcttaaaattctcattccctgctcacaattcttcttttctttctccctaggaaaaacatttaccaagagctctgatacctggtttatgctggcccgaatcgctggcctctgcaaccgggctgactttaaggctaatcaggagatcctgcccattgctaaggtgtcaggcccaaggggaagagggtacctcagtgtccagggtgtaacctgacctctcccaaaaaatcctctcctggagctcagtaatttccccccaggtacccgccctccccatttgtcccctctccatgttgccacaggtatgcctcatgcccaggtagcrtgcccctggggcttactatacaaaccccatcctggcagagggccacaacaggtgatgcttccgagtcagccctcctcaagttcatcgagcagtcttacagctctgtggcggagatgagagagaaaaaccccaaggtggcagagattccctttaattctaccaacaagtaccaggtacagaacccacaaaggtaggagaatggtggtggggggatgggcttatcactggaacaaggggagctttgcctctgccttcaayttcacctcggagmagcagaggagctcagcagaacctgcatcccaattaacrgaagactcacatcaagagaacgtgacaaacaggtaaagagaggcgaaacaggtgataaagggagaggcatcagtcagtcctrtrcagagatctgagctctgccacttggggaaaaagcgagtcataaaatcctctctgaaatgtctgtagacagcagaagctggttggtgaaagtcatgttagagtcacatgcagctgttaggaggcccctctgtgtctactaggagatttgccgctgcagtattaggttgcatttgcagacactttatttcattagccatcaatatttcctttcaccccacacttggcttgcagttctagtgactgccagcgggtaggcgatcaggagtctctgcctccattggcgcctgaccctctcccctgtgtgtcttgtaacttcttttcttataaggatgcaaatcatattagattagggcctcccctacttctatgtaaccttaactaattacgtgtgttcgtgttcgtgaagtttttcatttcccaggaacattttggtccactctccggggaggagtggacaasagcaggggaaatgctgagtgagggaccatgaagggacaggaaagagtctttctctccaaagtagaatctgggcagactgaagagaaggttatggtaggatgcaggaacagtgacattatcagaattggagctttgccaggctcaagctgagttccacggggcaatcatgatttgctcagggaagtagattcttcaactccttgcattactgaaaaggccagacattcaggtgtgggtaaaatgtctcagagaaaatgacaatgagactcccaagtctgctggtatcttttttttttttttttttttttgagaaggagttttgctcttgttgcccaggctggagtgcaatggcgcaatcttggctcactgcaacctccacctcctgggttcaagggattctcctgtctcagcctccagaatagctgggattacaggcatgtgccaccacgcccggctaattttttgtatttttagtagagacgggattttaccatgttggctatgctggtcttgaactcctgacctcaggtgatccacccgcctcagcctcccaaagtgctaggattacaggcgtgagccaccatgcctggcctctatataaattttttttaactgaattactcatcgttttacactgaaaactgagcaagtaagggttaaatagatctatccttttctgtctcaactggttgttagtcaatgtaataaaataggtctcttaggcccaaatggcaaacttattcccatttttttctgatgtttagtggcctcactagtctgacaggaattctgtggcttggcagggcctttgacggcagcatagcctttaactggaaagaattaggtacctctccgtccatgtgattcaaaataaaagcaaaacatattcacaacatttgttggggcatccaacaaatagtgactttctctcagatgactatgttgctgcctcttccgagctaccaaacatgcggctcaaatggcagacttgtcctcagtggttcaccgagtgtgacaggctgtcccactggccgccaagctctggcaggcacttgttctgggaggccctcagtttgctgccttccttagcttgccctaaaggtggagactccagtctttgcaagagacatctcagactgctggcggtttgcagagcctggtctgtctccctctgagataaaaatgaaacgaagaagatgctctgttccagcatttccagacttctccctccgtctcttttatatgtaattttctatcaagatgtgattttcttccgtgacctctgagattactagtaggtcttgccatcacctcctgggcccttcacttattcaacacattttactgagcacttagaaaactgagctctttaaacyttttccagctttctgcttaagtgagttacggttcttcctcttaattgcttaagcatattttgaatgtaactgaacaaacgaacagaacagttgtaaccacgttttgtgcactggtttcccaccctgcttaccctgtgggcagtacartcyggcctcctctgcactcccgctgttcctttcaatgcatcgattttgttctcaacaggcgacctagcgggcatttcctgtccatcacaagaggaaccccatggagagctccttttcatacatcagagatcaagaggaaatgcaaaacccacatttctctctccttgctgcgggttgtcccctcgggttcatttcatgaatgtgccctttccctcccccmccacagccacaaggactcccatgcccaaccacactagctagcccctctcaggagacttctcacgcttttaggagacagaggcccagggactagaatgactaacttatttttggattgtacttcacagttttcaaagtattttctacactatctcttataaaaacccaatgaagggccaggtgtgtggctcatgcctgtaatcccagcagtttgggaggccaaggtgggcagatcacctgaggtcaggaattcaagaccaggctgaccaacatggtgaaacccccatctctgctaaaaatgcaaaaaatcagccaggcatagtggcggtgcctgtaatcccagcagtttccgaggccaaggttggtagatcacctgaggtcaggagttcaagaccagcctgaccagcatggtaaaacccccgtctctgctaaaaattcaaaaaatcagcccggcatagtggcggtgcctgtaatcccagctactcgggaggctgaagcaggagaatcacttgaacccagaggcagaggttgcagtgagctgagatcacaccactgcactccagcctgggcgacagagtgagactccatcttcaaaaacaaaaacaaaacacaacaaaaaaccccatgaaggaggcaaggcagaggcttttatgttttgtcgaaggaactaagattttgcaaagttaaatggactgacctgaggtcataatgcattcttgctagccccagaacacaggtctttggacttttttttttttttttttttttgagacggcgtctggctctgtcacccaggctagagtgcaatagcgcaatcttggctcactgcaacctctgcttccagggttccagcgattctcctgccttagcctcccaagtggctgggattatgggcacatgccaccatgcccagctaatttttgtatttttagtaggagacggggttttgccatgctggccaggctagtcttgaactcctgacctcaagcaatccacccgcctcggcctcccaaagtgctgggattacaggcatgagccgctacgcctggccttccgactctttttctttcctgtctactctcttttctttctttgccagccccactatttctgctctctcgccatccagttggcaaggatgcaggggaaaagtgagagtgcctggttctgcccccagggagcttcaggctgagaagataatrgagattcctgtgcaaataataccaggctgcagttttctggaaaaaggaggaggggctgggytcaacctggggcgagatgtgactggggaggggagggaacaaaagaaatgggggtatgaaacacatttttttacctttgaaaccttccccttctttttgcccctgatccttgrtctctcctcctgtcccatcagtgctccctttgctctccctagatgtccatccaccttcgggaggacagctcccagacccacgtactgatgatgaagggtgctccggagaggatcttggagttttgttctacctttcttctgaatgggcaggagtactcaatgaacgatgaaatgaaggaagccttccaaaatgcctayttagaactgggaggtctgggggaacgtgtgctaggtgaggagctttgggagaagtttttaaaagaatggcaycaaaatggttattatcystggggtgagaaatcaaggatgttggggtaagcagataggaatgtagagtgctggatgactactggtccctccctctgtctctctccaggcttctgcttcttgaatctgcctagcagcttctccaagggattcccatttaatacagatgaaataaatttccccatggacaacctttgttttgtgggcctcatatccatgattgaccctccccgagctgcagtgcctgatgctgtgagcaagtgtcgmagtgcaggaattaaggtaaatacttgcccagaccaggagcccctcacctgtcacaagttgaagcatctacyagaaggccttgcgcagagtagatgcttaatacycttagtttaattgagcggatttctgtttccttgggcttatgatttttaattaatagtaagtttcctctccagttagaattctacttgcattgaacattagaatcaccagggaggctttaaaaatcggatgtctaggacacaccccagaccgatttaattagaaactctcaggataggatcctggcaacagtatttttaaaaactttcctggagattccaatgagcagagaagtttgagaaccagcgtccagcccagtgcttctcagaccaacgtgcgtgcagatccctcagggattgttttgaaatgcagatctggcttcagaaggtccatggaaacctgagagactgcatttttaacgagctcccaggcgatgctgttgctgctggtctgcagaccacactakgaatagcaaagtgctagaagatgtcgtgtaaatgtgctgccgagatgggcggtaaaagggtgaggctaggaggsctggggctctggaccaggcaatagtgagaatgagatattgagagctgaaggatcttcaatgggtgtgagcagctgccctaagaggtatatgcccaggtctaaaaactggaaaccaaaaatcggtcagagcaagagtgaaagttcagcttcagaacaaacccagaggtagaaaatcctctttggtcagggtgggccttgaacttcatgggatggcagcagtagaattcttcaaattctgaggtgttckgtgtcccatgtttcccaggtcaaattctaagactcatcatatacatctttacagcttagatatagacaccttccgtgctcataccttacattctggattacctgtgtattctggctcctagacttgggggattggaggtatttaaggagaactaggtgttctctgttggaactggctttatgttagacctgtgactgttggcagtttgtccagggtcagtctgggccatgtgtgctgggagggacttgggaaccctgggcagtggtttccaggtagtgatcattcctccattccttcattcagtaattatttgttgatggcttactatgtgctaggcattgtgctagggcaggaaactttacaaggaagccacccttgcagagctctcagttcagtggggaagagagataaacaggcaatcaccatacagagaagtgtggcaagtgctgaaatatggcaggaacggaatgctgtgaaagcacgtggcctgggtattcatctttgggtagaaatgggacaggactaggtaccaggtatccaaaaccaagctgaaaccaaggcacagggtgaggccacagaaagaagaaaggtagagtgagaatttcaatgcactgggccttagatgaaattttgctaggcagatggattattccagacattcctttattaccacttgttctatgtgtaggtgtttctgtctttgcacttaaggaagcagaatagcttctggagcaattaaatgaaattctgaatatagtcaaatctctggcttattcctggtaaatctaggacccaaattgtcctgttttatggtctcatggtcttgacccactcccaagggttgaaatcacagtagcatggtttttggtctacaccacaagttcttgggaatgagcgactaaaacccttgttgaaaaaagcagtggtctgtcagttctcagaggagaaaaatgaaggatccgggctctgaagatgattctgctcctcttccctctccttcccaacccaggtgatcatggtaacaggagatcatcccattacagctaaggccattgccaagggtgtgggcatcatctcagaaggcactgagacggcagaggaagtcgctgcccggcttaagatccctatcagcaaggtcgatgccaggtgagatcactaaagaactcaagatctgccatgttccctccatccccagcctgccccacccagatgccactttactraagttcttggagtctccttcaataggtaggatgtgtggggtttacactacaaagtaaaacataataggaaaataaagtgaatatgtcagtgggttttcaaaggaagcaagatgaagaaagaggtaaagagaggagtggttggcaaaagtgtggggagggaataggatgtgtcaatttggggacaatatagggctagggacaagtgaggagactaggttgaaagaagaagcaatgaagctatagtcaagatgggcaccaagacccctggtgaattctcaacactcaaaactagccttttgaaattattttccctcagtgctgccaaagccattgtggtgcatggtgcagaactgaaggacatacagtccaagcagcttgatcagatcctccagaaccaccctgagatcgtgtttgctcggacctcccctcagcagaagctcatcattgtcgagggatgtcagaggctggtaaggaacgaaaaggagccccaaggaaactggcagaactcctgtggcttagccccgtcccaaaccaagcagaggaacatgtgggctgggctagaggagactccagagagtaccccatctggaacctccatggtggccttcagtttggggctccctgaaagtttaaatatctcaggrsgagtgggagaaggacgggagcccyaaatcaagcatgattacatcaggaaacaagggatgcagaaagcgtactgatctttgggactagttctggatctgatgcaataaattgttcactctctctgtctggacttcctcagggagccgttgtggccgtgacaggtgacggggtgaacgactcccctgcgctgaagaaggctgacattggcattgccatgggcatctctggctctgacgtctctaagcaggcagccgacatgatcctgctggatgacaactttgcctccatcgtcacgggggtggaggagggtgaggaggcagggtgcccatggtggagacttcaaccctggactcaggtgggggttggtgtacatcccctctttccgttttcccatcatccaacctccatgagcctgtacgggctcagaagaaaatcactgtaagacaaaattttgcaaattagatcagctggtacatagaccatcactatctgcaaccccttttgatgagatcggagaaaagtcccttttattcattttgttttcctatcagggagactgagactctggtatacataatatcgtcattgtcctctcactggacttcaagtaggcccacagccagttccaagatgtagccacacccctgggactattccatgcgctgyaatctttaggagggtcccctaggaacctgttgcctaaataatggtgacacatcaggatcagctggagcttgacccgtgaattgactgcatgagcccaattacacaccctcttccccagagaactgtgaagagaatgccctcctgcgaacaggagagatccagaattctgcattccaggttccctgctttctgcctggagctatcttactaaaacatatggcaatccacatcataatcatgattaccatttcattgaaaccttgtataatcctgacactttgcttggtattttatatccactcaattcaataagttcgtttgaacactgactatgtgggaggcactatgcttgatgctggggatacaacagtagggagaacaaagacacaaatccctgccctcrtgtaacttaatttctagtggggatgacaaacaataaaataattaaattatatagtatgttaaaagaagataagtgccatgggacagaccaagcagagagtgcagagagggattcgatctttgaaaaggcagtcagagacggatgcagcaatcttgcaaggcaggaggaatgaagctcacggaggtgagggtgcccaaggtcacagctagctatggcagaagatgggatttgaacacaagcctgtcccaagccctggctgtttccattccagccttaatcttgtaaagkcttttatactgacattctcaaacatcgcaggattaaccaggcccaaccctgctaattttcagagatcagataacgttagctagggtgaatctaagaacaaasagtacacagacggcatggytctgattaaaaggcacacaatttagaaacaatactgggaccctggakgtctaggacctccagaccctttcctggactgtgacacttctttgaggtggcctgtctgtcccggagctggtttgagggaggcgtgttctcccagggcttctcacaggaggttgaccttcctccccaggccgcctgatctttgacaacctgaagaaatccatcatgtacaccctgaccagcaacatccccgagatcacgcccttcctgatgttcatcatcctcggtatacccctgcctctgggaaccataaccatcctctgcattgatctcggcactgacatggtaagggccaagctggtgagcaagagattcccagaattctgcctyctaagctccctgctttctgcctggagctatcttactaaaactcatgacaacccacttatgatccagctctcgcacctcctgcaagatggatygaggctgcgtcaagacagaatggtagagcttgaattactgctgggtttccttctgaactttgtgacccctgtcatccccaccctccatcctccaggtccctgccatctccttggcttatgagtcagctgaaagcgacatcatgaagaggcttccaaggaacccaaagacggataatctggtgaaccaccgtctcattggcatggcctatggacagattggtgcgcccagaggaatgaggggtggagggagcagggagtggtttcccctgcctggcaacgtgagccatctcagtttggaagtcagggagatattttctcagcaacaaactgtgctaggccctgaaaacacaaagaaccactcatctctgatctgtccttgacttagagtccagtacaaaaggaacaaacatacataaaatgatagcatctccaagtgccaagtaatgagtatagacagaacatactacaggattacaaagcaagcaggctcaccattatgaggatagccagagaggccttatgcaggaaataggacttaaacttggtgtgggagagtggggcttagactagtaagtgtatggtcaggtgtgggagaccaaaggagtggggaatttcagatggcacagttaaagaagactgaataaaccaggttggtagagcccttagtctttataaagtagtgaaaaataagactgtagacagagatatcatttgtgttggggtcagccttgacagacatttgagagtcattagaagtctttgttcttgattttccaggtgcaatggtatttcagaaaatagggtgagtgatgaacagagtaagatcctgtctcaaaagaaaaaattgggagagggaatcagtggcctctaaagtcctttttagttttaagaycatgtgattcaaagctgactctgggtcagagtttagaaacaaatgtcagggcttgaaggaaagtcccacagagatgagagatracaggcttaggcagctgatggcaagattcttccgcattactcttcagacacacaccagcccagccagaagcaagtcccagcccccagccctcccctggcctaccttttggggcccttctctgaaccaggctcccctgtcctgcaactctgtcattcacagggatgatccaggctctggctggattctttacctactttgtaatcctggctgagaatggttttaggcctgttgatctgctgggcatccgcctccactgggaagataaatacttgaatgacctggaggacagctacggacagcagtgggtgagtagaagggataaggtaggagctgagaccagtaagagtgrgagkgacagggragagtgagtgcagcaaattttttaagagagaagaagggaagcaccacacaaacagagctgatgccttttcttcagtcctgtatgagccttctcacacttgccctcagtcttcagccacaacagcaaatcctcttctgtttagcataggctcattctggttggctcctcctgtctgttgtctggccctgcctgtctgagtcctttggctccttggagtctttgtcatatcaacttttctgagccggtttctcttttcccaggtttcaaccatgattgccccagaaataaatgctgggtcctctcctcttatactctccctccatgagagttcaaatgatatgatttaaaatttgaggcagggtgcagtggctcacgcctgtaatcccagcactttgggaggccgaagtgggcggatcacttgaggttgggagttgagaccatcctggccaacatgragataccccgtctctactaaaaatacaaaattagccgggcgtggtggcgcatgcctgtaatcccaaccactcgggaggctgagtcaggagaatcacttgaacccggggggcaaagtttgcagtgagccaagatcacgccattgcactgcagcctgggcaacaagagtaaaactctgtctcaaaaaataaataaataaataaatataaaatttgaaaaccagctgggcacagtgactcacgcctgtaatcccagcactttgggaggctgaggcaggcagattacaaggtcaagagatcaagaccatcctggccaacatggtgaaaccccatctctactaaaaatacaaaaataagctgggtatggtcgtgggtgcctgtaatcccagctactcaggaggctgaggcaggagaatcacttgatcccaggaggcggagattgcagtgagccaagattgcaccactgtactccagcctggcaacagagcgagactccgtctcaaagaaaaaaaaaaacaaaaccctgaaaacctattttctttgtatatcccttcctaatcattctaaacctttttaacctagaggatacctctctatagttgtcttttctaacaaccaagatgaatgaggctcaaactgaagccctctccccaacaatatgtgtttaagaattttagtaggtatgcttttttggtatctgtgatactcctgtcccaatttctaagacaatgggtcatgtgacatgtgacagcaattattgctagaattgtagcgtcatagaggacacagtaaattttcatcattctgtagatgaggaacctgatctaggaagattctgtaacttgcttaaagtcccacagtgaatccctaaaagagctggacttgaattctggactctagatccctgcccagcactttcccacttcaccacgatgtctccaaaccaagccaattgcaggtttctcaaattgtgttcaaatctgaattgttgggaaggtgcccctcacatacagttggcttccattagctgaggctgtaaggccatcagatgtcaatattcccagctattaacactgctgcaggatccagtgacacccaaagttctcattgctgtgtaccctgccaacatctcaactcccagctcaagcccttgttttccatcttgatacttcctccctgctgccaagatgcagcataacataaatttactgacaataaattaaaggtaattaaaagtaatttgaggtaaaaagttaagaattcccccctgcacattgaagacatcttgaagtgtcacaaaaatgtgttgagaacagttgccctgagcaacaaactctacaaaggcgtgtccgtgtctcttctatgactgtaattttcagataatctggtatagagccacccacccgggaagtgcatgatgcactgctagaagcaaggatcgctccttactttctaaatatctttcattaattccagtgattccctcactcatttgttcattcagacaatatttactgagcatcttctatgtaccaggtactgttctagggcctggggatatgatagtgaacaaaaatcatcaagttattgctctcatggagcttatttctagttagggatgggaagacagataataaccaaatatataatatatttaatcaagatattgtaagtccaagggggtccaagaagtgttggaactagaatactagagtgagatggaattataaaaatgctagtcagagagagaaagatgcttgaaattacagagaaataataggtattggaaaggataatatctagagtttaaggatgggagcaagcagcccaggtggggagtacaggacaacatcattggaggagatcaaggaactgtgagaccacggcattggaaggatcatcaacatggacaattcaatctccaaaaacaaggacagaagtaatcgtggagtaacagtgtcagaagctaaaatcttcaagaaatgatagggagtgacgcgggtaacggcaactgactgattggtcttattctaagttccatgctcggctcatcaatttccagcctttgtgttctaccgtttaaggctctacattcctctccaagtaccactttgccacatcccgtggggtttgatatgtagtatttcattattgtgcggtcctacctrttttcaaatttattggatctacgagttgttgataaacatgctgctttagtttttaaaacagaagctttttctctccagtctaatttagatgcaccccttctgtgttcccatagccctctgcagtctctctctcataacctgtctattgcgctgacatggttagcataattattttccccactagactctaagttccttaagtgtaaagtgtgaatgaaagaacaaatgaatgaatgaatgtctcctatctgataccactctttggggtatttctttcccccctgtactcacattgtcctctggccccaccatcctttctttctgacctatatcccctgactctgccttcttccctttttttttttttttttttttttttttttttttttgagacggagtctcgctctgtcgcccaggctggagtgcagtggtgcgatctcggctcactacaagctccgcctcccgggttcacaccattctctcgcctcagcctcccgagcagctgggactacaggcacccgccaccacgcccggctaattttttgtatttttagtagagacggggtttcattgtgttagccaggatggtcttgatctcctgacctcgtgatctgcccacctcggcctcccaaagtgctgggattacaggcatgagccaccacacgcccagcctgccttcctttctaactccaccttcttctcttaccctatccttcttattaattcaatccatatttattgagccatgctacatgccatccaccgaactaagcacagggagaggacataaagctaaataaggcaagtgcttgttcttgagaagctctcagtcaggcaaggaaaacataaacaaatcatgatacaacatgaaaagcgctaaaacagagacatctgtgaagtgctgtggggtctaaagagtgaggacctggccgggcacagtgagtcacgcctgtattcccagcactttgggaagcagaggcggtcagatcgcctgaggtcaggagttcgagaccagtctggccaatatggtgaaaccccgtctctactaaaaatacacaaaaattagctgggtgtggtggcaggcgcctgtagtcccagctactcgggaggctgaggcaggagaattgcttgaaccccagaggcggaggttgcagtaagcagagaccacaccattgcactccagcctaggcaacaagagcgagacttagtctcaaaaaaaaaaaaaaaaagaatgaggacctgactcagcccaggggtcctggaaggtgggagaggaaagaagccttasggtgtacagaatccccttctgacactgtytcctctctccctgctgtctctagacctatgagcaacgaaaagttgtggagttcacatgccaaacrgccttttttgtcaccatcgtggttgtgcagtgggcggatctcatcatctccaagactcgccgcaactcacttttccagcagggcatgaggtgaacatctcacaaaacagyccagcactctcccaagccccacacaccaggacatgccatttccccctgccttttcttctccctccccgccacacccatgaatgtttcttcccagaaacaaagtcttaatatttgggatcctggaggagacactcttggctgcatttctgtcctacactccaggcatggacgtggccctgygaatgtacccactcaagtgagtaagggaagggatgcaagcaggrgatgtgcaggcacgggggagcatacagaggaagggtgtgtttcactaggattgtcatgagccaggagctgcctggatacatggagctacatgtacactcagtgatacaaggagagtcatctgtgctctgataagtggatcttatttagggagatattagagactgtgccaaatgatcacaacccactagacacacaaatttagcagayttaccagtgtttaacagagtgaaatctttttcgtgatgatgtgtgctgtagttgtccaaggatacatattgcttggagctgaagtaaccataaaaatagcctaatctatgcttagctaattctgttgtacttatgcaaatatgttttaatgtatatgtatgtgatcgtgcctactgaaattcttattgtctggtgccttgtcttgttcaactccaggtttttgctttgttttgctttgcattaacattagtatatgcttgatgtggaaaaatttatatttaaaaatgtacagagaaaaaagcaaatgttccattccactcccatycccattacccaacccaacttgcataggtagcctcagttaaggatttagtatgtattcttccaacacatttctttattttattttattttttattttgagatggagttttgctcttactgcccaggctggagtgaaatggcgcattctcggcttactgcaacctctgcctcccaggttcaagtgattctcctgcttcagccttccaagcagctgggattacaggcacccgccaccatgccgggctaattttttgtatttttagtagagacgtggtttcaccatgttggccaggatggtctcgaactcctgacctcaggtgatccacctgcctgtgcctcccaaagtgctgggattacaggcrtgagccaccacatccggccttcttccaacacatttctatgcatgtctctactctgctcacctttccatcccttgtaatgttttacacgatgttttatacaatgtaggcactcaattaatgtttaataggagacrttggcactggccttagacactcacaatccaaggtggaaatctcaactctactrtgtattattctgtggccttggacaagtatggaaccattctgagcctcagctacacctgcaaagtctcaataatacactccagggatagaccttgcagagtgttgtgagatttacacgtagaaatgggcataaagcaccaagcatgcttaggtcatggtagatgccttgttactagtagctttattcttgctgttattaatgccattatagacataataacaaatgtggttggtattatctgtgctttcaaacactctgtgtacacattaaccataaaacttagcacctaatcttgcgattctgtattctgtgtgtgtgtgtgttcaccctcttttctctgattcccctgagctccttgagagctacttgagaccaacatgttatcatttttatttccccaatacctaacacagacacagagtacataaaacaattgtttgttgaatgaaggggtggggtggctgtttgtgtagaaatgtttatatttgtgtgtgtgtggaatgagccatggcctaggcttgtactgtccaatacagtggccactatccatatacaactattgtgcttttgacatatgagactagggagactggggaagtaaatttgtaattttatttaattttaatcaaagtcaaaaactaaagtaatgtttttctatattataacttcattattttggttggactacgttccccttcaactgttgaaaataattttgtatctgagttcaaacattctgtcagtgaaaaatattcactgaatttccaagacttaggttgagaagaagaatgtaaaatatcttawtgataatgctttttttttttttttttgagatggagtgtcactctgttgcccaggctggagtgcagtagcgcaatctcggctcactgcaaactccgccccgctggttcaagcaattctcctgcctcagtctcctgagtagctgggattacaggcacgcgtcaccacacccagctaatttttgtatttttagtagagacggggtttcttcatgttggtcaggctggtctcgaactcctgaccttgtgatccgcctgcctctgcctcccaaagtgctgggattacaggcgtgagccaccgcacctggccttgataatgctaatattgaggcgggggtgtagtggctccaatcacagcactttgggaggccaaggtggggggatcgcttaaggccaggagttcaagaccagcctgtacaacaaagtgagacatcgtctcaataaaaaaatttaaaacttagccaggtgtagcggtgcacactgacggtcccagctactcaggaggctgaggcagtaggattgcttgagcccaggagttcaagactgcagtgagttatgattgtaccactgcactccagcctggacgacagagcragtccctgtctctaaaaaaaacattaaatgtaattaaaataaataatgtttatattgattacatatttaactgatatattgatatcagtttttgatatattgggttaaataaaaatattattaaaattaatttcatctgtttcattttacttatgttaatgtggctactagaaagtattaaattttacatgtggctcacattatatttctattggacagtgctggtctaggccatttcttctgtcatccaagggaacaactgctgtcctgattcaacccctccccagaatccatcttcctggtctaattataaaaagaggttgagaaacaaaacaatatccccatctttgtaatacagaagcatcaatatattcgccgacaaagtatccccacactaaatgtctcagatagacccctcctgctcagacaacccctcccctttgtgggcacaagccctagagtatgcagagagcacaggggtctccctcagcggctccacaaaagttggtagagaatcttgtgaacattgcatatacttctaatatgacatttatcatattatatcatcattggctttttttttttttttcccgacgaagtcttggtctcgctctgtcgcccaggctggagtgcagtggtgcgatctcagctcactgcaacctccgcctcccgggttcaagtaattctcctgcctcagcctcctgagtagctgggattacaggcgcatgccaccatgccccgctaatttttgtatttttagtagagacggcgtttcaccatgttggtcaggctggtctcaaactcctgacctcgtgatccatctgcctcggcctcccaaagtgctgggattacaagtgtgagccatcatgcctggctatcactggctctttatgtttctgtctcgtgcctctcctctccactcccgatcactaatcccacaggatttgacctcctcaaaggtagggctcaggccgggcacgatggctcatgcctataatcctagcactttgggaggctgaggcgggtggactgcctgagctcaagagttcaagaccggtctgggcaacatggcgaaaccccatctctcctaaaaatacaaaatttggccaggcatggtggctcacacttataatcccagcactctgggaggtggaggcaggcggatcacaaggtctggagttcgagaccatcctgaccaacacagtgaaaccccgcctctactaaaaatacaaaaattagccgggcatggtggaaggcgcctgtagtcccagctactcaggaggctgaggcaggagaatcacttgaacctgggaggcagagtttgcagtgagccgagatcaagccactgcactccagcctgggtgacagagtgagactccgtctcaaaaaaaaaaaaaaaaattgcaaaaaattagctgggcgtggtggtgcrcacctgtaatctcagctactcaggaggctaaggcatgagaatcgcttaaatccgggaggcagaggttgcagtgagccgagattgcactccagcctgggcaacagaacaagactctgtcgcaaaaaaaaaaaaaaaaaaaaaagggatcaaccagatcttattcaactgcactgtctccagcacccagcacagtcccacgcacacagtagacacaagcaatgaaacgtgcaattcctgtgcattgccctctgcacctgtcctctggcatctstctctcctgccatgctgactggctcttgctctctacaggataacctggtggctctgtgccattccctacagtattctcatcttcgtctatgatgaaatcagaaaactcctcatccgtcagcacccggatggtgaggctcccctgggccccgctctgactgagtggtcaccagccccctcactagctctcccatcccacctagtccctccagacccaccactgactttctcccctcctcgctgccagccttgactgcgcctggagccgagacctctctaccccttggctgcacccctctgctccatctgaccctcagtgccctgtgttccagacctcccacctccaaccttgtccctgctttcccttctgcctgtctcccctggatgcctctaattccttctcccagttcacgctggcctcttctcttccacaggctgggtggaaagggagacgtactactaaactcagcagatgaagagcttcatgtgacacaggggtgttgtgagagctgggatggggccagagattataagtttgacacaacatctgagacactaggatgaattatcttggatgagaaagatgggcaatcctgggctggcttgagggaatcatgggcagaggatgaggtgggctgaagggaagcccagcctgcatctagctggagccccgcagggaggggcatggtcctgctgaatcccgtagccagtctagacagtaaatgtctggaaaagccctcaccagctggatgtgtcaaatctgatcttgggggagtggggattactgtgaagctccctccacaggtcttcatgatgaccaggctggggaagtgttttaaggaccagagtcaaggctgggataggatcagtatcaagcatccttgccctttaaagtcactctccgagccactggacagcaaggacagggcaaatgactgcctcaaaattccagctgagatcagagaaatggaaggtgggggagagaggagcagctaagtcacacgtgggaagagggtccacagcatccgcacagggggtaggtggggtggagtcatctgaccccaccttgcagttcctgagaccagcttgcagaccacagcgctgtggtgctagaagagatcagattgcatcagtgaaaagcctgaagtccagagaggttaaatgacttgggaatggccatgtgctgagtgttgtccctcatctgagaaagggacaggtaggaaggacagtctccaggcatactggtggtccctgccctctaccctcggtcatcagggctcctcaaccccattctggccctcggcctgttttctctggtgtagccttgagatagaggctgtaacaagactttctgaatccctgtggcctttactgtgaagcagccgcccctgctctgcacggggtgatggactttcccaagagcctggcctctgtgcctgggcccaggtgcattctcagatgagtgaaaactcgtggagggcctttctctcctgcccaccttcgtctcagcatttcttccttccccttcacccgctcattcacttttgctctgtgagcccctccactgtgccatgtgggtcagttcattctcaggcctctttcagagtagagcattggctgttcccaaatgtgtacagggtggaagagaaatgctaacgaaagctaggggaacaccatcagctatttccacaacaaaacacatatgtactaggtgtctgcacactacacctaacactgggacgagggttttatatacacaccatcaagaaagtcacataaatgtttccctaccacccactccatgttacccaagaagaaaccaaggtctgtccattttcagaacgtgggcccttaatcactttcagactagtctttcagtgagggctgggccaaaaatacacaaaaacaaaacaaagcaaacaaaaaaaataggctagtgatggggaaggacccggggtgggtctggaggatgagaggccatgagctagcaaagagaaggccatcgtgagtatcgcccgccattttccctacatcaggcccctcctcagaggtctctctccctcttctcctccctcttccatcacaaggtctcctaggaacagtgctatatcagcctggggtccttccccaattgctgacatcgctgaaccagaccctggaagatcagtgggccagggtatatgtgagtgaggtgggaagcaggagcacagaggggccagctcctcaggtttcagtagcaggagcttcaggtgtctggtgggttaaaaatacagaggccccaactcacggtcatttgataccagtggctgaggcttctcaagtccaagggcctgaagggaaggagactgagtagaaagtagacagagtgaagcatcaagagagagcagtgggggcgggcgctggaaaggggaagggtgggactggagccagagagggcaacgagagggaacgggatggatggcaatgtccggtagctgtaggaaaggaccaggagatggaacagactcgccaccagagtcccatctcatactcttgggggtacaaaaggtcagattcaagatggaacaagttttatgctccagcgtctctgtcccagtgtctcccgcctcccctggaatgcagaagtgagaaatcagggctggacatcacctagatcatctgcttctgggcaggcctccccatctcacctggctgcctttgctctggccttggggctttcccacgttagccactcttcagggagaccaggatatgggcttctgaggtctcttcagctccaaygtgctgtgcttaggctagctccaacctctcctgctacagtgacagctgtccctcttggcctcactcctgccatgcttttgagattttctgtggccttccgtgttcagctgtgtaaggtccaccacacagacatgtggaaaagttattctgctaacataattacatgaccctccctggatgcaaaacaaaacaaaaaaaacaccactgtccctctagaatcagagatacctcagggtgcagtggcagcatgtgactttgatctgaccctctatggtctccctcatgcctcagtttacctgtgcatagtaagaaccctggagggccatgaagaggatccttccttcctacgtatccagagttaaactcactactctgtcctcacccccaagctggatccagaagtttaagcccctacccgcccatctctgctttggatctcgggtgcacagaattaatcatcagtcttggttcagggcacagggttcacctcttcatgcttgcctaatgttaatttttttttgccctggtgtcaatacctgatcctctttgtcttgtcaaagacatgggaataaatagtagctattcactctccttggaagcatgcagcctgggaaaacctccyttcccactgtgccccagaaaaccgagtcccataggatcagggtagggagtgcacacacaggtggcaaccaaaggacagaccccttctcattgtgggctttataggcagagaaaccccaaacccacatctctacakgacaggatctgggccagccctgtccttccctgcattcccaagttaggagtgctgagtgaagcaaaggaaactggctggagctgagccaggttgccagtcttggacgcrgctccatcttttattcagagaatgacctcatccttggtcctggttctttaaaagaaagtggagggggtctctttcctgcagcctggcttgcacttttatcgccccactctcctacatagtatcaaagaatcagaatcagacttcacctacagaagattcccaggctttaggacatagagccaataccacatttgtcccccttttgtcctatattatcaatttagcctctgacccagttagctcctcctctccactgcatttaacttctaattacccttgccccaccctcggcccwccctaattacccttatacctcccctcccccagccccagcttcatttacctccgactcatctggtcttatttttagctccggcatctctccttttcctttcttaatatggcgatgagctcttaggccagtgtggggaccggggctgaggtgccctggacactggaggagggggagggaaggagcccctgggagcctggggtagaagtgtaggaggtgggaggattccggcccgcatggagctgtcctggcctcagaaggttatccgtctctcctgccaaccatggagacatatttagacaggaccaggtggggactgaggggtgccaatttcagggggcagctccggttccctccccgccccctgctcctattcctccacctgaccctttttcccttggctctgtcggcagtttctccaggacccagcagtgccctctgtccactgctctgggccattccccaatcccccctcccacttgagcccctaactcagaatctgggacccaggggcccctccctaccccagctaacctcttctggaccaggagagccmacccagatcccactacctccatgagtgctacagacaggatggggcccagagctgtgccgggtctgcggctggcactgctgttgctgctggtgctagggacacccaagtcaggggtacaggggcaggaagggctggacttccctgagtacgatggtgtggaccgtgtgatcaatgtcaatgcaaagaactacaagaatgtgttcaagaagtatgaggtgctggcactcctctaccatgaaccccccgaggatgacaaggcctcacaaagacaatttgagatggaggagctgatcctggaggtgagttgggggcactgcaggcctgcagagcatgtctagcccctctccggaatcccctatcctacacccatgtagctctttgaggatgggatctgggggtgaggggcagtgtggtaggaaccctgtcctgaccaacaggatgcaagtggcatgtggctttagtcaaatgagaaacagagtctcaggaacccaaaagtactatcagcgtcaggaaacctttagcaggggtgctgcaggaagagctcccctccctgctataggaggctggtagtatttgacttaggtttggctaggacactgagggtgaaaaagggaggtacttggagggccaggggagaacagcagtgtatattgcactcccctaccccacccatctgcttagccagaacacgtcctctccacatacttcaggggctgcaccccaaagagatccaaactgagtgtaaatgtaaatgttatgatacttgcatgccatgtttaaatatctcctagagatcatgcctcccattggactcccagtcccctctctcttccttccccctccctaattccccatttgtctccattggataagctggatgccctcactggaaaattcttatggttgcaggaggtgtcagaatgtcttccccaatcttctttttgtgggaaaagtctcctcacctccaaaatgacttcaggcccaaaggagaaagaagttatcataagaaaagaaaaaaaacctatgtttgggaatgtgttcatacacacacacctttaggaaatgggatgtgagttttcttgtccaagctcctgtggccccttctctggcctcagcttgtccagagcttggagcatttcagggtgagacaccagaaccacaggctctcattttgtgcacccctgctgggtgctagaacctgccatctgattaatgagccgagtatttttatcctgagtgctcagtatccctggccatccacctgccaaccgcctcccttccccacccctctgagaatcacagtacctgagtctgtgctgagtgggggtagagctgcaagctgtgcccacagcagagaaaatcagggttgaacgctaagctggaaggcttatgggggcagggacctccaggtgtgactgtccacagcctaaggacaggctgaagtagagtgcgaaaggggaaagttgggccctgatggggagaactgtccggtcgctgtcagtctctctccctctggggggtaacaaatggtgacctcttatctcagctctctggccttccccaactcctcaacaacatgaccagacccaccactaccctcccaccctccaaaattcttcccattgggagtcactctgaagaatctcagggacttccaagatcaaccccacactgagcttggcccttgaccagggacagggacctccaggtgtgacttgagcaggatggaatgcaggactcaaccctgaaggagggaaggggccctcagtcactctgaagccagactcctcagtacctcttaggcactgggaagtattgagtgcagtgtcttcaagtccaacataataagcacattgcaaatgagcaatcaatattcatgaactaagttgagccaaaaacagaactgtgtggctgtagggaatttgggggatattctggatcttagcaaagggtcaaggtcaactcttatatctcccgcacctcaactgacccaacttgaaagcatgagagggagaataggggataataaaaattccaggggctaattttaatcataatccttccctccag

SEQ ID NO: 93338 - DNA, 35844 bp, Homo sapiens
  misc_feature (1)...(35844): n = A,T,C or G
taaaagtgtttgagattgtctgaacttaatagaactaagttgtgggaaggggcatccaagactccatagatattagtcatatattatgacactgtgtggtgaaaatttgtgaagcttaaataagcacactgtcctgaactgtttgcatggtgcctcagaacttcacacaccaaaagccacaaatgggcaaatcaaacattatttctctttcttccacaatgtctctttctgttcatttatgtgtgtgcatgtgtggtgtgtgtgaaggcagatgtcttgctatctttaccttaactctattcctcccttagtttttgccataactgaccactcctaaagttactttccagataccattgctgttggtggatttgagaatttccctttcctagtatctttaggcattaattaaccaattaactaggccatccattaatttattttaaatgtttattaagcactgctacatgcacagctttgagcacttaggggttgcaaggataaaaaaattagggtgtcttcctttaataatcttactgtctacttaaaaagggaggcacacaaatgagttaaatttaagttttataattgggctaagatgataagtctcattttatccaggacagttccaatatatgcacattattattaatagtagtgtctcttttatttaatagtgttcttctttatttatttatttttttagcatgtagctttttttcttattatactttaagttctagggtacatgcgcacaacgtgcaggtttgttacatatgtatacatgcgccatgttggtgtgctgcacccattaactcgtcatttacattaggtatatctcctaatgctatccctcccccctccccccactccatgacaggccccggtatgtgatgttccccttcctgtgtccaagtgttcttattgttcaattcccacctatgagtgagaacatgcggtgttcggttttctgtccttgcaatagtttgctgagaatgatggtttccagcttcatccatgtccctacaaaggacacgaaatcatccttttttatggctgcatagtattccatggtgtatatgtgccatattttcttaatccagtctatcattgatggacatttgggttggttccaagtctttgctattctgaatggtgtgcaataaacatacatgtgcatgtgtctttatagcagcatgatttataatcctttgggtatatacccagtaatgggatggctgggtcaaacggtatttctagttcttgatccctgaggaattgccatactgtattccacaatggttgaactagtttacagtcccaccaacagtgtaaaagtgttcctatttctccacatcctctccagcacctgttgtttcctgagtttttaatgatcaccattctagctggtgtgagatggtatctcactgtggttttgatttgcatttctctgatggccagtgatgatgagcattttttcatgtgtctgttggctgcataaatgtcttcttttgagaagtgtctgttcatatcctttgcccactttttgatggggttgtttgtttttttctggtaaatttgcttgagttcattgtagattctggctattagccctttgtcagatgagtagatcacaaaaattttctcccattctgtaggttgcctgttcactctgatggtagcttcttttgctgtgcagtagctcttcagtttaattagatcccattcgtcaattttggcttttgttgccattgctttcggtgttttagacatgaagtccttgcccatgcctatgtcctgaatgatattgcctaggttttcttctagggtttttatggttttaggtctaacgtttaagtctttaatacatcttgaattaatatttatacaaggtataaggaagggatccagtttcagctttctacatatggccagccagttttcccagcaccatttattaaatagggaatcctttccccatttcttgtttttgtcaggtttgtcaaagatcagatggttgtagatgtgtggtattatttctgagggctctgttctgttccattggtccatatctctgttttggtaccagtaccatgctgttttggttactatagccttgtagtatagtttgaagtcaggtagcatgatgcctccagctttgttcttttggcttaggattgtcttggcaatgcaggcccttttctggttccataatgctccaattaaaagtcgcaaactggcaaattggataaagagtcaagactcttcagtgtgctgtattcaggagacccatctcacgtgcagagacacacatatgctcaaaataaatggatggaggaagatctaccaagcaaatggaaaacagaaaaaggcagatgttgcaatcctagtctctgataaaacagactttaaaccaacaaagatcaaaagagacaaagaaggccattrcataatggtaaagggatcaattcaacaagaacagctaactatcctaaatatatatgcacctaatacaagaggacccagattcataaagcaagtccttagagacctacaaagagacttagacttccacacaataataatgggagacttgaacaccctaccgtcaatattagacagatcaacgagacagaaagttaacaaggatatccaggaattgaactcagctctgcaccaagcagacctaatagacatctacagaactctccaccccaaatcaatagaatatacattcttctcagcaccacatcacacttattccaaaattgaccacattgttggaagtaaagcactcctcagcaaatgtaaaagaacaaaaattctttcttttttttaggcaatcaaactagaactcaggattaaggaactcactgaaaacggctcaactacatggaaactgaacaacctgctcctgaatgactactgggtacataaagaaatgaaggcaggaataaagatgttctttgaaaccaatgagaacaaagacacaacataccagaatctctgggacacatttaaagcagtgtgtagagggaaatttatagcactaaatgcccacaagagaaagcagaaaagatctaaaattgaatccctaacatcacaattaaaagaactagagaagcaagagcaaacatattcaaaagctagaagaaggcaagaaataactaagatcagagcagaactgaaggagatagaaacagaaaaagcccttcaaaaaaatcaacgaatccaggagctgttttttttaaaagatcaacaaaattgatagactgctagcaagactaataaagaagaaaagagaggagaatcaaatagatgcaatagtgttcttcttttaagtgatagactatattaagttataactaaagaattcagagaagcctgaaatataggtgaataaaaataaatgtttaaataattcaattttgattgactttggagttaatactcatgcactaaagaggtccaatatatacctttaatgatacatatgatagatatacttatgacatttacttatgtcagtataatgatatatatacttatatcattaaaagtatatattggacctctgatatgagtgtattctattactaaaaattacttcccataagtaccaatcctgtacttactatttactatgtcctgacacatcacagagaaaatctctagtagtccttgtatctctgaaaaattttcaggtgatcagctgtaatgtggcagggtctctctcagcctgtcaggttgcagcaggcaaagtccaacatttgtattttatgttctctgccaccctaggctaaattattcatgtgaattagtcctaaagatttaccactgaaacacatgaacaaagtcactatatgtattagtcagggttctctaaaggaatagaaccaacaggagatagatagatagatagatagatagatagacacatccacacacacacaaacacgggtatatctatatacctatatatagatatcgatcatacattatatttatatatccatatctatatatacatctatatatctatatacatctatatatctatatctatatatctattatctattgtattatatataacatatggatagatacatatatttatatatagttataatatataaatttctatatataattatatatacatatataatatataaagatatataaatttatatgttatatacacacatatttatatatatttataatatataaatttatatataatttattatatatacatatataatatataactatacaatatataaatttatatattgtatagttataatatataaatgtgtgtctctatccatatattagcatgtatatatgcatatgtgtgtgtgtgtgtgtgtgtgtatatatatataaaaaagtgtaaattggcccatgcaattatctaggcaaagaagtcccacagtatgctgtatataaggtggagaaccagaaccaggaaagttaatgttctataaaaccagtctgagtctgaagacctgagaactgggagcagggaggtggtgtctggtgtgagtttcagagtctaagggcataggaactaggagctctgatatccaagggcaggagaagatggatgtctgttgtggtttgttaagtgaagaagaatttaagttaggtttggtgtagtcaggtacagcacaattagactacaattacttgcagattccagaaagaggagtgtaaaatgccttgcagagccaatggaaagggtgaggcagtcaaggacactgtctctcacccagcagatgaaaagcaagtgagagatggagggacctatgggtagaaccctttattggggttcaggattacctagatgggttttccacaacagagttggattggttaatttgaaggaagcatgagtttaagtgtgagaacttgggttacatgattgtgttcaccagacttaaagcaaaaataaggcagcaaatgggaccacatctatgtygaaacagaaactgggtggagactgtctcaaaatatgtaggacatttgtgacaagctggggacggaccaagaaggtggtgctgaggcagcactaatatgaattagcgttacaacaatgtcccagcccaagaagagagtgaatttacctttccttcacatttttgttctgttcagtccatcaatggattggattctgcccacccacactggggaaggtgattttcttcattcactctaccagttcaaatgctgattttttccagaaacactctcaaagacatacctagaaatacttttttacaagctatttactgttcacaagcatcccttagctcagtcaaattgacacataaagttcatcatcatactatgtaatcctctaagaaaacagataattgcactgagcttccaggcttagtctatggaaaaattctagtttgatgcttaatagaactcggacaagttgcctcattccttgttttttaatccaaaacttgtttcaccacaagaaagttttgttaacatgtttaataatccatgataatggcattagcctggattttgacttaatatcagcaagctaaaaaaaaaaaacctgttcttaaaatatgttgcaaccaccacccaatcacaaaaatttacttcatgacttattcagtgctgtcatttaggttcatttaggtttcatttaggtttaagtctcaataataaagttgttttgggctgatgatggtatcacagggtgaagaaacactgtaagagtattacattgcatgataataatgcatgcacgccctcatgaattatgagatctgttccagtctgtgtgcttgcaaaacaagttactactgacactgtaacatttgaattgaaaattagcttcatgttgttaagatgatcatatcacctgagagagttcccaagtctacaattgctctactagttactattcagtgtttgtgaaaaattttaatctcagtactgtgaagaagctggaaaaagggatattatggggctaaaagctctctgtttggggctgctttgtgttctttttgtctctcatttttacacacccatgccagacaacattgaagaaagctggaaaataatggccttggatgccatcgctaaaacttgtacatttacggtaaggttaacatttattttttctgttggaaattgggatgacttattgactaaaaatgggtgcttatgaactcttttattaatagtattaatatcaccattttgaaagaaccattgcttgtttgagtaaattaattaaacaacattaagtaaataaaactccctatatctgtgagtaacagtgagacagaattctcaattctaagactttatgtctaaacgtgacatgtataaaataaatttattgtgacatgtataaaataaatggtattgctaaaggaaaaggctttgaggtttatttgagaacttgacttaaatttgaactttcagggacaacctagtcctgtaattatcttttagttgtttagatacacattattgatatttgtaactctttgatattaatttaaggctcttattatttaatggctttcattgtccatcttcaattctaaattgctggttttcaggcattatctkacttggcatgtgcagaatgaattataaattcatgcaaaaatagctcctttaaaagggagagatagggttagaaactaatatttttgagttcttaagttgtataggctttgtataatatgtacttccattgattccccgctatcctgcaattatttttatcaggttatggggttggggaagagattgagaagaacatatgcaggtaaaaagtaacaactccataatttgaactataaactgtctcattttgaaacccatactctttctgccaagccagacagcttccagaaagggtaacaataagaggctcaaaggagaaggccacagaagatgatcagaaaaaaagagagcaacccatggtataaaaagaagaggctgtcttatgatgctttgtacagcaaacagtatatttgctttgtgaaaccacagtcaactccttctgatgtctgctaatagtttcccctgtaatcacttctagaggcttaccttctccataaattttctccaatgctcttacttcttgagtaagcataagtgggtaagcaagtgtcacttccacagagaaaatactatgctccctttcttgattatctaatttgtatctcagggcattaacttgtttaaaccctactacaacccactgaagtattattattactgtcatatagacaaggaaattgagctacagagagtaattttctcaatgtctatcagctagtaagtagtagcataagatgctggtttaaatggatgcagacttggctttgacatttactggctacaacttagagtttctgcatacttcctcgtctttaaattataagggttagcatggtggctcacgattgtaatttcagtactttgggaggccaaggcaggtagatcacctgaggctaggagttcaggacctgcctggccaacatggggaaaccccatctctactaaaaatacaaaaattagccagctgttgtggtgcacgcctgtaatcccagctactggggaggctgaggcaggagaatcacttgaatccaggaggcggaggttgcagtgagctgagatcgtgccattgcactctagcctggatgacagagcaagactccttctcaaaaaataaaaaaattaaattaaaattaagaaaataaagtatagtggctagatgttctcaattgccctgcaaataccttaatttccttggaataattataataataaagattgtttaatgtgttattaaccatgtaatatttaagtttttttatgagtaaactgtccagtgacataacacaaaagtcctcgagaagctggtcaggaataccaaaggcagcttttttcagtgacatcaaatatggaatttaaaggtgaggaaagtgccctaatctttttggagttgaaagccaaaaaatttggattattactagtgtgttcatatgaagatatttaaaactttggattaaataaaatgaacaatgaaaaaagaaaacatgacagcatgcctacaaaatttatttttctgaaaaaaatttacaaatcaaaaataattacagcggcataaaaaaactgctagtaaattagtgggttttgaataggacagctctcagtctaaaatactaaatatttgagattttccttttttatatacaaggatttatctttttttttttttttgtcttttacttcaagttctgggatacatrtgcagaacgtgcaggtttgttgcataggtatacatgtgccatggtggtttgctgcacctatcaactcgtcatctaggttttaagccctgcatgcattaagtatttgtcctaaggctctcactcccctttccccctgcctcccgacaggccctggtgcatgatgttcccctccctgtgtccatgtgttctcattgttagactcccatttatgagtgagaacatgtggtgtttggttttctgttcctgtgttagtttgctgagaatgatggcttccagctccatctatgtacctgcaaaggacatgaactcattcctttttatggttgtatagtatttcatggcttatatgtgccatattttctttatctattctatcattgatgtgcatttgggttggttccaagtctttgttattgtaaatagtgctgcaataaacatatgtatgcatgtgtcattacagtagaaatattcataatcctttgggtatatacccagtaatgggattgctgggtcaaatgatatttctgattaaagatcattgaggaattgccacactgtatttcacaatggtcgaactaatttacgctcccaccaacagtgtaaaagccttcctatttctctgcatccatggcagcatctgttgtttcctgactttttaatgatcgccattctaaacacttctctagttcttttaattgcgatgttcgagtgtcaatttcagatctattcagctttctgatatggccatttagtggyataaatttccctcttaacactgctttagctgtgtcccagagattctgctatgttgtctcttcattctcattggtttgaaagaacttcgttatttctgccttaatttagttatttacccagtagtcattcaggagcaagttgttcaacttccatgtagttctgagattttgagtgagtttcttaatcctgagttctaatttgattgtgctgtggtccgagagactttttttttttaattttcattcttttgtatttkctgaggagtgttttttcttccaattatgtggtcaatgttagaataagtgctatatggtgctgagaagaatgtatattctgttgatttgkggtggagagttctgtagatgactattaggtccccttggtccagagctgagtgcaagtcctgagtatccttgttaattttctgtctcgttgatctgtctaatattgacagtgggtgttaaggtctcccactagtagtttgtgggagtctaagtctctttgaaggtctctaagaacttgttttatgaaacctggtgctcccgtattggatgcatatatatttaggatagttagctcttcttgttgccttggtacctttaccattgtgtaatgtccttctttgtctttgatctttgttggtataaagtctgttttatcagagactagatttgcaacccttgctttttttttccatttgcttggtgaatcttcctcaatccctttattttgagcctatgtgtgtctttcaatgtgagatgggtctcctgaatacagcacactgatgagtcttgacttcttatccaatttgctagcctgtgtcttttaataggggcattaacccatttacatytaaagtaaacattgttatgtatgaatttgatcctgtcatcatgawgctagctagttattttgcacaatagtcaatgcagtttcttcagagtgtcattggtctttatattttggtgtgttttttcagtggctggtaccagtttttcttttccatatttatttcctttccatgtttctttccatatttatttcctttccatgttttctccttatttccttttgtaaggcaggcctggtggtgacaaaatccctcagcatttgcatgtctggaaaagatttcatttctcctttgcttacgaagcttagtttggctggatacgaaattctgggttgaaaattcttttctttaagaatgttgaatatttgtccccactctcttctggcttgtagagtttctgcagagaaatccagtgttagtctgatgggtctccctttgtaggtaacctgacctktctctccagctgcctttacatttttcctttgttttaaccttggagaatctgatgattatgtgtcatggggttgctcttctcaaggagtatcttagtggtgttctctgtatttcctgaatttgaatgttggcctgtcttgctatgttggagaagttctcctggataatatcctgaggtgtgttttccagcttgattccattctccttgtcactttcaggtacaccaatctaacgtaggtttggtcttttcacatagttccatatttcttggaggctttgtttgtttcttttctttctktttttctctaatcttatcttcacacyttatttcattaagttgatcttcaatccctgatatcctttcttccactcgattgattgagctattgatacttgtatatgcctcrcgaagttcttgtgctgtgtttttcagctccatctggtcatttatgttcttctctaaactggttattttagttagcagttcctgtaaccttttatcaaggttcttagcttccttgcattggggtagaacatgctcctttagctcagaggagcttgttattacccatcttctgagtcctacttctgtcaattcgtcaatctcattctccatccaggtttgtgcccttgctggagaggagttgcaatcatttggagaagagtcattctggtctttggaattttcagcatttctgggctggtttttcctcattttcatggatttatctacctttgatctttgaggctgataacctttggatggagtttttgtgtgggggtcctttttgttgatgttgatgtggttgctttttgtttgttagtttttcttctaacagttaggctcctcttctgcaggtctgttgcagtttgctggaggtccactccagaccctgtttgcctgggtatcaccagtggaggctgcagaacagcaaagattgctgcttgctccttcctctggaagcttcatcccagaggggcaccagcttgatgccagccagagctctcctgtatgaggtgtctgttgacccttgctgggagatgtctccctgtcaggaggcacaggggtcagsgaaccatttgaggagacagtctgtcccttagcagagctcaagcactgtgctgggagaattctccttctcaggatcagctgctctcttcagagccagcaggcaggaaagtttaggtccgctgaagctgcacccacagcttccccttcccccaggtgctctgtctcaggaagatgggagttttatctgtaagcctctgactagggctgctgcctttctttcagagatgccctgtcaagtgaggaggaatctagagaggcagtctggccacagccactttgctacatggtgctgaattccaaccagtccaaacctcccggcctccttagcactgtcaggggaaaaccacctactcaagcctcagtaatgatagacccctctccccccaccaagctagatcatcccaggttgacttcagactgctgtgctggcagtgaggatttcaaggcagtggatcttagcttgctgggatcctcgggagtggaaccctctgatcraaacctcttggctccctgacttcagccccctttccaggggagtgaacggttctgtctcactggagttccaagcaccactggggtacaaaagaaactcctgcagctagctccatgtctgcccaaacagccatccagttttgtgcttgaaacccagggccctgstgtaggcacatgagagcatctcctgatctgcagattgcaaaaaccatggaaaagcgtagtatatgggctgggtagcacagtccctcaacggcttcccttgggtgggggagggaggtcccctggctccttgcacttcctgggtgaagcaatgccccaccctgcttctgctcaccctctgtgggctgcacccactgcctaacaatcccaatgaggtgaactgggtacctcagttggaaatgcagaaatcacctgccttctgcattgccctcactgggagctgcagaccggagctgttcctattcggccagcttgccagatatttgagattttcaagggcaagaaggttatgcaataagatctttacagtattatttggaaataatatttttaaatagtctatttctttttgtttaccttgcttattttttcttcctttttaactttctttttaaatatatttggtgttatttaaatatctaaatatttaaytttgtttgttttgttcttacaggctatgtgttttgaaaatatgcgtattatgagatatgaagagtttatatccatgatattcaggctggattatacccaaccactttcagatgaatacatcacagtgactgatacaacatttgttgacattccagtacgattgtacttgccaaaaagaaagtcagaaacccgaaggcgagctgtgatatattttsatggtggtggtttttgttttggaagttccagtaagttcattgtataaggaaaaagtgtagctagctctacatttttgatataagaactattttatataaatatacacacttatactgatacatacatctatatatatacttgtctggatatggataagtatagatataaatatgagacatctaataaagagacatagacatatgtttggcaamtaatattatggggattttaaattcagtttttgttttgtttttttattatccttagctttcatattgaatgaacatatatcaaaggaaaataggatataaagtcagttattaaacttttttcttgggatctgaattcaggagcagaaacattgaggggatgcagatgttttaattaacaagtcaaaagcatttgctattggttgctacaagatcaagtttgcagttactgataacataatagaaatactggtaaggcttagaatgcagttgttagtattgactctaaaaagaaaacacaaaatagtactatgtaataataaactcttcccataaaatctcggttccctacttgtctttttaggcatttttcttacagtgattattcaataaatgtttttgtgaagaaaaaagacacacacatagtgaatgagagggacatctgatgatctctagagggattattatccaaaatgttctaatccatttcttttatgtattttttaccttcttaatgttttcaatacattrgatttcatctatatttcatctataatttaatttatatcatgygttaaaatggtcgaataacctgctttcttgataagataaataccaagtttgcctcatttctctccaaagaaatgcattcattccactgaagtttttaygaggtgtatgaaatatccaagtgttcatatacatattacctaggacttgagtaagcacaaaagaaatggccactgacaggaaaatatcaytttgattgaaaaatactaagaagtattcctgattattagggttatatctctttttactgacayaggcaatgattgtgatcagtaatttctaaaactgtgagaattattattcaggatatgacattccaacattctgcttagctaaattctagatgtcttttgtcaatattttggttttatatttacacattatttgttttcagatctcccaaacatatgtgaatacactggaaaagacttagatactttctaattttcaccaagaaaaaatagacattataactattttctagtatttgcaaattttaattttctttcttttccccctaggcttcctcttttgtcttctctaaaacatacataagttgctttgagaaccaagaaatataggaaaatgttgctctagtagactttttatatacttttgtgatctttgtttttcaacatttatcctcatatctttttgtttttcaacatttatcctcatatctttttgtttctatacgcattctacagacactataacaataaaaaggcatggaataaaagaaacaagaccagagagattatatcagcaaatattctatgagtacagacagtttgagataaaaatgggaaacaaacaagcaaacaaaaatatggctttaattctaagacaaaaaggattgggagataaaaatgaagacatagatttgaaatacatcactgagtggctttaaaggttatgaaatgaaactggaaataagacctcaaggtctctggatgaaacggaytycttgtggctgataaagawacccaaattatgacactaagagctcagtgtccataatgagtgagaaaagggtggtcacacatcactttgttcccagagaaggcagctccaaacatcctgtttgygcccctgagctaagatgtttccaagctgaaacaccctrattagaaaactcatcccaccagttgcttgaaagcggtatctaacagacttttggtttggggcttggaaactacccaatcaggaatcagctgttttaaactatttgaataagtttgaatcctttatttacatatatatacctgattgtgattgagggatgccagctgattctccatatttaagccacagaccctctttttggtctctggagcacacttttgttttacatggaaggctatgtctccctaatctgcagattttttttttaatagaaattaaagctctcccattttcttctgaagatctcatgctctttcgttaacaaggtgaagttcagagagttcttaggtcttgtacattttggtcttcatctatgcatggccttttcttgaaaattaacttaatctttaataaaacattatttttttctatttaaaagactaggtgacttactttcctgttttccaggttatatatacaccctgtggttagttttcactttgcagttttgttaatgtgcaagagaaggtccagagaagtctggaatttgatcacaactctagaattctttggatttctaggatcttgtggtaaataaagcagcagcagatgttacagaatttgccaaggtgcttggccagggccctggtaaataggatatgtggggacctggggaaagatgtgtgtgtgtgtgttatgtgtctggggaaagtcaatagcttgtacrtcaagcatgtcaaaactcatatgtatatcaagtcttcacactgacctgccagaggctctctcatatctagttattattccttagactctgtcttaatgccaatgttattggactattttattatgtkgcatcttcaaagaagacaagaggttttgaagaacgatgtttagagactcaatacatactattactttctttttcctccgacttctgaaccagttaaaaaattacacccagagttcacataaatgcaagtcaaaccattaccattatttcagatgaagtaaaatgcaccaggatacaaagggtcctgggaagggtcattgtgtacagacagcagatgtcaagacgatattanaataggctgagcctattctagttgatcctccccaaaataatcaattggtgaagtcatccttttcctcctggaaagagtggctgaaaagactaggaaggggagagtgtgccacgtggattcaggtccatctgcttggaaatggggggtggaaataaaagctatgtgatattcacaaaccacagttatttccacattcatatctgtaactgtttctatagctttttaattacaggaaatactttgatgtttatttcttcatttcagaacagagggcttttgacttcctgaatagatggacggcaaacacgcttgatgctgttgttgtaggcgtggagtaagaatgatwtttttctggctactatgatttttgcctttaccatgtagaggtttgatttccacatcaagtcagctatgcttcaaatataattttttaaattaatatattttacttgtcaccattgcaacatagactgctcctcaaagaggttcagtgtcccattatttttctgtgattgtgagaatatctgawttataccccagagtaagcagttttggaaacacttgctctagacacgtaagactcaggtcctataaggccctagtagtgtcccaagtaacacagctggacagaaggaagtatattaactattacacatttgggatactggattgtatttgagcaggcaagaaaagtttaatttcatagcttttgaagtaatctaaatactattttatatctgttttgatataataatatgtttgtgcctggcttatacattctatcaaatccctaaaatttgtgttgttctttgtccaaaaagtataaatccactgcattttaaataaagataccaacatctttttggtacacatctatgtctaagctacaaattacttagagttttctagatagtttataataaaattctaagaaccctattaccaacatttcatattggctatagaaatatacatgttttagcattctgaagatcaaaaagaaaaagctctatgaattgactgctagatgtattttcctgtcttactgntctacacacactggggaaaaaataatttgtgcccatgaaaagaagagtgtgataatttgccttacaaatgaatttaccagaaataagcaagctctctggcatatttaaattttatttatatatcaaaatttttatctagtaataactactgggtattatccatgatgaagtatatgcaccgtcagcttataaaatttttacctaaatgtccttgataaaataggacactgcctacaatatgctctcagatctgcagcctattgtgctttttaaacaagcrtttttaaaaaaatgtttggattacaagttacattgagaatatgatgtaagctatacaccatctccattctaaaatacacttggactaaaatttttgcttacaattcctaggaagttcataacactcccctgactcctcacaaataattccattcatggattttaggtacaagattgaaaaccttataytttattaaaataattttcattttaatcaagagttagtagaaaacttaggcttgatttttagaagactgaacaataaagactggcattaaattgcatctatttggtatttgagaattagatggacagatacaaccataaatgctttattattctttctttaaagctataggctggctcctcaacaccactttcctgctcagtttgaagatggccttgctgcagtcaaattttttcttttggaaaaaattcttacaaaatatggagtggatcccacccgaatctgcattkcgggagacagttctgggggcaatttagcaacagcggtcactcaacaggtacattatatttgtttttatgatrggaggcagaaattgaggctcattttttttctatagataattcagttcttcccccaccatttgttgaaaagaccattctttcccattgaattacagtagcacttgagtaaacatttatttaaccttaatgtgactatttctggattattttgttccattgatctacatgtctatcctactgccaatactacactgacttcaactgttcttctttaaaaaaaaatctagtattccatatctttcccattaaaatattagattatcttatcaatttttaaaaagaaagactaactgaatttttattaggattgcattgaatctataactttggggaggattgacgtgtcaacaatattgagatttccaattaatgtacatggcatgtctcatactttattagatcctcttcaatttctcagcaatattttactattttcagtgtagaaatcatggaaatcttttctcaaattttaccctgagstattttttaaaatttttattaaaatactattttctgaatgtttatttggaacatattggaatttgtaatttgtaatttatttctatgctatatagaaatacaattgattttgatattggccttttcccatcatatcctcaataaactcacttataackctagtgttctgtgttttttttgttttttttttttttagtttcctaggattttctatattttcaatgacgagagacagttttagttcttgcttcccagtacttgttccttttaatttttcttttattattgcactgtctggggcctctagtaaaatatttaatataactctcttgctttgtatttttggaggaaatttttcaatatttcatcaataaatatagtattaactgaaggttttcatagttagcttttgtcagattgaggaacttatttctactcctagtttgctgatagtttttgcataaatgggtcttgaattagtcaaatgtttttactccaactattgagatgatcatgtaatttttcttatttattattttagtgtggtaaattatgccaattgacttttaaatgttaaattatgcttacattctaggcatgagccttacttggtcttgatgaattaaaatttttatatgttgctgctttccatttgctttagttcattaaatgttttgtatttttgagattaatctttaatttttaacactttttgtcaggttttttttttttctttgagatggagttttgctccatcacccaagctggagtgcagtggcgcgatctcagctcactgcaacctctgccacctgtctttgtcaggttttgagagaaaaattacactagcctcattaaataatttgggaagaattccaactctcttattttctgtttttttctcttttgtgaggttgtattgaggtacagttgaaaaggaaaaatcatatgtatttaagatgtacaacatgatgttttgatatatgtatgcatttttaaacaattaacaaaagctaagtaacgtaatcattacctcacatagttaccatttattttttctctatggtgagcatgtttaagatctgtcttagcaaatttcgagtacgcagtattattaactatagtcaccrcacttaatattagatctccagaacttattcatcctgcataactgaaactttgtaacctttcaccaatatctccctgttctccccatctccatcccctttcatctatatccccagctcctcataaccaccactctactatccacttctaggggtttaactttcttaggttctacataaaagcaagattatgcaatatttgtctgacttatttcattcagtgtaaggacctccaggttcatcaatgttgtcaccaatgacaggattttcttctttctggaggctgaataatattccattgtgtgtgtttgtgtgtgtgtgtgtgtgtgtagatacacacacacacacaccaaattttctttatccatttatccggctgacaaacagtttgattccatatcttggctattgtgaatactgcttcaatgaatatgcgagtacagatatctcttcacattactgactttgtttcctttggatagatacctagaagtggtattgctgaatcatctggtagttccatttttaattttttgaggaaactccatactgttttccataatggatatactaactgacatttccaacaacaatgtacaaggggtccttgtacatatgtctactcagttctatttcccattttttaaattgggttatttgttttcttgccatttagttgaattctttatacattttgaatattaaccccttattgaacccatgatttgaaatattttctcctactttgtagagtgtctcttcactctgttgattgtttcttttttcgtgcagatgctttttagtttgaggcaatcccatatatctatttttgcttttgttgcctgtacttttggagtcatacctcccaaattagtgcttagactaatataaagtcatttttctctaagccttcttccagtagctatacagttttatattaagtgttagacctttgattcatcattttgagttgatttttgtatatgaaatgaaatgagtgtccaatttcattcttctgcatgtggatatatgagaattctcaacattatttattgaaaagactgtcttttccttttgtgtgttcttggcacctttgtcaaagatcaattgaccattgctatagcttggtctttcccagtcaaagctcatgttgaaatttgatccccaatgtggcagcattgaaagactgagcctagtgagaggtgtttgggacaggagggtggatccttcgtgaatagattaatgcccttcagagggaatgaatgagtgaattcttgctctccagggaatgaaatagtttgtcagagagcagattattaamaacaatctggcttccttggtttctctctcttgcttcctttcttgccatgtgatttctttgcacatgcagatacccggttctctttcatgagttaaagcagccagaggccattatcagatgcagatacccaatcttgaaactttcagccactagaattgtgagataaaaattttttaataaattacccagtctcaggcattctattgtagtagtgctaactgaactaagacaacaatttatttcttagctctttattctgttccattggtctatatgtttgtttatatgccagtaccatactgttttgattattgtagctttgcagtttattttgaaatcaggcattatgatgcctccaggtttgttctttttactcaagattatattgactattcagtcttttgtggttccatattaattttctatttctgtaaaaaataccattgaaattttgattggaattgcattgaatctgtacattgctttgtgtagtatagacattttaacagtattaattctttggatccagaaacatggttaatcttttcatttacttgtgtcttcttctatttctttcattaatattttatagctttctgtgtatagatctttctacctccttggttaaatttattcctggtgttttttatgtacttatttttgatgctattgaaatgggattttttaaaatttctttttaagatagtttgttgttggtatatagaaatgcaagtgatttttctatgttgattttgtatcctgcaactttactgaatttatttacttgtactaacagatttttggtagagtcttagggttttctgtatctaatatcatgtaatatgaaaatagactttttttttggtttttgaaacagagtctccctctgttgcccaggctggagtgcagtggcatgatctctgctcactgcacgctctgcctcccgggttcatgccattctcctgcctcakcctcccgagtagctgggactacaggcacccgccatcatgcctggctaatttttgtatttttagtagagacaaggtttcaccatgttaaccaggatggtctcgatctcctgaccttgtgatctgccagcctcagcctcccaaagtgctggaattacaggcgtgagccactgcacccggcccagactttttttacttctttctcatttggatgctttttatttctgtttttgtttgtttttttgttttcttaatttctctgactaggtcttctagtattttattaaataggtatagtgagaatgggtatctttgtcttgttcctgatgtcagaggaaaagctttcagctttttatcactgagtatgatgttagccttgagcttgtctatatggcctttattatgttgaggtactttacatataatttgttgagagtttgtataatgaaaagatattgcattttgtcaagtcatttttgcatctgttgagatgttcatgtaagttttattcttcattctcttactatggcatatcaccttgatagatttgtgtgtattgaaacatccttgggataaatcccacttgaacatggtgtatgatccttttaatgtgctgttgaattcggtttgctagtattttgcttataatttttgcacctatgttcataacggaaaattagccagaatatctttgcctttcatgacctcaacattttttaacagtgctggggatttttctgtgatgcttactcattacgtcagcttccgccacctgtgcatccaggttcctaagttcacctatgagtctctgttcatcacttcctccacctacgcatctatgttcctaacgaatagtttgccagccttttcttatctttcatgatcttgccacttttcaagagtgctggttttttcctgatgtctactccttatgtcaacttgtctacctttctatttaaaaaaaaaagatgaaactagtcttcttcagacttctttttgagaaacactgctctgtactttttaaaatatgactttagttataaaaacttgagccaaaagcttactctaggtgcctctctatttattttttaaaatttctttccttttaagtattataagattcaggattagagcactagaagaagtttatatacatacatatttttatatacatatacacttgaaatacacgttatacatacataagtatatatgcacatacatacatatacatgtacatgtacatatgcctatacgtatatattaatctatgacatcatacacacaaaaccctattgtgaaaccaaaattgtagtgataacaaagcttcacctttggttctatacctgggcctcccttcaacccaacctgttacactttagttgcccttcatgtttagagctctaagtaaattttcttaggagaaaaataaaagaggacttcattgccaagaagaaagtttgcaaaccattagacatgttgattccttaggactcttccagacagaacttatttgctatttacttgaaataatgtcatttatttgaaagatcttactggagtaaaatgaggagtatgatggagggtaaaaattggagaatgccctgcttagagattattatactaattactatgtaaaattgcatagcagtctggtctaaaatttcatctgaaaccggtttggggaatgtagagattctgaaagctgtccaacaattacccaatagtgattaagcaacatcttaccatacctctaatttcttgcacatttgtaacatttgcttggctttgcaagtgtagcaagcataactgaaacaacaattgggcttgatgtattggctcacctctgtagtcccagcactttgggaagcccagtggggaggattacttgaggccaggagttcaagaccactctaggaaaaataaaaataaaaatagtcagaggtagtggtacactcctgtagtcccagcaactcaatagactgaggcaggaggattgcttgggcccaggagttcggggtttgcagtgagctaggatcacaccactgcaatgcaacatgggtgacagaggaagaccctaattctaaaaaacaaaaaagaaaagaaagaaagaaaaaagaaataacaattggatgtagccatacagattcgtgaatatgtgataccctaccttataacttttcagcaggacaatacttaataacacaggcaccaaacagagacgtgattcttagtaaaatctgtagggcagcacaaaagtgcacaaaaatctaacaccattctatttcttaattaattatataagaacttagtatctatttagacattctgatttatctgttcaaagggaacatagtgtagtatgcagatgaacaggctgcagaagaaytcagtgtacttaatgagcatttaaaaaggtgattttctttatcctttcctatttacttttgtgattatactttaagttatttgttcttcatggactgctaaactttctatatgaattacatattcattgaaaagctttattacctgtactgtgtttattttgggtcataagaatcaacttttactttgaaattattatagagctcattttttccaatgtctcatgatcctgtgattgataatatgttatagattatggctttaaaaattcggtatcaataatcaccactgagggatatattttaaaaaatgactcatctgtttcaattcacattataaaaggattttctcatggattaggacacatacattaccctgtcattttctcttgtggacttggtccacttttcaattgtattcttattattgagaagaaatgaatatatttaasctattattgctagatttcctggcaacatcacatgatgtgtcctaaaatcactgatgtggcttgctggtcacaacgatctggatgatcactatagcttagaaaactcttgtggacatggtgccttaatctttaattaagaggaaaaactatttctaaactttaatcatatcacttaaatccaatttcatggccacattttattttaaaagaatgtatgcattgctcttatttaggatcagagatattctttttactttcataaaacaatgggaattgatttgatattttgaagtaattagtaagtcctactctcttagatattctaaaaaataagtatttcaatgtaggtaatttaaagaggaagctgtgatatgcaatagctctacttatttaggtttatagctttggtctttctaaatacacttttgtttctaatttgtatcatttgtcataaggtggtaataaagccgtatgatcttatttataataatatttctatggcatcccatatttctatggctgtatatattacatatgtgacacttctttaaaaatataaaaaactctttaaaaacagtttaatagcaaatattaatcagaaattataattaatggtgatgatttttagaaaaacatgattgacatgcagcattcttggacatgggatgatgtcccatacatagatagtatgtatgttagtttctgttattttgtttgtttacctctgtgtaatcactgcatatcagtgttatagaggtcacctgaagtccatcagaagcagaaatatctgtcttcttttacttgcacctggaagtggtatcactgtgagtcctgcacttctgagtgatataatctgttttactgtcacacttttaggacataaagtgggaagtgggattttaggggaagaakaaagatcaggaaaggacaggattaatctgcaaggaggagagcaggttgattatcttggactctagcccatgtgggagttttgcagtttccagcatggttggaacatgcgtgctaggatgaggccaaaaaatcctcccatttggaatttcttcatggtggttcatagtttatccagatactcattggctagttgtgtattgwtggaatcaagtttggagttgttaggggtagttcatagaaaggaaaattagtggggatagcaatcacagtttctatgaagttgagtgctctgggttgaaaatgacagatatgaagtttggtgaacaatacttaccattagcaatgtaggaactcctcaaataacaagttaatattttgtctacatccatccttccatggatgacaggctatggataagttggtgtgggcatgcaggaatttgaataacacacactcaaaccagggagctagatggtagggtatcttgtgaacaagtaactggattgagaagggtagtagatgatggggggcaaagtgcaagggccgtaatatgttcccttggcagcggaaaccattattctctaggaaagtgccatgccctttgaatggtcacagggcacttgggaaatgggagaggattcagtaatgcctcagactgtctggagttgactttatgccaagygcaggtgtccatggcagattactgctttgaatgggctttgaagcagttgagtcataaaatgacacagggcatgaagtcatggatcatcccttctctgactttgttaccagcttcctttcagccaccactcccaattcatgctgtccaggagggatgtttgcgaatgaaaaaaactgatgtaggagtgaaaatcgtgctggtccacatgtttactccaagcattttagcatggcatagaagcttttcatgaactgggtcccaaattttgctctcaaaagtataaacttaggagaccagtcttcatcatggtataaataagttactttcttgatgacaataataccagtggcatggcctataacttgaaaaacacggcctataacttgaaccaattagagattcaaactgggggacttaataagggaggggcagagcaaataatttatatgagacaattttactgtaaataccataagtttaggattaatgatatttaattataaaaggaaagttcaaatgcatactatccattgtgttttcatgaaaataaagttcattgttgaaaaasattaagaataaggatgggctttattgaagctcttccacaacctttaagttacttagctatccaaaggtctttattatattggaaatataataaaaaggtaaatagaagtttgaaatacagttaccagtgtctaaactctaaggacattaccgtgagccagatatgttctctcaaattttgaccttttactttttcattcttgttctttacaaagtaataacatcctgagatgaatgtcacatttttttgcactcaagtacatatcagttacccacaaaatcagaaatacatatccattccttcaygtccattttatagaatgctccattctaggcttgttttggtttagtattaatgtttatgtgcacttttgaactttgcttagctggctatcttcgagaccatataggtctaggasgaaagaactaagctatagataggtcaataattcagcattactgttgggacctacttgttttatacttgttactgtttctcggatcctattattcctggctccagatatagtgtcctgttaaaagaattatacatcagatattatagtttttaatattatggtttccatattattaaaatattcatttttctattttcccatatgatattaatgactttattatcttaggcccagtaaggggtacaatgacaacttaggtatcatgtcagtgtttgtgaaattcaaaaccaagtagaaagattaatcatgtacatttttgtataataaaggaaaagtgacgactggccttaaagaggtaatagagatttgggaatttaaaaaagaagagtttcctttgatcaggtatttacatgcagaatcacacatatatgcttgtgagtatatataaaatgtgtagaaaatatctgaaacacacctgataaataacatagttgttaagactatggcaaaattgccaacctcggagaatctgactcaggtgcttttccaatatcttgaagagaactgactttagcatgggttttgaagaatgttagaggaaaaaagccttgaatggcaaagtaacaaatgacataatggggaacatagagatgggaaatactgacacatttgttgaagtgacttatttcatatggcattccagaaaggaaagttagggtcaggcaaggttattgatggacactttttgacctgtccctgtttatgtgttctctgtttgtttttttcctagattagcgagattgagagtaggatgactgagggtgggctattgatagcaatctttgattagtaaattatctacctaagggcatggcagagagatttgggatctaggaaagtttctgtaagataactttgttttggctcattttcattctacacttattaaacctctagcatcttggaagtacactgtagagatggtaggataccatttccctttctgaggtacctcttggatttcaatttagtttttcctttcagttcagccagccactgtggtgactgggtgacttagaggtacatcctgtggtcctgagcttttcacttgtagcagcagcaggtattttcatttgtccagatcccagactctagccaaggcaatagctcttgggagattaattcaacgttatctcctgcagtctgcagggtcataggtgagacctcaaatgcctttctctttgaaaaagaaaaggcactccttatcaagtacttcacattttatccttgcatatcagacttgtgcacatcgattttttcataattttctccctttgtttctccaacactgcatcattctcataagatacctgttgattggccttttttttcttcaccttggtccacgtgcttttgcattgggataatgtttcttaaaaattatggtatgatgttggtaatgtccaccttgtttccaaagaatatattctaaaaatgtttaagatttttttttagattctataatgaaataatatgatttaatagctatatttatttcttccactcactctggttactttatttaagaaggatttttacaaaactatatgtactgccaatttccactagaaatatctttagaattggatcattttcatttgtgatttttgaccaaaaaatcctgtgtatctctctcgccttgtacattctctttctgtctctttccctctcctctcttatactttctccttttttcctcacacaaaaaatcaatattttttaaaaccttaaatttaaattggtttgaatttttttatgccatggtaatatattataaatattataaaaataattatgatayatcacatcaatttatgtagatttgtttatcttatgactgctagataattaaattttttttctcctggtattttggaaatgtttgcattacagaatattaccatatattttcaggtgcagaatgatgctgaaataaaacataaaatcaagatgcaagtcttactttaccctggcttacagataacagattcttatttgccatctcaccgagaaaatgagcatggtatagttttgaccagggatgtagccataaaactcgtgagcttatatttcaccaaggatgaagcayttccctgggcaatgagaagaaaccaacacatgcctctggagtcaagacatctgtttaagtttgttaactggagtattcttcttcctgagaagtatagaaaagactatgtatatactgaaccaattcttggaggacttagttattcattgccaggacttacagacagcagagcattacccttgttggccaatgattctcagttacagaatttgccactaacctatattcttacttgtcaacatgatctcwtaagagatgatggacttatgtatgttacaagacttcgaaatgttggagtccaagttgttcatgaacatattgaggatggaattcatggagctttatcattcatgacttcaccattttatttacgtctaggtcttaggataagagatatgtatgtaagttggctggataagaatttataaatatgtgatgtgtatgtatagcccttacatagtggattgtaatttgtgrtawtttgtggttttggagcaaagaacaatgtcatttgagttatctaaatctacatttgcaacatttgtagcagttaatgtgtgtccttgaagagttattaaattttctgacttgcagaccctgaatatgtaaaatgtatgtaatcctgcctattttctccttacttataatttattataattatgttggttctaataagaaccaatgcttattaaagttgagaaataagagtggttattggcaaattaagcaagatactttccagataggcacagaaattgttgtagtgagtgggaagaggaaaaaacatggaacaaacttgctgctaaaaatatatggaaaccactggactaaataaaccctaaggaccctatattagtttcctgtgactattgtagcaaattactacaaattcagtcgctttaaacaacagatatttattcttttacagttctggggtcctaaagcatgaaattagtattaactaggcccaaaccaagtcacaggcaagagacatgactcccttggagactctctagaaggtgctctttgcctcttttaacctctggtggctgccagtattctttgactattcttagatcagtttaatcttgaaggccagcatcttccaatctctttctgcttcatcttcacattgccttcttctctgcctgtgtctaatctccctatgggcttctcttagaaaaacacatgtgtttacatttaggagggtccacctgaatagtctaggataatctctgcatctcacgatcctcaatttaattgtatttgcagatttccccacccttttctatataaagtaaccttcagagattaggatgtagttatcttttgggaggccatttttaaaaatattttttaaaggaggcagcagatcaatattataattcaagaatctgatctaaatatgcattcaataatgaagaacatttgagtatggactagaaaagcttctccaaaaaactttcaaatatatcatctcaaattacctaaagaataaatcacttctgtagcccttttgttgagtggaatcataaacaaaaaactgaaaatttattgctatgaaaacagatccatggtacaatgttataaattttgagtattaagcatagtcagttgaatccaactaagaagttaaaaatgtagtaagaaatgtgtatatgtatgagtatgtgcatgtgtgtgggaaaaatctaccatccaattgacccaaaaacaacttactcagttgggaccagacatttttctcaattctccatgattcagaaggcaattaagaattacaatttcaacagtccacaaacaaaataagatttttttaatgtagagagaaattaattatgttcaaagagccctttttctttcactcaatttcagtaccccaaagctaaaaacgcaaacatgactatgacaaatgaaaataagtatcatgggaatctgtttttttcctctgagaaataaaatctaaatggagatttgatactatatgctatactacatacactaagaatattgtatttttcataattctgatttaatctcctgtaaacttgatatattttaaaatttgtaatttgtttttcatgatactgaatctggttccagttctttttcatcatttaatatactggctacccgttctaattaggaaaacaagtcctagaaatctcttcattttgacagcaagtgctgatttgtaagaaaatcattaaaaatgcagctctctaggaagcacattttgttgattgtcctattgtctgaacattttcacagtgattcctgactaaaaatccttttaattttgtaagcactacactagtgtgtcatgtcactagtatgtactttcaagcctttaaacagaaaggatggctcacagctagataataactaagtttgttttcgttttgaaaaagtttgtatcttgcagagcagaaaagcacttctttttttgctacataagtatgtggtagaaatgtatgctaaggtaggccagtcaatccttttttatttattttgtaaatttggtcccagaatatttctggaaggaaccacaggtagactagcttccattgcagtcccttacctcactaacttcttttgtggctttatccaggcactgttactgtttgtatgctaaagggttcatttcactgggtcttactttcaaagtttgttccattttgtgtggtggcatgagcattgtgatcaagccattaagtttggaaacaactgaatgaaagtcgtctgttataatgtattttactttatttttaaatttcattttaaattgacaataattgtacatattcatgggatacatagtgacgtttcaatacatatcatgtatagtgattatatcagggtaatcggcacatcatctcaaacatttatcatttctttgtgttgggaatttcaatatcttttttttagctgtttgagattatgtaatatattattgttaactatagtcatcctacagtggtatagaaactacctagctgtaatgatgtatcttttaacaaatctaatttatttcttgacagtataggggaagacttgattacaccccatggcattacagctaaaaattccaacgttttcagtctctttgtagctatgttatccagacattgatttgtatttacatctcatcttcctttctaagagaaacagtgatgcagaacctgagagtcaaatttaatattctctaggtaccaaggcaagggtttatgttacagtttgtgtactagtccaagtcccaagttgtgacgatacagctccataacctacctttataccacccagggaaagtatacagaagaaattcttgacttcatctatccgaatttctacaagtcatctgttatttttctgataatctgcctgtgtctcctggaaacataaggtgtaggtttctgacacatatatctaacatgtaaagaagtaacaatttccaaaatacctccaaacagcgccacatcctaaaggaaatttctaggtttttctgctgaaatatccattccagcattgtgtttgtttgctagagctgctataacaaagtatcacaaactgagtgccttaaataaacaaaaggaatttattactttgtggttcagaaggctagaagttggagatcaaggtgtcatcacaccatggtccctctgaaggcaccaaggatggatctgtttcaggactcctggcctgtagcagcataactccaatcttcacatgatattctcccgttgtatgtgttcttccccaattttccctttttataaagatagcagtcagattagattagggcctatcctaataatttcattttaacctgactgtctttgtaaagaccctatctgcaaataaaatcacatgtaaagtattggggcttaggactccaacatatagatatgttttatatatatggtgagatatatatatatttttttatatatggtgagatatatatttatatatggtgagatatatatatatatggtgagatatatatttatatatatggtgagatatatacatattgtgatatatatatatatatatatatatatatatatataatgaatttggtggaacacaaaagaacacctagcaagtatcatatgttccaatttcttaaaagtaaataaaggccttgtgccattggtggtgttctgaaaggaagagtccatcaattttccttctgtgcatttctctctggggaacaggataccagcaaaaactgagctgctagctgaatacagcataggtcatatcagagcctgccgtgagctcagaagtaccctcatggatcatatcaatggtagaacataaccctcttctcctgtcatgtttgagcctattgtacactcaccatctacgaagaaaatcacttgccttgagacacagcagctccttttaaatctagttccgattaatgcagaaaattgttccatttggattatgtgaatccatttggattatgtgtaattttttcacatagctctctagagtcttttcaaacagtctctcactgatagaacttaccagaataatttttcctagcatgggccttggtgagacattaatgacactaatgacaccatggacagttcacagaagtctactccaagcctcactgtggacagaaatatctgcatttgtaggaagattatctgggtacacctttgtttgactccaaccccagcaggagttcctctctcctttttatttatttttttaaatcacatttgttgtatttacagaagtaacacagcagaagcatatccaagattacacacatcaaatagatggctaggcccaccgtgcaataggtaaaatttctcatgacactttaaggccaatgcaaaatttatacatatatatgtatatatctgtgtgtgagacagcatgtgtgtaaagaagcatttaaaacatatgcaaatcacgaaatccatttcaatctgttatcagaaacgacatccgtaacctaggttttgtgtggcagtggcggggcgctggactgccatctaccatgccagctcctcctcctctgccactgttcatggctccccaaacaactgggggaatggggtcagcctcacctaggccttcgtggggtccacatgctactcccctggctgcgatggaccaccctactggctcccatggggtcctcagtgagctagaggctgggcagcagcctttgcagctgtgtgcagctgcccactttttcagcctgcttataattataataaagaaatacatatataaaaataagtataatgtaaatttcgcataccttcgagcctgttaatgaatgtggagaattcaagttcactgccatgtgatatactttcagctttgatgtgaactcaaagagaagactgctttcaattgtaggcctatgatctttgcttgattattttacttcatctccaaccaaattcttttcactaatttttgtgcagcttgcaccgaataaggcaatcttcagtctcagtactgagctactgcagtggttcaaaaagatctgtgtcctccatgtgtactgttttccctatcagttgtcacaggcagtgatgtgcatgacagggtgaattgtataggattttatattccatcagtttggtgtatatatatatttggatatatatgtatataaatgtctgttagaatgaatgtgataatggacaaaaataaatgtctattagagtgtttccctaaaattaaaatatggcttatacttttccacttaaataaaatgaaaggtaagtaaataaaaagctgataatttttgaagatgaataagacaaataacaccacacacccgtccccagactcagagagagaattaaaaaaaaatattgggaatgaaaaagaagacagaaggtatggaaataattgtgtgactgccatgtgctattgggggcacatatataaaacctagagggcgtgggtgagatataaatagggggaaaaaatgacactccctatagtatagtttgaagtcaggtaacttgatacctctagctttgttccttttgcctaggattgccttggctattcagactcttttttggtttcaaatgaattttaaaattgttttttctacttctgcagagaatgttattggtagtttgataggaatagcattcaatctatacaatgctttaggcagtagggccattttaatgatattgattcttcctatccttgagcatgggctgtttttccatttgtttgtgtcatctctgatttctttgagcagtgttttgtaactcccattgtagagatctttcacctcccttgttagctgtgttccaaggtattttattctttttgtggcaattgtgaatgggattgtattcctgatttggctcttagctttgctgttgttggtgtataggaatgctagtgatttttgtacattgattctgtatcctataactttgctgaagttgtttatcaactgaaggagctttgggccaagattatggggttttctagatatagaattatgtcatctgcaaacaggaataatttgacttcctctcttcctatttgtatgccctttatttctttctcttgcctgattgctctggccaggacttccaatactctgctgaataggtagtgagagagggcatccttttcttctgccagttttcaaggggaatgcttccagcttttgccctttcagtatggtgttgagtgtggg

SEQ ID NO: 93339 - DNA, 14050 bp, Homo sapiens
aaatctagatactggttcatttctctctttcttaaccacctcagtctacatccttcacagattatggtaatattatcaggttgtgtgtgtgtatgtgtgtgtgtgtgtgtgtgtatttttttttcctctctgtatgtgaactctcggtcagtgaggagagtgtccaaaaaaaaaaagatgttgcagacagttcagacttatatggtctgtttgttttgctttctataaagtacatgtaaaatttccacagttaataaatatttctaattaatgcttatattaatcatacatttattaagtatccattaattatccaattaatcatacatgtatttgagggcaggatatatacagtccatttttgtattctcagtgcttagcacaatgcctagtacacaaacactgacaaaactgggaataagcagaagacttgcccaagtctcaaggtattggttcttcaaaaccctcccttgtcaggaaaaagataagcaagttagtaaattatgacgataaaaccttgaaagaatcacaatagctctatcaacaaaatgcaatggatacacgaagggcaaaactaattttgccaagggacatacagaaggcttgatgaagtggttaatcatagtaacaaaaataatgctaatgcatatgaagtccttactatacgtcaaacaacattccattcacattgtatatacacaaattcattttatcttcccaaatgattatatgaaatagatactattttttccccattttacagacgaggacaatggagcacagagatattaactcacctaggtcatatgctacaagatgcagaggtgggatttgaacccacactactgcacagagggagaagggaaaaaggcattcctagcagaagaacagcatagccagtcccaaaggcatgaaggagcctgcccagaaagataagatttttagtccaaacataatactgcagacttctggggagcaaaggtttgtactcaaggtgtgacacaatggaatttggtagcaccgagaaacagcatgacagagtgggtacaacaaactctcaaggctcttcaaagtgttagatgtgtatacttgggcaagttaaagtgtgagatgtgtatacttgggcaagttacttaacctctgtgtgcctcagctttcctatatataaatggaaataactatttcagagggttgtacataggattgttattattcataaagtgattacaacattgactggtacatagtgccataaaagtggttgctaaaataagcaaacaggtaagtactaaacatggctgttgcaatatgccagataagagattgggaaggtctaagtgaatggcagcagtagagaatttttttaaaaagatccaaattaaaagggggcagggtagttgagtctcaaagacaactctcacttctgacaccaattacaagttcagggattccaaggatgactctcaggtttgattattcactgggacacaaccgaactcactgaaagctgttataatcacagttatagtcacagtttattataatgaaagcatacagattaaaaacaatcacaggaagagactcatagtgcagaattcacaacaattcaaagcatgaagcttccagctgtcctctccaacggaatcatcaacgaggtcaacttttgctggcagtaatgtatgacagtatgcacaagagtattgccaaccagggacactcaccaaagccttggtatccactttttattggggcttggtcacgtatatatgattgactgtccatacagcttttagtcacaagcccttctggatgttgagttgacacctgtggtccccaggcctcaacataaatcacatcgttagattatcaggtgtgacctcaacacccaggtaaacaaagacacacttatcaggaagcacattccaagggcttagagatcgcctcccaggagctgagggcagttgccagacctatttttatataaggttcattttttactacaaaggtagtgaaggtatagagaagaaaggaggaaaccagactgatggtgatacacttaattgagataaaatatgcaggtagcaaaggcaacataagtttgaaagggaaaaataataatacacttttgagtttgccaagtaactgaagttgctaaaaaacagaagtatgggactaaatcttaggaagaacctcacagcttgagatgacagcatactgataaaagtcatgccatgaatgggcttacctgaggagaacatggaggcaacaaatagagcaagaattgaaccagggtaaactccaattttaaagggctgctcagaggatgactagacaagaaaggttactaaaaaagagcaaaactaaatactaaatcttcctcactactacaggaaactaaaaatattgaataaattactttctaaataggccaaaaaaagagcacttgactttccctggaagtagactctacaagtacattatgtcttgcaaacaagcagttaaaacacaaaatatttcattctgttcttatttccccataccatcttccatgctcagactacttcctaagctgagaaacctttattttgcctatggcaaatttagtgtgtgtttatgcaaaacttaaatyaccacaaaaaccccacaatagggtaaatgaagcagaaggcacagctaattaaatggatttgaggttcattgctcattttgctcagggtcaaataatagtatatgactttctgagtacactaagtagaaaaataagtcattataggatatgagtagccagactgctacaaagtctacagaaaaaaaaaaagcctcttgaaatcttttttttttttaaatcacatcccagatatgagacagtacagaacaaggatgagctgtgggagttattgagtcagacaacccaggcacaagcctcagctctgccacttattagctgagtgaacttgggcaaattacttaaactcttaacgggtttgttctgaggatcatgtaagtcagtattgtctggcatatagtaaacatgcaataagtgtttggttatttggatactctatttgagtacctttgtatactgaaaacctcataaatttattacatactttattattcagttcttcatctctgtgacagaaaatacccatttgaaaatctacttttgaaataaaacccacgaatataaacggtttgcatattacagcatttaccaatttctataacagcttaattgtcctaaaattatctcagaatcacctcagactttgtgatctttattagccaaaacttaatttgttttagaaaatgctcagaactgccctttgtaaaggagaaatgcttaagagttgatccaagaaaaaaatggacaagccaaccatctgaaaaattagtctggaccaagttccagataatatctgtagccatgcaactttttttcctcatgcaacatgtagtgggcttttgccctaacttcatgaacagtgcaccttcttccctcaacctaggaggcctagttctttttgtcaaagtaactcctctaagtcaccaagacccagcttcccttcaggcctttgctggcaccctcaggctttgttagatacttggatcacagtatttacaaattagtttatatagttgtaaccacacccatctcctcacttctcccattaacactaactagacggcatgtaaactggacatgcagactgtcttgctctgtattccagagagggttatatagtgtatcaggcactcaatgtcaagaacccatacagtaatccatacattaacatcatcttaccaaacagacaaatcacatttctcccacttccatgcattaaacattccttatttttatatttaaataattttgtgtgtatatgcacgtgttcaaaatatacccagccatcgacataggaaagaaatatgattaccaaataaagtgtacctttggctgagataaagcagtgctggctttaaagatttgttgtattatcttctaaatttcagaaatcagtcaaatattccaaattttatgtttttttcttttacagtataattaattttgtcaaactagtgggcattcctatttcaaggatcaaagtaattgctcaaagcaaaggcgtaacaatttgtgcttaccatcccgacaaagttttatttcccctttccaacatgctatgattcattctatttcttcttagttgttcctttctatagcttcagtaggaaaaggcaaccagatttagattcctttgccttttaacctcacagcatccctcccacaaaaaggaggactacatattgtactttgttccatcataaagcatcgagatgaattatactaaccttactgtattccaggcatctccgagttctttggaatactgtttttcaaaatgatccaacacaactttgcaaatctgttttgcaagcttcccctctgattttgctttcagctatgacgataagaaaaagttgctgacacacagtgatattacaaatttactgaacgtcaacattagcaaggtctttttttaagacaagaacactttttttggataattactagttcttgaaatggaagcaataccttacatgtaccaaaactgtacattatctaattatgaaaaagcaaggtttttccaaataattattttccaaatgtgaagcaaaggttaaaacagaatctactggggctgaagaaactgtcaaaaggaacaaaattaattttaaaaagtcactgtaggggctaggcaggtggctcacacctgtaatcccagcactgtgggaggcagaggcgggaggatcacatgaggtctggagttcaagaccaggttggccaacacgggaaacccgtctctactaaaaatacaaaaattagccgagagtagtggtgggcgcctgtaaccccacctactcagggggctgaggtgggagaatcgcttgaactcaggaggtggaggttgcagtgagccgagatcgcgccactgtactccagctggctcatgctttgcagggacgaggcgagaggatcatttcccagttcaagaccagactggaaaacatatcaaggacgtgtctctacaaaaagtaaaaaaaaaaaaaaaattagccaggcgtagtggcctgctcctgtagtcctagctactagggaggctgaggctggaggatcgcttgaacccaggagttcaaggttacagtgagctatgatggagcagctgcattccagattgggtgacagagcaagaacttgtatctaaacaaaactaaaaagtcaccggggatgctgacatcaagaaaaattggtgaaaggtatttgagaactctgtactatctttgcaacgttattttaaagtgaaaagttaatttagggagaaaagtcactccaatttcatcgtgaacttccttgcaattgtttcatttattcatccaagaaacgtgtattcaatgcctactatgtaacagacactgttctaagctcccgggataccgctgtgacacagaaaacaaatctcagccctccaagagctggagggagtgggtactagaagtctgcgagctggacggaagggactcagcattacagcactcagcattatttcagggcttgacagtaaagccaaagaaacgctgatctcgcgaggggacgaacaaaggtgatgttcccccatcccagcaccctccctcgccacctcggccgcgtccagaagcgtctcattcagatagaggtacccagccgggccccaggtctcacctgggtcagcattgtcccgctgagagctttcaaacaacaggtgtacgcgaatcagtatcaaaaagcctccagggaactgaaaaaaacagtctgacttccgggattcgcgggcatccactttcattctcacgtttcctcttcaatttctcgcgagatactgatttgctcgcgctatagaattcttgtcgaagaggcttagctcccgcgggagatttcgtgcgcagttacttccggtagctggtaaaggctgatacttcccaggacgcggaggtaacgggccagggccaaagcgactttygctacttggattggtcggcgtagctttgggcggccggaccttagaaagtcacacatctgcsygcctgtgmggcccctgcttctgcggatgctgaggtgggaggatcgcttgggcagaagtttgaggttgcagtgacccgtgatcgcgccactgcactgcagcgtgggcgacagagcgaggctttgtctcaaaaataaataaaaagtcgcatattgtgctgaacagtgtgtatatgcatggggctcaataaaggaatgagttttggggttatgttgtatgatgactgatttaaaatattctcaaagcgaagctagttactgacttaatctaccaaatctagtgacccctgttaacctagacattcagtacccaaggataaaagggtggaatataatgaaaaagaaattaagtcatgcttttccccagacctggcccatggggataatctctccttttaatggagagtgttaaactgaagtaggcatgtaaagcggttacaacagtgattaggaaacagtaaatgcccaaatgttagctgctattattttcactattgtgatcattgtgatttttgtcgcgttgataccaaatgcgtgaagaccaaaaggaccctccactctagcctccccaattcacctttacaagggagcaatgtttaatggttctccaaggaagatgtttattacacctattttgacacgaatagaagtttatttgctcttttggtgtcatgcttcagtaactatcatttgtagcagcaatcagcaattagaaaaaaccggtttgatatggtccctgatagttaataatcatcattttgagttgttccttgatgctcatatcaatatacgtacatgctataggtacaagtcttatattcatgtaaaaacatgtctttccttctaatctgatttgaagcttaatatatttatttatttaaacaagtttccaagtcacctaaaaaatgcatcttattagaatttagatttggtacaaaagactatgataatcaggaatgaaatgatgccatctcttggatgccgtctgtttaatgtttgtggaaaagtcggtctaacctttcagcctctgtattttttataattttataaatttatattttataaatattttataaatttatactttataaatatattttatataatttatttttctatgttcattccagaatgttgcaattaattaatacagtggtattgtatttgcaatgtaggcacgtaaaaaaatttgaagaagggaatttcgcggcattcttggcctggcttcctggcgtagccagcaagttcggaggtgttaaccgctgctgtcatgtttcttttgctaaactgcatcgtcgctgtgtcccaaaacatgggcatcggcaagaacggggacctgcccaggccgccgctcaggaatgaattcaggtatttccagagaatgaccacaacttcttcagtagagggtaaacagaatctggtgattatgggtaggaagacctggttctccattcctgagaagaatcgacctttaaaggatagaattaatttagttctcagcagagaactcaaggaasctccacaaggagctcattttcttgccagaagtttggatgatgccttaaaacttactgaacgaccagaattagcaaataaagtagacatgatttggatagttggtggcagttctgtttataaggaagccatgaatcacctaggccatcttaaactatttgtgacaaggatcatgcaggactttgaaagtgacacgtttttttcagaaattgacttggagaaatataaacttctgcctgaatacccaggtrttctctctgatgtccaggaggggaaacacatcaagtacaaatttgaagtatgtgagaaggatgattaatatgaaggtgttttctggtttaagttgttccccctccctctgagaaaagtatgcatttttacattagaaaagggacttttgttgacttcagatctatggataattatttctaagcaacgtgtttttattcctcactaatcttggctatatcagataccatttatgaaacattcttgctataactgtctctccaagaccccgactgagtccccagcacctgctacagtgagctgccattccacacccatcacatgtggcactcttgccactccttgacattgtcaggcttttctaatgttggtagtatttattaaagatgaagatgcacatacccttcagctgagcagtttcactagtaggaaataccaaaagcttcgtacatgtatatccagaggtttgtagacaaatgttgcagccttttttgtaacagtgaaaaactgaaaacaacctggaagtccagtgatgggaaaatgaatatatttctgtcttagattggggaacccaaagcagattccaagactgaaatttaagtgaaagcagtttatttgctaggtcataccagaagtcatcaatcgaagtatggagaaatggaactgagaaggtaaaaaccagttcaaaatcagtgaggaggttctcaatggtaacgagctccatactgctgagatacagggaaacggaggggagaaagctagagtatttaacccccactccttggttgtcagctccctgtcctgtgtgtgggcagaacgtactccacctactcaatagcaagttccaggtgtttgctgaaagaagctgctgtaatgtacgggaacggtgaatgccaaacacttaaagcaattccatgtttaagtatgtaaactcttcatacttttttttttttttctttttaagacagaatttcactcttgttgcccaggcggagtgcaatggaacaaccttggctcacggcaacttcagccttcccaggttcaagcaattctcctgcctcaggctcctgggtggctgggactacaggcgcgtgccaccacgccaggctaattttgtatttttggtggggacattccatgttggtcaggctagtctcgaactcctgacctcaggtgatcctcctgcctcggccttcaggggtgctgggattacaggcatcagccactgcacttggcagatcttcattcttttagtaaaaagtataaagccacacatggtttatttgaaatattttataatttaaaaaagtacagaagcaggaaaaccaattctaggttcaagtgagggatgatggtagtttgaaccaaaggattgcatgtggtaagaaattgtgatttaagatatattttaaagttggaagtagcaggatattctgatggagtttgactttggttttgggcccactgagtttgagatgcctttgagaaatgaaagaagtagagagagaattaaaaactggccaggagtggtggctcacgcctgtggtcccagcactttggggggctgaggtgggtggatcacctgagaccagcttgggcaacatggtggagccctgtctctacagaagatacaaaaattggctgggcattgtggcacacacctgtagtctcgtctactcacggggctgagatggaggattcaattgagcccatgagttcaaggctgcagtgagtcgtgattttgccactgcactcctgcctgggtgacagaagagaccctgtctcaaaaaagaatctgaaaacaacggaaccatgccttcagaattctataaagttattttcaactgataaatctatattcaggcaaagaatcaagggtgaaggtaaaataatacatttttagacaagcaaagactcaggggttacatgtaccctttcttgggaagctatcggagaaaatactccagcaaaatgaaggcgtacacaaaccagagaatgacgtggatccagcaaatagtatccaacacaggcaatattccagctatggagctagctttaaaaagaaacagtaaaaatactaatagattagctgggtgggatggcccatgcttgtagtcccagctactcaggaggctaagcaaaaggatggcttgagcccaagagttcagagcagcctggccaccatagtgagatcccttctcttaaaaataataggttattgccagatttggggcatttggaaagaagtgcattgaagataaagcaaaagtaaaaaaaaaaaaaaacaaaaaaaaacaagggggaagggttggttaggcaataattaattctagggcaggaagaagtacaggataggaagtaagagcatcatacgctgtttttctcaacaatgggcaatatgtacatagtcataatgatgtggtgactgactgcttagcccctaaatctggtaactactttgggacaatatggggggaaaagtgaagatagtgatggtgtaagagctaaatcctcatctgtcatatcaagaaatcactatataatgtataacataatcaagaaatgactaagtagttatgtgaagaaaagaatggaacattgctagaagagttagaagtcattgctccagagaattaggagggatggggcaggggactgttaggatgcattataaactgaagaggcttttaaagattacatgtattaatatatgtattcacttgaaaaactaaaaaaatagtaattttttaaaacccatggaggtaactaccagaaggaaaaactaagagaatgaaaagtgctttcctctggaaagaacaagtcgcaggactgttttcattgtaagacttttggagccatttgattttacttaaccattttcatatatttctttaataaaaataattctatcttaataaaaagttacactcattcattaaaaaaagaattttaagactgtaataagaatcatagtttatttctgttagagaaaggcaatgtgttatacttggaaagaggtcatattaattttatcacatttttgggactcagcatctttatattttctgattttaaataaacaactttgcttatgaattttgtctgaatctctaataatctccttacaatgcctagttaattatgcccttagtttgggtaggttttcaaatcttattagttatttcttttttagattaccgctcatgtccacttatctataggtgtcttagtatcattttatttatatttgagataaccatgtcagatgttaaaacactttctcaatttttcttataaccatttgactttaagtgtgaaggtattttaaaattttttttgtgcattgtaaattgagtttattgattccactgctttcaggcttatacattttttccccgagtgaagccacttctgtttctccccttaccttttcatagtttgatcttttatgtttaacctcttaatctatctagaatcaatatatgtgtatcatgagaatgttaatggattttactccccatccgcaccccaaatagctaccaaagaacaaacaattctacattgagttttaggaataaaaactgttagcagcaaacttgaattaaaccactgcagacataagacattgagctgacacaaataacataaatcacattagtttgttttttgtgctttttttaatgttagcgttaaagaaccaagcagcttaataaggacgtacctctaggcaggaaacaaatttttacatatctaagcaattttattataaggtcagttggtcttaagaagtatttcagagtaatttatggaataactcctaaactatgttttatgaattttcatatttatataaaatgtgtcaaaacccttcatgttcatatagaggtttatgttgtcaaaaaggtaaggagacgctttgtagtaaaacaatatgacatcaagagagccctgagctccttaaaatatatggcagaaaaacaacaggaaaacacaacaggaaacctgtgatcaatgctacagaacacagcatagttataggcaatcttaggcttaaacgtcaggtgagattctcattttactaaatttcagggctccaatgtggtctgtacaaactccagcagacaatccactgtgtctaggaagtaaatataatgacttttatttttattaagctttatgtagtcttttaaaatttctttttttagggaagtgtatttaaaatgtacatagtgcagtagaacaagtatgttaactgttatgggctgaaatttgtccccccaaaattcacgttgatgccttaacccccagtacctcagaatgtgactatatttggagatgggcctttaaaaagttaagttataagaagtcataaaaagaggaaaatcgaacacacagagacagtgggggtgggtggagaaaaaaggccacgtggggacacaagacagtgtctatctatcaggcaaggaggggcctcaggagaaagcaaacccaccaacttgctctcagactaccagtccccagaactgagaaaataaatttctgttgtttaagcaacttgtctgtgatactttgttatggccaccctagcaaactaatacaataacataaacatcaatgtatattaaaaatgttttctgatagaagatattataataaaaacttggaaaccactgatccacttacctaggttgtaaatgatttcctcatccgcacacagaaggaacttacaagttaagccctcaacaagcaaatgaacttttttcctattttccatttaattataagctgatctctttcattaaaggaagttaatttctggctttctttttttcccccctcaaaaaacaggtatctattattctgtttctgtaaagataaaggattattgctattttgataacctatgccatgcttaattgaaaattttaaaatacttgaatttgttctttggatcagttggaatatacttcctgataaattaataaaccattattagcagaatctcagttgcaaagcatattccacttagcaaaaaaatttactaagtaaagccaaggatgataaagtttataagctacagctttatatgtataaacaatttagcttgtgaatagcttttgctacctagaagcatttgatttctttagttgtattctgcaggtgaactgctccacgatgttcacaggttttacatattaagggaattgtagtcttaatctggcatttataaaagcacttaattttaaacttgcagaaaacatggtacttaaataatttatacaatattataaatttgcctccctcactacaaaagtaagccaaactacatttctttctagtgttgtttctatgcatagttttatatttgaagtcagttacatacaatatcatgtatactacgtaatatgcattttacacataaaggcacacaagagcctcttttaaatacataaaaacatatctgttgaccaacagctttaacgcaagacagacatcaaatcctctaacatcatatggtgaaatgctatttgtagctgcatttaaaatcacaaattctttcccacatacataaaaacttgcagagagaaaaaagttttgtgtgtaaagtatcaaaaaaatgcattattttaatctactgatttaaactgtttttcaataatcatattttaaaatctttacctattttattacccaaaggaaatcatttaaatctaccaattgaaaagagaaacagaatattgatataaattatttttattgtgtgaaaatgtcaaaattcagaattaagaataaaagtataacatataacaaaataggcatttaattgttaaaatacacctggatttacaaaacattttttaaaatgtttttaaaatgcttaaggaataaaaattaatttttgagagagctatataaaatgtgaattctatattatatttaatttcaaaatcatttatttttattaaatgaagccagtagctacactatagtaaacagatagaaaacacaaattttaaaaacacgtatactcccaaacgagataaatattaaaaagatagcaaaagtatgagtttagttttaaaattaagtaaatgttacaaaaagctatgcaattttccctctaaaatccttttcaaagtttacattgtcttttcgtattgcttttca

SEQ ID NO: 93340 - DNA, 13535 bp, Homo sapiens
acagaaaaatgagctgggaaatagaacagtcacatctggccaagagagttgtggacttttgaggtgttgcctgggtctcctgggcagtagaatcagctgacccaatgtttaatagagaaactacaaattttcaaacataagaaaaccatgtaaaaaaaaaaaatcaatgggggagggggtgtttaaatgcatttgagaccagccatatgacagcgatttggaagcccttataacccttagttttaataacataagaattccctatgaaattctaaataaggctgggcatggtggttcatgcttgtaattccagcgcttaaggaggctgagttgaggtgggcagatctcctgaggttaggagtttgagatcagcctggccaacacggtgaaaccccatctctgctaaaaatacaaaaattagctgggcatggtggtgcgcacacgtaatcccagctacttgggaggctgaggcaggagaatggcttgaacccaggaggtgggggttgcagacagctaagatcgtgccactgcacgccagcctcggtgacaaggcaagactctatctccaaaaataataattctaaataaagcaaaataaaatgtatgcataaacatatatatgcaaaggtatatgtatatgcacatacatgcatacatgtgtatagatatatgtacagtatagcctgccagctatgttaaaagaagttttttgcaaagccaccttttgtgtatggaactgtgtgtgaaaaaagacttatagaactgtgagaaacttggataaaatgaggcatgcgtacttccccatctgaaatagccaagatgatgaccattcttataagtgaaagagttttttttttttgtttggggaagtgtttttttttttctttttatctttcattcctgttcaaattcttttttaatttacacataagaaaaagtggtctggcacagtggctcacatctgtaatcctagcactttgggagactgagagggaggactgcttgagaccaggaattcgagaccaacctgggcaatatattgagaccctgtctctatttaaaattgttttaatttaaaaaaatttacaataaataaataaaaataagaaaaamctcccaaatcccaccactctagtacaaccaaagtggccacaccatcacacgtgaggttgttcacagcatccttctctggggatgattctaagtcccttgaagatagggagcgtgactagtttgtctctgaatccctggtacctggaagtggcctgacccccagaaggcactccgatgacgtctgttgaatggatagatgagaatgcacataagaaaaagtgatttttttcctaacaaagtaaaatggcattccacggactttggggaagttggctccttcacttctagagaaaaaaggagaataaggcaggaattcaaaatactcttatgaacagaaaggcaacaggtagagcaggacatggagggattcatgaagggagagaaggaaggcagggaagctgggctgtgcaataagcagcaagcctgggtgttatttcagcctcccgagaacatgccagaatagacattgccattacctccattttcagaggaagaaactaagacaaatgaatcagacagaagacatgatgttcatctcataaatggacatgtggagatttgaacccagctcagctggctttgaattcagaaatctttacccctaagggacatcatgaagcaagacaaagaatgaaatggagggctaggatgatgactggatttcctgctgattgaaggaatgttgaaccaagcacatgtacttcaatcctaaccatacacagggaagttctttctgtatttggaagagctaagcggaagatctcagcactagtcccagcccctgtgtccatgccatttcagcactagataacaagatatatccatgtaggaagatggatgaggaaagcagggtggatctgtctcccccaaaggaaaccacaaggcataaacagcagcagtccccagaggacaatgtacacacaacctctttcctccaactctggtgttgaaactgccctgagctgactttaaatccactgcaggtagttgcatgaggagtacttacaggatcctgctggctctgttgctactctctatcatggagtcctgcagcctttgaataaatacctgccaggccaagctagcaaatagcacagtttcatgtctggaatttgcagaccagggctgaaggaagttagacaygcttctgtgaagaaaactgatattctgctgggrtttgcaagatccctaaaggtcccgtcctccccctgggaatcccagcagtttagaagattcctgaaagggaaaggagcagctcacctgagacaagcaagggccagattgttgaagccatcgttgccctgctgagcttcaggacactcaactcacagttgcagatttcataagcaacaaaaagaagaatccatttcacaggcatttttcagtgcctgtctgaccacactgatcaaggcagtgagggtacagaggtgcacaaaacgtgcaaagtgcctgctacagtgatgcttaccctctggtggggagagctgaagttctgggaaagtacagtttgagggaatgcctcatatgcaaaaggccaaccctgggctagatcctactcatgtatgtctcatccagttcctcccaataatcccaagattaggtactccttgcatcaaatcattttaaagaagagaaaattgagtgtattagtccattttcatgctgctgataaagacataactgaaactgggaagaaaaagaggtttaatggacttacagttccacatggctgggaaggcctcacaatcatggtggaaagcaagaaggtgcaagtcaagtcttacatggatggcagcaggcaaagacagagagcttgtgcaggagaattcctctttttgaaaccattggatctcatgagaccttattcactattgtgagaacagcataagaaagatccacccccatgattcagttacctcccactgggtccctcccacaacatgtgggaattgtgggagttaaaattcaagatgagatttgagtggggacacagccaaaccatatcattgggtctcagagaagtaattgcctcaagaatcacacagctgacaggtaacagagccagaactcaaaccccaggcctcctgatcacagctgccatgttgcacaaccctcatctcagaaggaatcagaatttgtgttcacggttacacgtgttcagggtcacacacttagtgtacgatgtagccggggttaaagctgagatgagccaactctagaccctagtctcttaaccactatagatactgctgtgctagcatacttggaaaccaccatatatgttcttggaaattcaccaagcacattaccatgttaggcagacttattactattctgcaatatctgcaagtaacatagaagcaaaaaaagcacataacacataaaataattacacatagacctgaggtagaaaacaaataatcagaggagaaggcaagagaaaggtgaagccaccttaggtagaatggtcaggaaacatcctttctgagaaaacatttaggctgagaagctaattaagaaataacagagaaaactaatgaaacccaaagctgattctctttaaaaaaaaaaaaaaaaacaaaattgataaacctaggtagactgatcaagaagaaaagagactatcagaaataaagtctggtgcattactacagactttcagatattaaaaggattaaaaaacccttatgcctataaatttgacaacctagatgaaatggacaaattcctggaaagatacaaattaccaaagctttttcaaaaagaaatagaaaccttcaccaaccctgtatcaattaaagaaattgaacccatagtttaaaaccctcccacaaagtaaacttcaggcccagatgtcttctctgctgcactctataaaacatttaaggaaaaaaaaaaaagagtcctacacaaattatttcagaaactagtgttcagaaggcaatacttcccaattcatgttatgaggatagtattaccctgattccaaaaccagaggaagccattataaggaaactctagaccaaccttcctcgcaaacatacatgcaaaagtgccccacaaaatatgagcagatcaaatagaaaaatgtaacaaaaggcaatgcattataaccaagtacgttcacaccatgaaggtaggctgaaatccaaagaacaagaaataatcagattacaaaaaaaaaaaaaataggaagaatgaataagacctaccatttaataaatagcacaacagggtgactatagtcaataattgaacatttttaaataacaaaaaatatataattggatcgtttgtaacacaaaggataaatgctcaaggggatggagacctcattttccatgatgtgattatttcacattgcatgcctgtattaaaacatctcatgtaccccataaatatatacacctactatgtacccacaaaaaaaataaatttttttttaattttattattattatactttaagttttagggtacatgtgcacaatgtgcaggttagttacatatgtatacatgtgccatgctggtgtgctgcatccattaactcgtcatctagcattagctatatctcctaatgctatccctcccccatccccccaccccacaacagtccccagagtgtgatgttccccttcctgtgtccatgtgttctcattgttattaaataaaaagaattttaaataaaaacagaaataacctgtcaagtgaagaacaacaagaaagttctgggcaaagggagtggcacacgcagaggctacagggtaagaaagagcttggcaaatttgaaaagttgaatggaaaccatttggaatagcatttaacgagttaggggaacgtggtaatggatgagactggagaatagacaaggctagatcacacaggacctcatcaaggtaaatagtttggattttttaataaattctaatggacgctattacatggtttttacctggggaatgtcgtggaactgtttgttttaataaagatttcttaacagaatatggagaagcaagtggcaagggggcaaagtggaagagagataccaatgaggaagctattggagtgatccaggggagtgatggcgccagccaggactggggggtgcatgggcaagggagaaaagtgggtaagtcaagggatatttcaaagataaaaccaacaggatttgctgacagactgcaagtatgagataaggagaaatcttgtagcaggttctggataagtgatcataaatcctactccgttttcctcctgggaatatttagtccataaaaaacttcccaggctccactcctttcacagctcaacacagatgatgtcagtggccttagaagccatatgttgaaggtggcagaaccaaaagatgaaaggagctgagcccctgaatcgtcacttgtcagagggccgccctctgaatacaaacatccacatttgacttcagacgagtaagaagtacatctgtggtggattcagtttctgctattcagggatgtatgtgttaaactaacttttcttaacctaattacttcagacaaaaatcaagaaaaagctagtatatcagctcgaccaattaagtggagctaagaatactcttacttcagctcttaaaagaactgattgaaatgagacagtttggaggctttcaagggatttgttcaattccatttctaaaaggaatctatactgagaaaataacagtaaatataaaggtttatgcacagagatgtttatcagtggcatttatattagcaaaagtttccatgaaaatgaccaaggcacccaacactaagtggttaaataaccaccactatgggcattaaaaattatgcttacagttcccaggcccacagcgtcagcagcagcggcagcagcggcaggcggccgcgcgggtgtttgtcgcttcgcggggccttgcggcagcatggcgraccatctgatcagtggcggcaccggctacgtgccccaggactggctcaccgtgcagcagctcttcctcggcgccaactgccgcacccacaacaacttcctgattctcccatggttcatagatttcatagctgatgaggtagacctaacttcagccctgacccggaagatcatgctgaagacaccactgatctcttcccctatggacactgagacagaggccgacatggccatcgcratggctctgatgggaggtattggtttcattcaccacaactgcaccccagagttccaggccaacgaggtgcataaggtcaagaagtttgaacagggcttcatcacggaccccgtggtgctgagcccctcacacactgtgggtgatgtgctggaggccaagatccggcatggcttctcttgcatcctcatcactgagatgggcaccatgggsagcaagttggtgggcatcatctcctcccgagacatcaactttcttgctgagaaggaccacaccaccctcctcagtgaggtgatgacgccaaggatcaagctgatggtggctccagcaggcatgacattgaaasaggcaaatgagatccttcagcctagcargggaagctgcctrtggtcaatgatcgccatgagctagtggccatcgtctcccacaccaacctgaagaagaatcgagactacattctggcctycaaggattcccacaagcagctgctgtgcagggcagctgtgggcacccatgaggatgamaaatactgcctggacctgctcacctgggtaggcatcaacgtcatagtcttggactcctcccaagggaactcggtgtatcaaatcaccatggtgcattacatcaaacagaagtacctccacctccaggtgattgggaggaatgtggtgacagcagcccaggctaagaacctgaytgacactggtgtggatggactgcatgtagttatgggctrcagctctatctgcatcacccaggaagtgatggcctgcggtcagccccagggcactgctgtgtacaaggtggccaagtacgctcagcactttggtgtgtccatcatagccgatgtggcatccagaccgtggggcacgtggtcaaggccctggcccttggagcctccacagtgatgatgggctccctgctggccaccaccacggaggcccagcrgcgagtacttcttctcagacagggtgcagctcaagaagtactggggcatgggctcgctagatgccatggagaagagcagcagcagccagaaacgatacttcagcgagggggaaaaggtgaatattgtgcagggtgtctcggcctccatccaggacaaagggtccattcagaagtttgtgccctacctcatagcgagtaaccagcatggctccatgatgtactcagragagctcaaatttgagaagtggaccatgtcagcccagatcgagggtggcgtccatggcctgcacgcttaccagaagcagctgtactgaggatagcagtggaggatgaggtggtggagggagcataccccagtgtccaccttcgggcacaacctctctccataactgagtggtccacagatttgcactacgggttccccagctcctttccagggagagaggaggagaggtcctgagggctctgcagcccctcgctgagcatcccctacagagtcgggcctgctccctgggccaggctgcctgggggcgccccccagcccagccagccaggctctcaggccctgcgcctgcctcaggtctttcttgctgcagcatgctccagcatggcccccaccccagggacaggaggccccacctggcttctcctgtagggtacctccctgcccccagcccccccaggaaatggtgctttcctggctctgcctctggctcttcccgggccgctgccccctcagccatgtggcacttctgagctcctgacctaggccaaggggaggtctctgcccccttccccggtcctgggctacccttgggtcctggctccttaggccattcccctgtccctggccccggggaggaggctgccctgctcatggccgcctgcccatcattcgtgactcaccaccgtccccatataccattcctgccctctcctcagctgcagttgaaggctttaactttgcacattttgggatcacagttacatcactgtgtattaaataatcagaataaataaaaattatgcttacagagattttgatagtaagtgaaacatgcagcttatacactactgcatgtataaattgtgtgcaattacaaataggtatggatatatttatatcttatgtacttgtataaatacagatacatacatacacatgcacatcaatgcacacatatatatgcagaaggaaataaatgggaaaatgccattattgtttaatatgtgtgacagcgttattgagttgaaaataaaatacactcagcattatttttaacaaatttaaaagactatttcatgaccttgaggagtagagtcttgaagggcatcttaagatttttaaccttagttgggcatggtggctcacacatgtaatcccagctactcagaaggctagggcagagttcaagaccaacctggataacaaagaccctcgttcttaaaaaaaaaagaaaaaaaaagatttaattagccatgcatggtggtgtgtgcctgtagtgccagctactctggaggctgaggcaagaaaaattgcctgagcctgagttcaacgctgcagtgagctatgatcatgccactgcactccagcctgggcaacagagcaagaccctgcctctaaagacacaaaaatagaaaataaattttaaaaaacaaatccttcataaaaccacacagtgagactgtgctctgcagcaatgccaatgctaaacactcttagaaaagccccacaggggagcctgcttggaaactcaagagagagttgaagaggttttgatccacccaagagattatgtgcgggtaaagccaaaaggaccccagactcgaagatgccagcctgggtgaaatgaaccaaatcaagcaaagcaggcagatgctgtaggccagtcgcccacagaagaatcataacctttcaaagcagattgtgtaaacacaggagagggaggaggaagatgtatcttctgtgtccccagaaacccgcaggcaccggtcccagcgatcccaggaagtgaatagctagtttgttttgggtagctaagaacactgcccactcaaccaaaataagagtgacttcttcaaaaggttatgaacccactgatttctgacagtatttcccaagaaggcaaacagagcccaaagcctgtgcttaaaaagctagtgatctaataaccaaagaatcacaaattaaagtgtcctatatgagccaaataggaacactggcaaaatagagaatttatgcttcatttaatggggcaaagtcacgcccccgatgtgccaggtctgcatgctgttttaaaaattttttgtttagatattttctatgtaaaactaaggttatttcacttaaaattccaattttcagtttcttcctgaaaacatggaagaactgtcaacactggacccacgtccccacatggcattaatccatcaactggcctctttcacttgtttaaaattattctctggttcatttaattttttgagtttgcagcccttgctgtgcatgttccttccctgcttaaaatgtgctgctttcaatgctctgttgcaattgtgtataaagtaaaagtaaactagcctggagagacagtcttaagacggctctcctttgtgtagaatacatggactttgttgaccactcttttgcatgatctaagtttttttttttcagcttactttgtaatttccttatggtttcaaaatgctggagaactggtctccaattagtgaagtatttctgggggccttctttaaagttacttgctataccatcaacatagtatttgtatgttttcatttgtaggtagtaggagagatgcttaaacaggaagagacagaagctctccttgttgaccccactcctctcttgtcttagatgccagaaacctatctggaggaggataagcagagcatccatccatgtgcacaccctggggcctgcgcccccccataaatcattatctgaaccaacaggacaggctgctgggacacccactctacttatcagagcccagcagttgtgcccaaggcaacagcacctgaattttataattctgcaggtgaaatttagtgcaaaccagatattcctgagacccaacttggcttccgcaactgtattctcaagctgaaaacattttgtgtgaatggggtatgggggcgtggggacactgtttctcagaagccttcattatttcatttctcaagcaaatactggggatggaaatatggagcataattactcaggactttttttttgttttaagaatgaccagaaatagaaccatgaacacttttggtgggaatgtaaattagttcaaccattgtggaagacagtgtagtgattcttctaagatctagaaccagaaataccatttgacccagcaatcccgttacagggtatatacttaaaggaatataaaccattccgtcataaagatacatgcacacgtatgtttattttagcactatccacaatagcaaagacatggaattaacccaaatgcccatcaatgatagactggataaagaaaatgtggtacatacatattatggaatactatccagccataaaaaggaatgagatcacgtcctttgcagggacatggatgaagctggaagccatcatcctcaacaaaccaacacaggaacagaaaaccaaaaaccacatgttctcactcataagtgagagctgaacaatgagaacacatggacacagggaggggaacacacaccagagtctgttggtggtggggaagggagagcatcaggataaatagctaatgcatatggggcttaatacctaggtgataggttgagaggtgcagcaatccattatggcaaatgtctacctaggtaacaaacctatgttctgtacatgtatcccagaacttaaaattaaatagaaatttttaaaaaggaaatagaaccatggaagcttaagcaaaatgaagcaaaggggaattacttcagttaagttttactttagagcagatgctaaagcaagaaactggggggacatggtttagttgggaggtgatcacaggaagtgtggtgaggaagtagaaaaataagacaggaaaggaaaagaagccagcagcagggaaattcatgggaaggttacttctggggataacagggatttaaccccacaagggccctccaataacagtgtaggacacacctcattactgtctccctgagcagcaaagaagccagggtatgccaacttctatccctcatcattaaagacagttctggggggcatttatttatcccctgccacttcaggtctgccatatgcaggagccaaacacaatcgtatggccagagaacattcttaggcagagagatgcctgtgcttgaggtgagaagccatcactgtgttgggaactgtccatctaagcttcaggtgaccctcagggtgggccaagaggatatgagtggggcatcaacaacatagctacagggaatattctagctcaagtgactgaaaaaaaaaaaaaaagtagctaagcttactccatgcacaggtgaattcaggacccaaaatctgtcatctggatttcgtgttcctccttcttgctgttctgctgccacacagttggctctagttgttggctccaattgttggctccaagtggaagcaagatggtagcagtgattttattccctacatcttttcaggttcacttttaatagaaaataccaagtcttttcccccaggagctcttatctttagagacgcatattgaaaagtatagagatgaaatgataggatgttgggaatttgctccaaaataatctactgtgggtggcaataaaatgaattaagattgtccatgagttgataaatgctgaagctggatggtgagtataggagagttatctctgcttatgattagagttacctctattttcatgcattttggaaaatcatcataataaaaagttaattttgaaaaaagaatctcttttactcaagtttgaggtaaagtctcatttcacctcactgggtcttcctggaccagataaccatccccgaactgttcacagggaccaggagcatataatgaccacattgttccagcactgaaccatatgctccatctctgcaccaggaggaatctctacaaaaagctcaggggctacagctggggagagggcttaacagagattgattacatacaattaccagaagaatggaaatgagtgttaagataaaaaatacacaggttcattccataatgacaatagaaatatagtggacatagaatatctttcctcatcaagcatccattctagttttttactgaagaattgtccctgcttgcccctttatccctgtggactgggcaccccttgtgctaatggtgcacaagtgacttggtctgaacaatgagagggagaccctggtgatgggtgcagagatgagcacatggcactggaccagccaatgataatcttggggcattctctggagcccctcttccttctgaggtggccaagttgaaggatgaacatctgttgtggctggtgttatctttgccatcacttaaggagaatctgccaaagactgagtctgacagaggaaagcggagcccaggtacaggaagacgttctcgaagacattgttatatatctgtattcagccgtgctggaagccagataccctgaactttttagttacctgatcaaataaatgttcctgtttggcttcaggttctcatttagactcctgtcacttatatctctggctaataaagggaactatggtcacccccaccccaccccacgcagcaattgtagtttttcccgccccgatacttgcgacatcaatgtactgctgtgggtacagctctacaagcacctgttttgcaattttcaggttaacaagtaaaatcttccttgagtgtatacctctaagcctgtgaacaatatttctcatccattcatcccctctgaaaatattttacatgcccaatcctctggtaggtaattaggatatagaaattgggcacaatctatgtcttccagtcctggtatggcggagaagaaaagattcaagtagcagacagactgctgtatctaaaaacttgggttcttttcccagctccatcttaaactgtgcagaaagagaattctgctaaactctccccactgctgaataaagtgtcctatgtgaacaggatcctgatggtaaattttcataaccagagactgtcacagaattttagccaagatgagccattcaatattgatttattctacttgatcggaaatcatcagtagtccaattgtcctttctaat

SEQ ID NO: 93341 - DNA, 169483 bp, Homo sapiens
cacactgtaaaagaattctcatggtggtcggggtttgtagcatgaaaagatggtttctttcctttacaatgaaaagaattaatgagtttttttttttttttaagaaaaaaaacctctagaaataactgacatttgaaatactttacacaaaataaattgtcaattttgttgttactgcccacaaatacgggaacccttagcctccaatcaatgaagctagagtgtctagttgcaacatatcatagctttcaagatttctcaaaacagagaacagattttcataagtatatctgaaaaaagcttctacagaaatgtgagtctcagagaatcccccaagaggaaatgtctcacatacacacataaatagacaacctaaaaaagcactacgtcttttcaaagagatgttaatagaataaaatgtaaatttatcttaaataactaaaaagctagtataaaatcaacatttgagattcccagaatatttataatatttccaatacaaaccggttagctttacaaataagtgagaatccaactaaattaaaattcaaatatgactgaaatgtacccatgttatccaagaaaaatcaataaccttccaattcctgaagctggtactttatctgtgaagcagtgttgtatcatagctagacagatcacatctcaggccaaggtccacactagctactttccagctgtgtgaccctggctaaataaactctcagcttcatttttttttcttttttttattctattttattgagatggggtctcgctatgttacccaggctggcctcaaactcccaagctcaagtgatcctcctgcctcagcctcccacagtgctgggattacagatgtgagccaccacacctgggcagcttcacttttcttaaatggagataacagctcttccatcaggtcatgggaagactaactcaaatcatatcaggattcagctcatctcatgcctaaaacatatgaaagccgatgtattaccttttcacgggatctccccgttctcaccctcatgcactctacagctctggccaaagccttccgcaggtcatgattgttttttcttagacctcaatcagggtttctccttcatcctttcaaggtaaagggtgagtcatcttccacctacagtagccatcttaccaccacattcaaacatttaaatccttcaattcctttcaaggcccaggagaaacttaaatcctctcaagcccaacacaaacactacctcctccatgaagccccctaattccttcaggtcaatgtttctcagccctggctctacccaatcatggagagaatttttaaaaaaaattaaacaaaattatctgaagcctgggccttagcactgctgttggtctgaggtgtggcccaagcatcagggatgaagtgacctctccttgcactgagaccccacaacgcttcagcagccctttgtacaggatggtagaaaagttattgctgttttcacccttaaaagtaacggtcaaaactgcagctactttcaccaacctaatacctaattttaatcatatacaaatgcatttaaagtataaacttctggaaaacaggatcagtgtttgatttatatatygccctcaagttaccacaacaacagtaacttgaattgctaggctgccagctatctcttgaatgcacaggtaaataaataacatttcagtgcctctggaatataggattcaaagtcatgatttgaaacaaaaggttatcagtacctgaataaataatctccatttcaacagctcagctgttaagttctacttatataactcagccaatgcataagggaagaaatgatttattccagacagagagaaaacatcactaaaataaagctagtacagggctaaacacttcagtggtccctcccttcccacctcctaccattctaaaacacttaagagttctctaaatagatcaagcacccttcttcctccatgcttggatatacactgcaatctttaaccacattcctcatctggcttttacttctcattctggaaacaccttctacgatggaaagccttcccataggtgaaactcctggttcaatattcctcttccctattcctttagcgtttactaatattactcatatcgcagcaactgtcaaaaagaaattattggccaagtgccacgactcacagctataatctgagctctttgggaagccaagacaggagaggcactgaggagtttgagaccaccctggacatcatagtgaaatctcatctctacaaaaaaaaaaaaaaacacttaaaaatctgccaggcatggtggcatgagcctataggcctagctactcaggaggctgaggcaggaaaatcacttcagcacgggagtttgaagttacaacgagatatgatagcactactgcactccagcttagtaaacagagaccctgtctctataaaataaattattgtttcgcttatctagtcacctacaagtttcttaggggtggggaagctctcatcactgtgactatatcatcttatataatatatggtacttatgggccgggcgcggtggctcacgcctgtaatccccacactttgggaggccaaggcagctggatcacctgaggtcaggagttcaagaaaagcctggacaacatggtgaaactccatctctactaaaaatacaaaaaattagccggacgagattgcaccattgcactccagcctgagaaacaagagtgaaactctgtctcaaaaaaaaaaaaaaagaaaaaagaaaagaaaaaccataacctatagtacttaggaagtgttcaataaatgctgaaggaatgaacgaatgaggaaaaagtcttcagtttgttcatctgtacaaatgaatgagttgatatctaaggtcttcccccttccccttcgtgttctattaaaatgaaggatcaatgtataatacttggattcatgtgtggtgtagaatagaataatttctttttgttgttgttgttgttttttctttttggtagacagggtctcactctgttgcccaggctacagagcagtaatgtgatcatggctcaatgcagcctcaacctccagggctcaagcaatcctcccacctcagcctcccaagtagctgggactacaggcacatgccaccacacccagttaatttttgtattttttgtgtagaggtgaggtttcgctatgatgtattttttgtatagatggggttttgccatgttgcccaggctggtctcaaactcctgggctcaagcaatccacctgcctcaacctcccaaagtgctgggattacaggtgtgagccaccatgcccagctgaacaatttctaaataatatcgtaagttactactactatacaaattttactttatacatcattttgatatttaagcttaaggacagtaaattgttgttacactgtttattatgattagagaaatttctcttcacaaagcattaagtggtcattaacaaccctaattttaatagaaggtaacacatgatcttccataaagaactacaggtagtcgataacttttgataaatgaatactaaagaaatttttacgttttgatgcctaaatggtacctcctgttttacagatactctctaagaaaaatttcaacccagaatagaatgactattaaaggacgtatgtgtaaggtccattcttcagcttctggcccaaatctacttacaatctcaaatcgagttattttttttaagtcatctccgcaatgaagatgtgcaaaagtgagatgtagctacggaatgattattttcttttagcctctccaggcaatgatgtccaacacattggtaaaccattttaaataaaataataaggtatttttatgaagacttggctcagaattaactgggaagcctatcactttcctaactgcaaccattgctcgtactaacagaggactaagctacccaaactatttaaactatacatatttatttggaaaagttttatttgattacaacaaagttgagtaatttagatacattaattatgtacgttaatgattaaattccttgataattaggtagaaacaattgtatatagtaattattccaactttactctcaaaagcaaaatataataaaataatgtaatctttgctatttttaaaaaagccaaaataatcttcaagtttttccttttcactctgatagcattctctatcagtaacttgcattaatgttgtagctttgaggtgccgcatatcatttcatatcactggcacacaatagtgtatcaagagaaatcagctctgaatcttactctataacaatgtgcaattgccttggtcttggatcctttaagaaatagcaaagggaaaactcaaaaaagtcctttcaataaagcagaggctagatttgctcaatgacctgaccaaccagaaagtaatagaagttttgctatcctgtttaaaaaataataataaacaataacagacatgagattttcaagaaatcagggaggagacttaaagatatcttaataaaagtattttctcttcagtgccttttaaaaaatgtcattgcatcaggattagtaagaatatctggatgcaaggacaccaggttgcaagtacactaaagaatggtaaggtcagagaagtgttttttctgcctttaaagttcctgaaaatagaggctgggcgtgatgactcacacctgtaatcccagcattttgggaggccgaggcgggcggattgcctgaggtcaggagttcgagaccagcctgaccaacatggtgaaaccctgtctctactaaaaatacaaaaattagctgggcgaggtagcgcgcgcctgtaatcccagccactcaggaggctgaggcaggagaatggcttgaacctgggaggcataggttgcagtgagcccgagatcccgccactgcactccagcctgggcgacagagcgagactccatctcaaaaaaaagaaaaggaaacagaaaagttcctgaaaatataaagttgtttagacatacagcaggtatatcgtttcaaaaccaaatacactaaagcagatgagaacacaaccgtgaccaagtggttcggagaaagatggattttaatgcaaagttgttttgttttcacgcataacgtacttctcgctgtgcttgagtgcagaaaggtgtggttcttcctaaggttgattacataaagcaagattccaaaaacaagaaaagtgctttgcaaacacagtaactaggactggctgaagcttcctgcgtccagtgccatgctcaaagatcagaacaagcaactttatccaccactttaataagatgattcaaaaaagctgcagtcttctgaagaaagccatggttgaaaacttgctccgcttcttggagaaagcctaaagccctaaaggtctctaattattctccaaagtctacaacccaagctgcattttatgcatttattaggttacaaaaccacgggaactcttcactcaaaagcaaaaacacatccggaaagaggaaaaaatccacggccaatgtaaaccccctacaacaccaaccgcccacgtcgtaccccaggctgcaatgaggccggcactcacccaccgctcgcccgggaagcccagacccaggtgtttcaaaatcagaagtacggcaggctcgttcgctctcacgggcaagaatcttaaaccccaacttcagagatacccgcgcacgctgggcgctgccattttgacagaaagcgggcctgccccagaggcccctacgcaggtcgccctgagcagagccggagtgccacagaacccctagctcaccacctccacacccagacgtcgcatcccccggcctgaggaatgccaagaaaccccaccctgccgaccaggatcgggcggagtcaagtcacccttgaaatcccgcaagctctctcaggcagcgccgagggcgaccgcagccggcgtgggaggggcatcggcggtcaggggcggggcgtcggtgcggcggccttcggtaacccgggcaacgcggcctcctggaggtaggaaggggcgctgcccccgaaacacaaatgtctccgccaagaccccagacggttcccaaaggctctccgtgatgcaactgcacgtccctcgaatgcctgggcctccgatatccgtccgccagsagcttggctggatgcacgggcggccagtcctcttatttccccgccctcccgccgcgtggagcggctgctgggtyccgagcctccgggcgggggcgggatcggggcggggcggaggcatctccctcccagcaccgcccccttagctgccccgagccctgcctgcgcccgcccccgaagcggcgcgggacgcctggcgcygtccgcgatccgcagggctgcccgcttaggcttaggcccggcccgctggcaaagccgagccgcagcattttatttcgttcgtggtttccgcacaggctggagtttcgtgggttgggtcgtacttgggacctcggcgaagaggacccgtttatttttttttctttccaaaatggcagcctccagtcgcgcacaagtgttakctctgtaccgggcgatgctgagagagagcaagcgtttcagcgcctacaattacaggtgacccagcgggcaccgggggccgggggcggggggccaggggccggggaccgggggtgcgggcygacscggaatatccccggggactgggagccaccgtggtttgccggcggctgcgaggcaaggaccgggctccgccatcgaaaagcgtgctcctgcctacaggtgtggcctctgagacctcggggaggagcctttctttctaccaggggagacgttcatgtcttgtgacgttttccccctaaaggctatcttggtagttattctaggagcatgattagtgttatgtttctgcagaagagaaaaaagggatggaaatcagtcatttgtgaagttaaggccagtgtgttgcatatgtaaaacttcccttgagcactggaagagttgagagtggaagtggccagtgagtagtacactgcgacaaagctgaaggcacactctagcacctccctaaaatttcctaggtgtcgtaatgagttcttttggttgcaagaatccattctatttagggtatggtggaaatgcgtagcggaaaaggaaaaagggtctcacaagctttggagctgaaacctcagtttctcctggctcaccagacagagatcccgcttactggaccttgacagcaggatattgagggcctaaactcacatctttaatataacacattcactttttctcacgcctccccactcccctatttgcctatgagtcttttattgttactctttgtatgttttttctaattcagagcctctgctttcacagtgttgctggttctgacccatcattttcttatggattctctctctgcatttttttttagatttgttttttgttttgttttgtttttactaactacctgtctctctctgagtttgagccatattcccatgagaaagaatctggttggatcaactcatctctttacctcaagcctcacttaggtgactggccagactgtggattggatgtcataagagcagagcctacccttggaacacacctggttagggaggcccccctccagcacgtgtgtgagctggcaggccctgagatgggtctgcccagtacaacctctgtcagaggacaggaacgctaagcctcttaagcaatgactctcaaatttttagaaacccgcctggaaaatatactcatgctgcaaatttgaaaacagcatctgggtcataccactgaggttgtatccacccagttaagtggttaaatttcacgggagagaatgattttacttaatgactttgactttggagaataaagagtgtaataataagcatactggtggaattttagcaagaattaaccaaacacctagcaccaagtacttaaccaagtctgttgaggaaacacatgaaatatgcaagttaaataaatagaaaccatttgatttcaccatagtctggagtaaaatagtttgtcattaaagcttactcaggatacacaaggacttggaatcagcaggcagttcacacactaaggaaagtggcagggagagggtttatgtgagagcatgtaagaaagtcaaggtggagccctcgaagactaacttggacaagtctctcaatctctgtatttcagttttcttgtttatgaaatagactgttggactagacaatctctaaggacccttccatttctgaaattctctttggaaatgatttatgagcaaatgaggcccaagcgttttcaaatgagtaattgccaactgaacaggaaaatcattcacgaaactcaacaggaaaatcattcaaactttaggaaaatcattcaagactctacctgaaaggcagaaaattgaaaatgggtttcagtatgggcaactgtaagatcatatgcattcagaaaataattgatcaaattataccttaagcatatacttttaagctaaatttactatccaaatataaatatattatccaaaggartctgataatcattttatactgttacctgagatcatagacctaaaaaccgacattcctgctattacctccctagataaacttacttgttataaaaataygtccttttacattaaggctgtgtcttgtgaatttcaggaaaagtcccttccctcctctctaatctctgcagctgtttgtcactgatggcaaatcaatagcaacacaacatccactatcaattctgtgtgccactgctatcttatgttcttcatgtctattaacacatttgttttgacaataatcttgtgaggtaggtactatttgtattaccctgtaaggcaactgaggcacagggagcttaagttacctatcaaaactaacacaggtagtgctgaataagcaatcaaaagcagactagtaaacgttttttaatgacctgcgaattgtgccttaagtaattagagtagtgaaataaatactttggaactctcttgcaagacctataatataggccacgttttgatagcaggagccctgtctgctcctccagtctcagcctaagtcccacatgtgcatcctgtcctctgtcatcatcagttgcagtttcctaaatgtgccacgtcctgttgggcctccaggcctttacaagtactgttctatccagcaggccctttatcactcctgtctagagtgccccctcttccttcaagattgagctcaattgtcaccttctctgaacaaaagttttcccaactctcttcatcccacagcttccactcccatccctcccaccagccaaacaggtctcattgctgtgtgtcattcttttacctcagtgcttctacaaaacatctctgaagcatgctttgsccagtgctatatcacagctatccccaaccttcttggcaccaggaaccaatttcatggaagacagtttttccatggaccgggtcaagggaggggatggtttcgggatgaaactcttccacctcagatcatcaggcattagattctcataaggagcatgcaacctagatcactcacatgcacagttcacaataggtacacctatgagaatctaatgccgccgctgatctgacaggagatggagctcaggccataatgcgcactcacccaccgctcaactgctgtgtggcccggttcctaacaggccacggaccagtactgatgggttggggacccctgctataccaagccctggagagagaaagatgagatttttgaactaagctaggcacctgttatcaatggctttacaggcctatgtgggacacaggtacagagatagttgtcacagactgggttaagtgctgtgacagaaggatgtacarggtgtggaatctagaaggcctcccaaggggtgwtgttggatcaaaggcatgaagcagcttggtgtggtcaggcaggcaaacagcacagcactgccagggaggtaagtrtgatggggttgggggggcggtgacaggaaggcactgaggttggagagggccactgatttgagggcctgggggccgtgctgaggaccctggactttacccttagctcacaggcagccactaacctgacatgaccagatttgcattttctgatagatcactctggcagcagtgtagaagatgattttgaggggccaaggacatcaaatgggagttgattacaacagtgcagagtagagattaggacgctagtaaggacaggaatagtggragatagagaagaatgttgtatttgataaatcattagaagggaaaattgttggaactggaatgattggattgaggactaaggaagaagagaatccaagcagagtctagaatggcatccaggtttctggttaagctaaagcacagagagggtgaatttaaacttgcaccattaactgactcaggtaatacagaactagctggtcttgtggagagagggttttttagttcatatttagggtatcttgggtgtaaatttcccctgggatgcccagcagaggtagttaatcacagggctctgaagctcagaggagtgatgagcactgcagtagtcagcaccaccaactctgtgtgaccccacgcaagtcacatcactctctgttctgcagtttctttataaaatgagagtcataattgatccatctcacacagtgtaaaagggtcctgagaccaataagtttaagaaccacattcttttttttttttttttttttttttttttttttttttcagttgaaatcttgcccttgttgcccaggctggagggcaatggtgcgatcttggctcactgcaacctccacctcccaggttcaagcaattcttctgcctcagcctcccgagtagctgggattacaggtgcctgccactacgcctggctaatttctgtatttttagtagaggcggggtttcaccatattggccaggctgatcttgaactcctgacctaaggtgatccgcccacctcggcctcccaaagtgctgggattacaggcatgagccaccgcgcctggccaagaaccacattcttaaattttgtcttcttggctcttcttcagccaactccttcaattctgatgttccctagaatagcatccgtagccactaattttctcaccttaaactaggatttctcaatcttggcatgaccaaccttttgggccagctaattctttgttaatgggggctgtagtcrgcaccactgtggtgagttaatacacatcaagtacttaggatagtccctggtgcagaataggtacttgataagtggaattatcatcataagtcaaattaaaacctagatattagatgaattatctaggaatactatttaggttagtagttctcatcctggggtgattttatttgacaatatctgaagacgtttttggttgccacaacttggaaagggggtgctaggcatctgaggccagggatgcacaggggacaacccccattaacaaagaattagctggcccaaaagtttggtcatgccaagattgagaaatcctagtttaaggtgagaaaattcgtggctacggatgctattctagggaacatcaaaattgaagtagttggctgaagaagagccaagaagacaaagtttaagaatgtggttcttcaacttaactggtcttaggccttttacgttcttaaatattactgaggaccccaaaaagctttcatttatgtgggacgcatttatcatattagaaaaaaaaakcttttaaaaacacctattttaaagtgactaaatccattatgttaaataacacttttatgaagaataaccatttttcctccccctaaatcagcagattgatagtttgacactagtgcaagtctctttcatgtttggcttaatagaagacaactgggtgcttatatttgttgctatctacaatttgttgctatatcacatatcacttagtgtctagtaatttcccctgtatactcatgagagaatgcagatgtcttcctgataactatgaaaatagttttcctggtggatcccctgaaaggtctcagagacccccgccatggtcccttggctaactactgtagggttgaagaaatgggaggagatcaagtaaagagtagtgttgcagaagtcaagatagtcatatgtttggggaaggtagctgtggtcagcagggtggcttgtctaagcaatatccagttcataaagagggcaatgtagagcctctggtaccattaccagagcagcattgttagtcaagtggttatggcagaacccagattgtgggggttgagacatgaatcagaagtgcgtaaattgctrccgtgagtagagataccccctccacctcccaccggaattttggttaataaaacatgagagtagataaccgatagagcaggaccccacgagaggtgaaaagtggtacctgagagcacagctggtggggttggtcttggacagaatgaacggtatttcattttacatgagtggaatgaaggagaagagggcaagttggagtatgagagggtggaaagttgagtttatttgtgccaagcctgacagccagtttctgggttaagcgggagataagcagatgttgaggaagcacctgttcttacctttgttagggcacatatcacacatacacagttaccagaaattctgtcttatctctattcctagtgcttagcatagtacctaggtagcaagttggtgcaaaagtaattgcggttttgggccatgaattttaaattattataactaggatcaaatatatctttattaatcaaaataggaactattacaatcaacatgtttttgccaacaagaaataagtttattcctgtggcgtaaaaatccgtgcttcgggattctacaaactcttggaaagcattttcttcatcctgctagtcaaggaagcgttttccctrcaaaaagttgtcgagatgcttcaagaagtggaarttggttagcgagaagtcagatgaatatggcggatgaggccaattcgttcaacttgtgaagygttggttttgtgacatgcagtcaagggtcattatggagacagttgggccgtttctgttgaccagtgctggctgcaggcattgccgttttcagtgcatctcatggatttgctgagcatacttctcagatgaaacagttttgccgggattcaagaagctctagtggagcagacaaccaaacagtgagcatgacctttttttgrtgcaagtttggctttgggaagtgctttggagcttcttggtccagccactgagctggtcatcaccagttgtcacataaaatccacttttcatcacacatcacaatctgatcgagaaatggttcrttgttgcatggaataagagaagacaacacttcaaaacgatggtttttttttttttgctcagcatgaggcacccacttattgaggtttttcacatttgcattttgcttcagatcgaacgaccatcgaatggtcaacattgagttctttggcaacttctcgagtattgtaagaggatcagtttccatgattgctctcaattggtcggtgacaacttccaatggccggcgactaggctcctcatcttcaaggctctcgtctcctttgcaaaacttcttgaaccaccacagcactgtacstttgttagcagttcctaggccaaatragttgtcgcaagttgtcgctgcagctttttgaccaattttgagctcaaataagaaaattgctgaaatttactttttgtctaacattatttccatagtgtaaaataaacataaacagcaagtcattagcaaaaaaaaaaaactgagaattgcccattaaaatgatgtataacataaccacatttatttaagaatttattccagtatcaaacagcaaattccagcaatgcaaaaactgcattccttttgcaccaacataataaatattcattgttgaaatgcaagagaaaattatattcaatgtatccctcttatagcttaagaaatatgttattgtaaaacttgagaaaaggctaaagtgatgcccaaatgcataccaagtgtagtgtcagaactccctaattcttcatcagatatttgagtttttattaatgtgttatacactaagcattgtgcaaagagcttcagatcaaaatgagcctcctattaagggtaaaacattacaagctcctaaagaagtttatcaatgaagtacaaaggaaaggccatagaaaggagctggtctcctaagtgccaccttaaaattaggaatgcttttgaccagaagtcataggaagcccttacacagggcttaattgggggcttattcttctcacataggaaaggtctagaggtatgtagctgccagagcttatttagcagctagaaaatgtcaaggtatgtgtgagtctcggtgttcytctcatgcttatgcctgatggttgcaaacagcttttgaagctccaaatacatccttatttagtcaggaagaagaagggcagtcacagccaggaaagggtaaagctttccaggaggactctgcttttgctcattgaccaaaacttcattacgtttatatcactaggtaaacaacaggctggaaaattaggatacagctattctagcatctctagtgaaaagacagcagagagaaaackgtgggaagaactattgattaggcaacagtckgtgtcagccacagaggtggacatgcgatggaagagcattccaggcaaagacagtaaggcatgtgaaaagtaaaatgcaaggcgtgtgtcagaaccagacgtgggtaattgtggctgaagygttggactgagctaaatgtcatgatgttaaatgctaggtaaaatccccagtaagtaacgaaataggtttcaaggcagagtgaggcatagagaggagaagcaacttgattggtctcacagttggtcaagggcagaatgggattagaaggccgcctcgctccccgtgggctgccgcttccacaaccccattcttttcagaagaaaattcctgcacccatgcatcctgtgaataagcctgcaaaatctgtagaaacatcaacctggagaagtttattttcacagttcctccttataggtgaaatggttaaacaggctccctagtttcatgagtggtaaaattcctaagtcctgatcaacctaagtgctgatcaacgtcaggtctcgcttactatgtastacacaactgaatgaaacactgatatctgtgattgctgtcttaatgaaggaaccaaataatgattystgtttaggaatctgttttctttttgagccaytggaactctttaatatattaccagtcgcaatccagatttattggcaagctgaggaattagaaccatgagctcctggagtgggaaccaggcagccctctcactcatcaaaggatttctttcacatgttttccttgttgcggatcttttaacagtgactgcctcttccaccctatgtgtcactgattgatcaagaaggctagcatgcaatgatacagtttggatgttgtctccacccagatctcatgctgaaatgcaatcccccgtgttggaggtggggcctggtgggaagtaattggatcatgggggcaggtttctcatgaatagtttagcaccattccccttggtactgtcctcacaataatgagtgagttctcatgagatccrgttgttttaaagtatgtggcatctccttcctcgcttgcttgctcctgctctggcctgtgatgtgtctgctcccccttcaccttctgccatgattgtaagcttcctgaggcctccccaaaagctgagcagatgccagcatcacaattcctgtacagcctgcagaactgtgagccaattaaacctcttttcttcataaattagccagtcaatgtgagaacagactaattcaaataccaccctaatatgaatagtattaacaagcacctttcactttgtaaaacagggcagctacagtgaaagccttcatgccaaatattcttctggagacaaatcaacaaatccatttcttcctaatatttcttgaaaactcacagtgtgtgtgtgtgtatgtatatattaccacactagaacctagtaataggtggaatcaaacacaagatggccctgctgtcacaagattgtagtatggttgcgcatatgcaatgtacatataaggacggctcaagaaacttacagaggaagcatgcaaattgaaatagtgcccgaacagtggagatttgcagaatgtactggggctgaggagacaccttgcataatgatgttttggctgtcatatatcgtattacagaaatattttttaaataacattgtattctattttaagcagccaaataagagttttgctctctatgaaatgttgaacacatcatacatgtctgtaaaaattgctttcactcttttattataycatatgtaagaacatagtaaaggaagggaaaattaaaagagaaaaagactgctttgtaaaattttctmagttgtttccatatcagttcttacgtttgttctgaatttatattactggatttcatatagagcctgtggcgctgtattacaaagaactattgttacctgacctcttcaacaatgcwccacaggcaactagaggtgattcatgtgtgcctaaaarcagtttcttagacttttgaaagattattcattattgttaaatatgctggagtttccaaaaaamatttttttctcttacattgctaagttctgccaggtttaatgataatggtttcaaaaaataaaaatagtacggttaacttagagtagaaaatatttaagatatttagattgagaaaattatatagcagccaaggttttggggtgaaaaataacattcttttttactctagatattaaagcaaagtgttaaaaagttattagatctgcgtgtcattgctgatttattgactgtagtttacaagagtttctaaattgcacttattctatttatactttgccttggcctttaaagcatttttaaaacttacaaaaatacatatagtaaaatataataaaataaaatacttgttataattaaaaaataatgagggagtcaaagcaatgagaaaataaagatagagaatataagaaaatgaggagtaaagttaggccaaaaagtacaattataagtaaatagaattttcttaaagtatctctaaattattctttgttgcagtaggataatactcttttgtatgctaagtgtgattacaaaacattctgtttgaaatggctataatgaacctaatagaaaattacctcttaatgactcatgtcaatagtcatatgcagactttgctgaggatgaaaggtacttcatgtcatattacttctcctgtatacccctttcttcacactgaatcccacctcatcagatcatagatttcatttctcttagtatttccccaatcaactggtacctagccaatttaggaaagttctgaccttcagaaaccaaatgaagtaataaaactaggtaagttacatgaaccaagctgagagtttctagatttagcaaagttcagctcagttaaggcgggtcctcctggctgttgtckggatctgtgataggaatgcaagttgccaaggttatgacataatgtatcactgtgatatcttaatcatctgtgtggtttcataggttctcattggaattctgtttgattgtattaatagttctcttaactcagacgttttgaggttaaaaaatagatcgcagaaatgatctttcgtgataaaaaaarcaaaaatcacagtgacttccttctagaaatttcccctaattttcttttcaccctatctttccccaaaattgtgactcctgaactactttgacttacatattattttcagtataatggatgagtatcatgagtgaggcagtcttgatttagaaagatttctggcctttaaattaagaaaccttgactcaaattttaggccaactggtttttttattctgtgaccttggtataaatcatttactcgctgtgtgtcatctgtaaattgagactactacagttgcagaactttctagcagaatatttggtattctagtaggtactccaaaatcatttctgtatttcagcagatacagatgaattaattactacatagttgtctcttacactggtagtccagctgccaaatctttgaaatttctcatagctaaccgtcactttgccaattcagttaaatttgttgaaccatatacttaaccagatatttattagtcatccaaagaactctgtcactgtaatatgtagctttgatatgatgcttgtttgatgtttcattcagcaaacatttattgggtacctgccttgcgccagactcattgttccttgctgaggatgcagagataaacaaaacataacctttgcccaagaggcacctgtagttcggggcatagactgatagattccctgaaatttctacaacagcatggtgacaatataccaatagtgaaatggaacagaatattgtggaagcagataggagagacagcagcctaacccgaaaggggatcrkagctgaagaaagcagtggtggctgacctgagctgtgaagggctagtagggactagctggggaagggaggcaggagcagatgagaaacaaacagtgtagttggtgttggctgtaaggaactactagcactctgtgttgctgatggcatgtagtgggagatgagggtggagacaggtgggactactaatcacagagagctttgtatgctgtgctaagataagatgctagaacgtggtcctcggcattgaaaagccattcaggtgttttctgcagattgcagactctcctttagctagctcaccccatatagaaaagacgcggaagacatagaggccagtcaggaggccattgccctagttgagtttactcagatgtttscagaggcctggctacagcaatgtgacagcacagggagaaggggactggctttgaggtatgttgataaacagaattagctggccttagtgtttggttgaatatgttggattagagagaacaaatcaaactaaggttatgagaatatcattggaagaagaaaagttattccaaatgaagcatcaaacgtagaggacactgccttcttggtatgaggaagacatttttcttgagtacctttgtgtacagtatcacttcctgagagcatctggacattgcaggcatgatcttaaagcaggtacctggatctgggtgttaacttaatgtgtagccctctatatctgcttatttctctctttttcatccagtttttatgtatattttctatattaatgttaataatttgccgattaattataactatagtaaataactataactgtaaactattaatgttcatcattgctcaattagttgattatgtctgctctcagagtaatttttttttatttaatggatggctgctgccctcattagacatcactgatgcatctattaagctgtatgtatttattcttttgttcctggtgtgatgttctgaaagggtttaccaccctctccctttggcctagtttattccaagttaacttacgtgatcaattcattgtaattatgaatattactctgtagcataattactgacttaaggattttatacatgttttctgcatattcactcagatattttccctatacagttaactctcctccacatctgattcctaagagtgatattgttttaaccagatatcacttctataggcaaaagtgtctcttaactaaaatctcctttacgcttgactaaacaaaaagctaaattaaatgagaaagcaattccttgcagacagattggagccagaaaggatcatggattctcctgtcttagtccagttgtcttttattcatccagcaaatcttgtttgagcactcactgcatccggtagtctagtgttctgtttctctcctcctcagactaagaatcaaaagcttccagcactgtgggggcctctggacttggggggacattaacatagtgagcatagcatgcttttgcctcaaacttgaaacttgaggtaaattcccaatgggggtataaccaaaccagagcagaccctgatcaggcacccttctggaatgggcattgctcacaagctctgcccgctgtgggccgcagaatcctgaccgtgaccatcagtctcagcacccggattagacacatctcctttcctgtgtctcaaggactgttttcacttgaggctctgacgtataaaagtatgtccagacacctcagatctctgtgggtggtccttcacccatttccctctttgcactttccctgtaattttatcacattccgtggtttcaattgccacctctgtgtttactcccaagtctctgtttccagccccagcccctctcccaagtaccagacactactcacctgcctcctgtgagggcccttccaaggtacataggcaactgctccacatccacccagacctgccacaacaaagctggaactgggcatttgtccaagactccttcctcgccccaacttccccgcattctgtctggacacctcccaggcccactccctccacttcaccctcactaccttcacccatcccatgctgacttctaacctggrtggctgtgtccgtataccactctcagtcccccctgcaccctgccctccttactgtgaggtttctcaagtacagcagcaactaactgagctgtgtgctgggcactaggataaatgtggtagttggggaattcttaggaggaggaagttcagtggtttctccaattaaagaccttgtaaggagaacagagaactgaacccartctttgactmcagaacctgcacggtctcacccagccactccacccccttgcttcaaatttgccagtggcgccatgtggtttctggaatggaattcattcttagcttcacatggcactcttgttcttgcctctcgcttcctgtctactcttcatgtcagcaaatccaacttcttgcattttcttaatagtgccacacggctgtagaccttcatgtgattccatattgtttcctatgtttggaacacactttccttccttattagcaaatttttattcatccttcaaaattcaacttatagktcaactctgggtaagcactctgaaactgcccaacaccaccctgctccctttttttaattttttaaaggaaagaagaagaataaggaaaaaactatagttgtttcttattgtttttgggataaagtccagaatccttaccatggtctgtgtttcctgcctttctcgccttatgtcctgtcaccttcccatttggggatggtattgtcactctggcrttttctcagcttcttaaatgctctgctccctggtgctcatgctgtccctctgtcttaagatcttctgcactcactcgcctggaccccagcaaggcactctgcagtcctgtaagttcacagccccatacacgtttccacagtgacacttgcaccacttgtaattgtacatttattttgttctgatctgaatcatggttctctggcctcaggctccaggaagtcaaggacaaggactagatttgcttttgctcagtactgtcagcccaatatcaatgccagacagcttgtggggtgcacaagtctgtgtgtatgagttatgtttatggcagcccctctcttgtcttccagacaccgtatgcaaagtcctggctataacatgtccccatcactcttgccacattttcactagactgccatcctccatgggtgtaagaactgtgtttgagttaactgtttccacagtgacagaacactgcaaagcataagaaccgttggctgagtgaacactgcatgtgtgtgtgctgcttattaacaagtaggagtaaagggatttgggtgaactaccggggcggccatgttcagacccagtcactcacttccttgtccttccttcctcatcacataagaacatgaaagattcccatagaattttaagatcaggtgctgttttcccaaaccaaatttatattgatcttttttgttccagaaattcacctattttatatatatatatatatatatatatatatatatatatatatatatatatwtwtttttttttttttttttttttttaaggtcttcctgcaaataaagtcagcatgattcctttgtccttgggatcagtgtcacatatgtgttgtaggcaaacaaagagctaatgcatagccatgcagtaacaggataatttggagaagacaattagcaggggatgagcctcagcaggaaccaggaaaacagccctcagcctgcccaaccccacctcagatgccatccgcttctcagaactacactcagctacccccgtcagtgccatgaaagctccacrctcatcctgacatgtcttgtaccacagcccacagtcagcgcagatgggccctttgtgcctcatgagttgaatgtccatgtgtgcagcctgtcactactgacccatctgcccacatcgtcactgttgttgtggccctctcggtgcctcatgctaggtggccatgcagacagcaggtcccaaccctctatcccaagctaggtcagaamtgcttctcctcacagagtaagggactcaggtctggatctgtttcttcctgtgttctggctgaactcacaaactagcccagagaggagtctctcttctcctttccaacactctcacccctctgcttttggctccccatcccctgagatcttcagatctggtccatcccctaaggaacgagcagggatgggggaagggatgtattacagagatgtcatatcagtagcatttttaagaaggacagatgctccttgacttaggacagggtcacattcccataaaactgtcataagttgaaaatatatttaatgcagtacacccaacctacagaacatatggcttagctagccaattttaaatgtgctcaggacactacccttagaatacagttgggcaaaatcatctaacacaaatcctattttataataaagtattgaatatttcatgtaacttactgaaagctatactgaaagtggaaacacagtggttgtatgggtactcgaagtatggtttgtacagaatgcctgttgctctcatgccatcataaaktcgagaaatcctaagtcaaaccatcgyatgtctgggaccatctttagactaaattcaggaaacaagatatgttagaaatacggtgtcttcaaaatcatttcctttcccttttaaaaaataagaacgtaaggaaaagttaccccagatattgagacatctcagattatgggcaaaatttggtgtaggaataaaaaaggttcatgtcattggaaatgtctgccaccatatgattgtagatactttgttttattaagatgccaccatctgtttcaccaacgattttcaaaggccagaagaaccaatttgaaagataaagtatggaaaaataactctttgttttaattaattaaaaataactgatatataaaaataacttcttgtttcatagcttctattatcatatatagtcttctggtaatattattttcatagtaattaactttaacccacggtctctcaaacgcttcatatacttcaggcatgtaattattatcacagggaattatttcccagaattcttctaaccctagggaataagagggactccagtgtttatttttattgtatcctccattttttcttcttctttaagaatggaggaaagagttattgcctttcagcgcaacctgttttcattttgcaattcttttatattttcacttgccagcctggagaaaaatgtgttcagaatattggtacctaagaaaggagaatatggttgatttatttcctgttcgcagagtccttgccgtgtgcacaagagtgggagctacatggccagcaggttagaaccccrcacgctgtgcgcccygggcatgagcgtcactgcagtcctgactgtctgactcggtgacggggcactgcaaataaaagaaagcacagggtacaggcaaaacaaatgggacaagtgtgggtggagcagacacacgaactgagcatttgcccttcaaattcrcccttgaagaattctcccagccctgctatatccagctctttaagagcagaaatcctggccgggcgcggtggctcacgcctgtaatcccagcactttgggaggccgaggcgggtggatcatgaggtcaggagatcgagaccatcctggctaacaaggtgaaaccccgtctctactaaaaatacaaaaaattagccgggygcggtggcgggcgcctgtagtcccagctactggggaggctgaggcaggagaatggcgtgaaccygggaagcggagcttgcagtgagccgagattgcgccactgcagtccgcagtccggcctgggcgacagagcgagactccgtctcaaaaaaaaaaaaaaaaaagagcagaaatcctgtcatattcatgttgttgctgttgttgttgttttgagaaggggtttcgctctcgttgcccaggctggagtgcaatggaatgatcttggctcattgcagcctctgcctccatgttcaagtggttctcctgcctcagcctcccgagtatctgggattacaggcgcacgccaccacacctggccaattttgtatttttaatagagttgggggttttaccatgttggtcaggctggtctcgaactcctgacctcaggagattcacctgcctcggccccccaaagtgctgggattacaggcctgagccactgtgcccagcctcatgtatttttaaatctcccactggctttgcctagagtaggaactcttaattwaaaagtataagtggycgggcgcagtggctcacgcctgtaatcccagcatttggggaggccgaggcgggcagatcacraggtcaggagatcgagaccatcctggctaacatagtgaaaccccatctttactaaaaatacaaaaaattarccaggcrtggtggcacgtgcctgtagtcctagttactcaggaggctgaggcaggagaatcgcttgaaccagagaggcagaggttgcagtgagccgagatcacaccactgcactccagcctgggtggcagagtgagactcyatctcaaaaaaaaaaaaaaaagtgtaagcaagccaggaaattataactgagacaatgtgtgtgtgaaggccttgtaatctgtaaagcacttacagattaaggtagtagtaatatggccgggagtgtttgggagtttcttatttaggttggaggatcttasggccttgctaaagaagatgaaggcctctattagaatctccaatatttctgagtcaggccaatggcacgatgtatcaccattttacttccagttwtctccacrgcctgttttcctgtctctaatccttgtggacaggaactttttgatattgatatataacatatgcctgcgaaccatattcattcaattaacaaatgtttactgagcttccaccgtgtaacaggcactgttctaggcactggagattcatcagcgaaatagaacttatcaagtttcagccttcatggagtttatgttctactaagatttatgttacagcagaaacttccaatacttttgatcactgaatacactggaggcagtggtctcataaatgcctatgctgtacaaaattctatactgaggccaagttacagtctgattccagggatcaaaagcattggaagaattggtttcattcaaattctgatgaaaaccattgtaatgctaataaagtctgtacttgcctacgagactgtttactgccttagggatctctcctccatacttacacaaatcccttattatttggtagactgagaagaaaaggtagcttcagagtgaattaacattgattgaatacatgctgtctgtcacgcactrtatgttatagactttaatatgcattgttttatttagtatagagtcactatgaaatgaggattcttacttcattttacaaatacaatcataacagctctttttttttattaaccatctcccatgggccggacacatactaggcccttccttgcattgtcttrtttaacygtcataaaaactctattaagcaggcacttttaatktcccccattttgcaaacaagaaagctgcagttcatagaatagaagtaacctaaaataacaaagttggtatggagccagcttaacacyggattctccaaagccaacgtttttccccgtattccacgttggttcaggcaggtacatkccctgcttccacctccttttgcatttttggatgtgcttctttatgtaagtgataataagactgrcgcgttccagtgtccctccaagtgggcccccgccattgaggcrctgctggtgtttcagtgaagctttttctgttcttgcctccccttgacttaaattacaggtcagcatgtggactctttagttgttactccctaaataattattttcattttcttagcagtcctttctttccctggccatgctcacaaagctgggacctacattggatactactrctgcgsgtttacaatcctcagttgacctgtctgcggggagacggaagcccctgagtactttgcccaggatgtcttgtctttggaactccactcctccccagcttggcaaaacccttggtgtgctcttcttttaaaacagagggtaaaacagatacttaacaactgtcatttcacagttggtattttaatagatatttctcccagctgctattgttttagatttcttaagtaaatatttttgtattgtgtttgagtatcctaaggtaatattatcacaaagggtacagttttatacattgaaaataaattaacttgggtacatgccatattccaaagtgtcagcagaggagggggagtagtgttaatgtaaatacttctgcaragtagtaataatggatggcagaaaaaatgaagagaaaggaaagataggaggtgagattttaccagagtgagtcagggaacaagcagacrtagagaaggcctggaaaggttggatgtactgtaaggagagttttcagcaataggatacagctgaggctaggtttggcagagctaggtggagtactgaaaggtgatgtcttcgaagcctgtggtgttttgagtcttattttgccctgtttaccttaatggaaggaaagatcctagaccacaggccctgggttccacctgattggctgcggcaggcagcatgagcatccctgccgggggcatcagcttcccttctytctctgtcctctcatgcacttgttctgcgccatggccrggtactgttccctatgggggtggtgagaatgtttttaagggcctatgctcagggaccctcatagagcagaaacccagattctgcaggtctggaagagccttgggaaaagaccaatgtggcctgtgccgattaggaagtcagtgataccctgacagcctgcagctggtgggaatggtctgtgcactctcccggctgtcagctgccctcactcctcactctgctgcagtctggcctgccaccttccttcttgtcactttccttcattgtatctttggcccaattaaccagtctccagcttctttcttccttccctagcgtgcgggacaccaccttctccttgtctgctcctctcttggctccgcttgacattggaggccccttgcactccatcttgaccttcycacaccctccctagatgcccacarctcatggctccaaccttgtgtgctctagtgattcccctccatttgtcctttccaggggcctcctgggcattttctggttatgctaccaacacctcgtatctaaactaaaactccacatcatccctaacccatccccaacctaatccttcaggcaaactcaacactccagcattscctctcatcatcccagtatttccttgtgcaagctggaagtcacttcactttctccccttactttaccgtagtcagtaggtccttatgcccagcaggttctctcacttatttcccttgccggaccttctttatgtctcacgagttgattgctttttgttggttcatcagtttctgtctgcattttgtacagccccctccgggtctatctacctcctgttctttgctctgccaggcatcctgcctattgccaccggaaagaatatctttctaaattccaaatctgattctgctgcttgcttaacacatgcgtgtaaaagtagcataatgggttatcagaagcagaattcttcctttagaggctaacattttgtcaagaaaatttgactaggtagatttcaaatgcataaatgctgaatgagagcccagttaatagtctcggactatgaataactgtgtccaagaccttattatgtttatatgaaataggttggatttgcttataaaattcagktatcctagtagattcattttctgctgctggaaatagtaaggactgaccctgggtcaaaatttgcatttgtttcctatcatgtagaaacttcagcaaaataaacaggatcataaaattaacattttattgttcttcacagatctgtattcacttcaccactctcactgaattaaatcaccctgttacttgtttatgtaaggaaaaaagaacaagtcaactgactgaataaactatgggttatttacaaggcccctggacttactcctatttaaatgcttatgatttgttagttgacttaatatatccagtgcctatacaaattcagataatcaatgatgtctctttaaacacaaatcctctaataagaatttcttttttaacatgartatagaattacgctgggagtgacttctcttaacactgtcattttgctgcagcatggttaaattaaatttacttggactgccctgtgaaccttaccatcatttaacattgttgttccaaattctcagtaagaaattttagaaccctatcatgtctctcagtatatagtttatactcccatagtttatttgaaaacaagttgcatttaattttattctgaatttcgatatatttttaaccacagatcagaattgtttgtgggtgtgttaagtaagaaaaatcaggaaaataagaataggaaaaccaaaataagtcctgggatgaggtttccaagcaaaagggtggttagaaggcaggacagtaagcagccaggagcacggcctcaggtctggttctgagcttcccagcagcctatgcagggagaggaccatgattagtaatgtgagtcagagtgtctgtgataccgaagcagccactttcttagaagaattgtaactctttctggtgctaaagcggaagacattctcttatgctctttcaatgaagggcagcatcctcagcataagtacaacagtttcaaagggcctgtgcttctggcatcctgtcaygttggctggtagcacaaggccacagtaggaaagcattttgcaggtaaccaaaattgcaggtccttggcacatccaacagacacagcttagcatatctagaagagtagatacagggcttgtcttttaggcaatccttcataagtagtgctcagttcaccccaacttttcatacattttaaaccagtggtccccaacctttttggcaccagggactggtttcatggaagacaattattccacggactggggttgkgggggatggtttcaggatrattcaagcacattacatttattgtgtacttatttctgtttattacattgtactatataatgaaataattatgaaactcaccataatatagaatcagtgggagcgctgagcttgttttcctgcaactagatgggtccctctggggatgatgggagacagggacagatcttcaggcgttagattctcatagggagtgcacaacctagatccttcgcatgcgcagttcacaatagggtttgtgctcctatgagaatctaatgccaccactgatctgacaggaggtggagctcaggtggtattgtgagcgatggggagtggctataaatacagatgaagcttcgctcatctgctgctgtgcagcccagttcctgataggccacagacaagggtttggggacccctgttttaaacaccagtggatgtgaagttacactcccatacaagctctagactgagtagaaagccaattctttaccttgagggatttcccacggacagagtcaaagacccctaagaactttgaacccactgcaattcaaagcccttctgttctgttccttagagattgtctttttaagagacagggtctcactgtcactctggctggaatgcagtggcataatcacagcccactgcaacctcgacctcctgggctcaagtgatccacccacctcaggctcccaaatagctggggctacaggcatgcagcaccacacccagctaatttttaattttttttttttttttttagagacagggtctcactgtrttgctcaggctggtcttgaactcctgggctcaagcaatcctcccgccttggcctcccaaaatgctgggattacagatgtgagctactgcgcttggcccccttagagatttttttasagggattattataacagaccatctcttttaaacaaaataatattcagatgagatcttcaaataatttataaactgtaagtctgtagggttagtttgagttaggagccacttaacatgtaccaaaaatkaaaactttggtttcagaaaattttatctaacactttttttttttcctttttttttagatggagtctcactctgtcgcccaggctggagtgcagtggtgctgtttcagctcaccacaacctctgcctcctgggttcaagcaattctcctgcctcagcctcccgagtagctgggattacaggcgcccgtcaccatgcccggctaatttttatatttttaatagagacggggtttcaccatgttggccaggctggtctcaaactcctgatctcaggtaatccacccgcctcggcctcccaaggtgctgggattacaggcatgagccaccacacacagcctaatgctcatttttaataatgtaatattttgagcttacagccattgtctattaacaycactccacttgtttattaaaacctcaatatccacctacgggaaaatggctttccctctgcgctcaggaagagatatatttgactgtactttgttcttgtagagtggtcatagttttgttgacatagagttccctctcagatagtgtcaaaaaagtgscattaagcataatgttaacatttctttcttattctaggccagtatattatatatacagtattaggaatctcaaaaccagtgagaatattttatattttcacaytttttccagtggcagtcagtaaacacattttcttctgatgaaaccactttgtaaccaagtaaagctcaaacacaggggtaaaagaacagaccttgagctatgttcttaagactaacacaaccagattatttttctgtttaaagaatttgaaagtaayttacatccacatacttaatcttgtgcaggagtagaattgtaatgatgtgtttaaataccttatgcctgatacagcaaatgttgaatgtaatatgctgataattggaggtatatgtaaattatttccagaactaccaaatattagcaatttgctataatggctattaaatgaataatgaagaaaagataagcatgtgattagtcaccaaaacataaaactattgtccaaaatttcttgtgaagttaaaaaaaatgaatactgtattagtctattgatatatatcattcttgtgactaaatgtaactgaatttttactccttctagaatagaaatcggcttrtgggtctttgtgattgtatttggtttgtttgtttgttttaattaaataaaaaattacagtgtgccaggcgcagtggctcatgcctgtaatcccagctattcaggaggctgaggcaggagaattgcgtgaacccaggagccggaggttgccatgagccaaaatcatgctactgcactccagcctgggcaacagaacgagagtccgtctcaaaaaaaattacaattcaacagtggttttaacaccactatgtgcaaagcatagcaggtcctataggggaagtaatgatggaaaggggccaagcactgtcttaaagagatgaggaacctggtgggaggagagacctgcagtgagtccccgggtacaaggcagtagaatgggtaagcagtgtgccaggtacaaagctctggagtgcagctggcagtgaacctgagctctgggggtttgggagtagggggacaggagtttggcattctcattggtagaaaccgaattttgcttgctagctataattctgaaactacaactttactggtaatttccttcttcctcaatctagtaatgttaccagagaattccatcccatgttcagttccacatacttccttttaaagtcacctttctttttttcttatagctcctctctcctttttccaaaactttgtattccttcttcgatatttttatctttccttttctgtgttttcctactcatgtagaacmtkgggttttgaattctatatttattattagcctgycgttgcagaaaggctttccctctggtgaaattctattcatcyttcaaagacatcaccttccctggaaagacttctcaaagcccctggctgagttactccctcyttctctgttctcagagcactgtgtatactcctgttataaaatagagtaatttgtaatatgtgcccaataccaggagctttgtaaagcttgtcytgttttgatttgaatccttatagcctaagggcacctggcgcctctgyggaggagcgcaggagtgaagggagctgccccgtgaaggccacttgccattgggtgataagaacacgaggggctcatctcacagaagttccttgttttgtccacatcttagggatgctaaacacaaacagaataaataatttaaataatagtgaaattttccccaaaactaatgcttcaaatgtaaagcagttctaaatttagtcttcctaaacaagaatgagagttttttattttattattttatgttttacatcatgatagaaaatacattgtatagactgttttcagaaatatgacttgaaattaaagccaattgtggtgacccgttttaaaccaaatgaaatgattagttgtagttgttggggaggagggggtgaaagggcaggctgtagaactgcattgtgacagaatttttagatcagaccaagtttcacttgcctgggttcgtatcttctcaaagccagttctgtgtatgaccgtgacccagcacagggatcygtatggtctgggaccatttgggagaagggaccgtgaacatattgcagatctctgttgtaactaatggaactcacacagctcagattatcagatgcaggctgagcatggtggcatgggcctgtagtgtcagctactggggaggctgaggcgggaggatcagttgcacccaggagttggagtccagcctgggcaacatagagaccctgtctttaaaaagagagagagagattgagatctgaggcacttcttaggatatgtggctagagggttatgtgagattcaagtaaggtactttgaatcagcctccagcctctgaatgttgaaggcactggctgggtagaagttttgtgcagatcagcatttcccacagtataatgggtgtcactgggggtgggtaaggttctgcgaatgaatccaggtccctaacttttcttctcacgttccagggcttctccactgctttaatattcaagtattctttgtgattgttttgggagtaaagggaataaggtgctgtgtttcttcttcctcacttaggactagtattttcacataacacatgctgggaaatgctggttcgcatgtcaaatctgattgtcacctgctttcggcttgcagaagcgcaagtaggcaatcagaaggccctccccaaatttgccaagtcactcattttttttgcctgccattgatcatgtgggtgagaccctctctcaggaaatgggaggcagggcgtcttcagagagaaggcagtgaggacgtcgtccagttgagcctctgcatactgaatgctggggatggggcttcactttgtgtgctaatccatggatgagagccctcttaagtattgtgataaatacagagtatcacactattgtggcctttaatgcagggtgcacaattttaaatttttagtaggtagttaagatggaactcagttaagttggtctaccctacattcacatggatgctaaacacccacagggaagctgctgtttgttgattctgaacagggcttattgtatcatggaattacaaacaatactgaggccaaataccttcttgctctgagcatttatgcgtatagaaaactcagccttggatttagggcaagtaatgaaagtttcatgcaactcaaaatgaaagcatgttgcagatttctgatccctgaggtttttagtgctaaaatacaagtggtggagagtaaactccttatttcaccatttgcaacctggtatctacatacttaaggacaacatccaaacagcagcagttgctgagaccctggactgaagcaattagaagataccaaatttaaaaggaaaagactccagtgagatatgtgaatggtttattaccagtgcagcaaattcttcctggtacttctttgcactactatgaagtatactggctcctttgatgtaatgaccctcagttgcctgtcttttccatgtcttctaagccaggcatgctctctgtaagtgtccagaaattggcaccacctttgtgtagcatctttatttctagagaatttccacagctgggctgtccagtcaagcaggcagttttcctcagagctctgcagagtgattgcaagttatagggatgaccaggttccttcagcctcagtgtgccctgaagggagagatgtgataatcccacaggtgaagactccttttgccaatcctgtggcagtaagagtccagtttatattattcaacagtttwttttgagactgcattttttggcttgaccttccatgtctgttcytcttgtgttttgacagatcaatgccaagtgccattctgatattgtttagttagtattaaaaagaaaaaagtggcatggtaaccagtaagcatttgtaaatgcaaatgtttgctcaattttattcagtctcaaagtcctcaagttctttaaagtaaaaataaatcctaacacacaaacacctactggatgattcacagggatgttatagaaataaattatgtaatgcatggaaatattttgacctacttggaagaaagatgctgtaacaagttatttgtattataaatagccaagcaaacaaactttgtttcaagacaatatggcactccgatcaaaataactatccctagttatgttacagtgcgtggtattgtattccgggtctcatgttgtttacggcatcccagcagataaaagaggctaagtgtattttcaaatttatggaattttagcctggacaagactttagaaatgccacttctctgcaacagggaaaattaaagctctccaaagggagaaagggttaccagatttttttagtagacacagggaggtgattcacagactcatctgcataaaaatctacatacagcattcagagccctttaacttcaagaagtgaagtaaagttagctgatgggctctcttgccctggattcaatccagtattcagggattgagggaacagaggcccagcttgttcccttgctgtcctttyaaaaccaggacactcgggaagcccagcaaggttttgactatgctctatagcctccctgaattcggccctgcagccttttttagttaccrcctggtttgtagctttcttatgaatggttgaggttactgtacacctgaaatgtttgggttttttgtggggttttttttggttttttatttttttgagacagtctcrctctgtcgcccagaccggagtgcagtagctgggattataggtgcccgccaccacgcccagctaatttttgtatttttagtagatacacggtttcaccacattggccagackgttctcgaactcctaacctcaaatgatccatctaccttagcctcacaaagtgctgggattacaggcgtgagccaccgcacctggccttgaaatgtgtttatatggactttttttccttctgaatagcccagtaaacattctgacatttcatacattttaggaagggggagggagaattgttctgcatttttgtgctgagttcatcatccttgatgacgtgtccagaagaaggtagatgactgatacgtgtccccttttctccttccttccttgctcatgtgttgttgccagtgactaatagctgttggaaaggataaagtgaaagtcattttatttgactcctatttcctatttccataggaaattttaaggaagacatctaatgaccaagaggaattttcatcgtttgtgctttatttcacccataaagtggaaaatctagaattaattgatctaccrtaggtagttattctccataaattttaaataatttaaaggctatgtcttacattattggcwggttcacactataattttaaaataaaatttagaaaactgtgttctgtagtctaatatttaactcctaatacctgatggaagcttgagctggcttttctggtatgagatcaagctcattctgataggtggggggaaaaaagaagccagaaaatctttgccrtatacatggagcttttatacatggggactatactgtcacagtgatacttttagaagaaatatgaccagtttcataagaggatatgtagatgtgaggaaagtgcgttttttcccctgacaaaagtagtttgcaggactccacaaatgaagcmtgtggtcatctttgagtttaggagcatgtcaagagggaactgtggatcttagcyacagccaccagttctcagccttcagccttcaggaaattgcactgtctaaataggcacgtctaaaacccaacaaaaaaggagccagagacctcgcggctgcttgatctgcatgcctaactgcagacaagctaaacacgtttcattttataggtggcctttactttgataaattggtttacgttttaaaaaatcttgtttgcaacaaaatgtcagtggctatgaggataaatccaagtgatagggtttaattttgataaattataggtyaaagatcttaaatgttattaagcaccagaaaggacgcctgggcagaaatactcctaaacttttcctctagagactgaaaggagcatctgctatagaatggtgatgtttctttctttccattattttattgattttttaagacagtgttactttcaacagaccccatagaacctttcttaaaacctgcagatatatgaaactgtcatattgttttgaatatactttttttgcacataaatttcatatttatctcaacagatatctttcagttgatttaccataatttctctgactgtttttattggacatttacattaggacttcagtcctacttagggggctgagtcagaggatagcctaagtcacaggagctggggctttgggaattttctaactgtggaggaagaaattctgcaccacccactgagccctggagagagttcttctctccctctttgcccttatgttgcacccatctgtcaaaactgcacctgtggatgtaatcagacgtctgccttttctataactacacctgggcatcaaccacagctggaagacaatcgcccgctttggcaaattggtaccaccacattggccatttccaacctcaacagcctttttcatttgcttggcaagttctggagtctgcccacactgtttccaaagtgattgtccaaaacgaggctcttctcaaacttccaaacctcttcactttttttcttaaaattgttttttctgatgtgtaacccaagagccacgacgttaaaaaacaaaattgtcttagctgtgtctactgaccttttttcactttgaacttgtttaacaaatatttttaaaaccttgttccctattttctcatgggaactgtactattttccttttctgggctattaggaaatattctttttttttttttttttttttttgagactgagcctcgctccgtcgcccaggctggagtgcagtggcatgatcttggctcgctgcaagctctgtctcccgggttcacgccattctcctgcctcagcctcccgagtagctgggactacaggtgcccgccaccacgcccggctaattttttttttgtatttttagtagagacggggtttcaccgtgttagccaggatggtctcgatctcctgacctcatgatcctcccacctcagcctcccaaagtgctgggattacaggcatgagccactgcgcccagccaggaaatattcttaattattaaactttgctagtattattaacaaagatatttaaaccattaagtttcatctaaatatggctttgactatattccaaagattttatgcattatctttttcattattttaaagacactttcttggctgggcatggtggctcaagcctataatcccagcactttgggagaccraggcaggtggactacctgaggtcaggagttcaataccagcctggccaacatggtgaaaccctgcatctactaagatatacaaaaattagccagacatggtggcatgcacctgtagtcccagctactccagaggctgaggcatgagaatcacttgaaccagggaggtgaaggttgcagtgagccgagaccgcattactgcactgcagcctggacgatagagcaagactctatctcaaaaaaaaaagaaagactttcttattgtgtaatgaatttcctccaaggtccaattattatttatgactacctccatgaatttagggggtttttctgccatatttactacattgtgatcaataggtatatgctggtgttttttcgttttgttttgttttactttaagttctgggatacatgtgcaggtttcttacatgggtatacaagtgccatggtggtttgctgcacctatcaacccatcatctaggttttaagcttcacatgcaataggtatttgtcctcatgctctccctctcctagccccccaccccgcaacaggtcctggtgtgtgatgttcccctccctgtgtccatgtgttctcattgttcagctcccacttacgagtgcgaacatgtggtgtttggttttctgttcctgtgttagtttgctgaggatratggtttccagcttcatccatgtccctgcaaaggacatgatctcattcttttttataactgtttagtattctgtggtgtaaatgtgccacattttcttatccagcctatcactgatgagcatttgggttggttccaagtctttgctattgtaaatactgctgcagtaaacatacgtgtgcatgtgtctttatagtagaatgatttataatcctttgggtatatacccagtaatgggattgctgggtcaaatggtatttctggttctagatccttgaggaatcacacaaattccttggggaatttccacaatggttgaactaatttacactcctaccaacagtataaaagcattcctatttctggtgttcctatgctggtggggttttttgcaaaaatcactgacatcctaacaatcttatctactctctgtacaatttgccttcttgtctcctgtgaattatcctggctttcctgcctctacgttgacccttcttgctccctctcctttcatagatccttctctgcctgctcttaaatattggtatgatttctccagggctccttccaaggctaatggctcttcccattctatggctttcatcggaacaagctcttcttaccccatggtgttgcctcacacttccttgtcccttattttcaggtttatcgacagtctgaacctcctcaccttagctccacaaccttatttctggcagcctattggacatgtctaccttgtcccattgttgcctcaaaataaacggtctaaaaatatactcatagagcctgttgtctttatcaactaaatacttcttaatccaacccctcttcttttcaccagggtttaattcctcatcatatatctcacctgcttatatgcgtagatctaattgtatatacccttccccattctcttctcacacaatttcagccctctctactactgatttttccttattgtggtatattactgatttttattatatcaataggaactttaaaatcattaagaaataactgttattgtagtaatttaggaggcataaatttcaataaccaaaagtaattattgttaacatgctgtcatatttccttctaatttttcctacacatatattttccataattgagatcatcccgaatatcaaattgtatctttcacttttaaaaacgtaacaatgggccaggcgcggtggctcacgcctctaattccagcaatttgggaggctgaggcgggcggatcacctgaggtcgggagtttgagaccagcttgaccaacatggaaaaaccctgtctctactaaaaattagccgggcatggtggcacatgcctgtaatcccagctactcgggaggctgaggcaggagaatcgcttgaacccaggaagcggaggttgcaatgagctgagattgcgccattgcactccagcctgggcaacaagagcaaaactccatctcaaaaaagaaaaatcttaacaatggatggtgaagttagattcatattcaacaacttccaccaaaacaaactccggaaagaccagagttaaacatgaaaaactaagccatgaaacacatggcttaatgtcctcaggaacatgttctcaggaacacatggatgaatatttttttaaatctcacaatagggtaggcttttatacatatgatgtgtaacacagaagccataacataaaatttggtacaccggaccacacaaaaagtgaacatttctacatcacaaaaataaaaagcaccataaacatagccaaatggcaacaaaccagagtgaatattgtmactctgcacaaaaggctagcttcttaaagacctccttacaaatccattcaaaagaccactcgattaagaaaaggcaaaggatataaacagaagtacaaatagacctgggacaatgtggtggacatcatacatgatgagaaaaaggcaattaagatgaaatactgtttttcacctattagactgattagcaaagatcaaaaagtttgatgatgcactgtgttggcagagatgttggggacataaacttgtacttcctatgaggaaaacagccttataatgtataatttttataatattttgcccagtaaaatatttatctatctttgaactatcagttccactttagagaatacatcccacaaatagacatgcacgtgatgctactgtaagcaagaatgctgattacagcattgtttgtggtagcacaattggagacaacctaaacatccattaataaacggctacctaaatgaattctagttcatctatacaatagtatataaccatttttaaaactaaatcacctttatttgtattatcaaatgatcactaagatagattttcatttaaaaattaaaagcctacagtatgtttagaatgctaccgtttgtgaaggaaaaaaaatgtacasgtagagattttaatatgaacctaatgtctccagaaagctgtataagaaactgccaactgtgatagcatctagagagaactggttgtttaagggacaggaatgagagggcgaatgattttccaccttacatcttttttacctgtgactttaagkttttttwaaacatcttttttttttttttttttttgattcggagycttgctctktcacccaggctggagcgcagtggcgcaatcttggctcactgcaaactctgcctcccaggttcacgccattctcctgcctcagccacccaagtagctgggactacaggcgcccaccaccacgcccagctaattttgtatttttagtagagacggggtttctccatgttrgccaggctggtctcaaactcccgacctcaggtgatccgcctgcctcggcctcccaaagtgctgggattataggcctgagccatggcgcccagcctattttttcagacagtttcactcttgttasccaggctggagtgcagtggcgcaatctcggctcattgcaaccttcgcctccgaggttcaagtggttcttctgcctcagcctaccragtagctgggattacaggcatgcatcaccatgcctggctaaattttgtatttttagtagagatggggtttcaccatgttggtcaggctggtctcaaactcctgacctcaggtgatccacccacctcggcctcccagagtgctgggattataggcaggagctaccgtgcctggctgaaacatctgtttttaaagctatataatttcataatttatgtagccaattctctattattgaaaacttaggtggtttctatttttaatgcttataaatctaaaacgaacatcattctgtatatatctgcatatttcaggttatttctgtaggatagatccctaaaagtaggattactgggtaaaatattaagaacatcagtatccatccattagtatactgttttcttcacaggaagtaccagtccrtgctcacaccagcagggtgtacctgtccctttgtcttttcaaaaactgcaggtaatttgatggacacaaaatgatgcctcatttaaattttcatttgtttgattgtgactgaggctgaacattcacacatctatatctgtctgtttcatcactctgtggtctcttgtgagttattgttttatgccactaatttatttactgtggtcttattgtcttctcaatttatatgtgctatttgtattctaaggatattaatattttgtgatatttgtttctaactgtcttaggtctttaaagatgaataggagttagccaagaatccagctggaaaaggacgctccatgtgtggagaaatagcaggcctccaggagagaaaaccagggagactgcaagtcttccaggatggccggagttggtggtccttgctggaagctgctaggtggagtgggagagatgagcaggaatccagagagtcctgtaggccatccatgccgatgcagttgaccgttatctcaagataatggaaaaccattaggcatttttaaacagggaagtgtgtaataggttttattcacaactacccaaaaacccgaagctttgatctccaaaatggattttctcatggtaatttcacctgccactccacgagcctccattggttgccctcttcctttttaaaacaattaaactcaattatttcacttagtccttttattaatagctctttcccttgaaatgctctcgtccatttgtcttttcttaagacatgtttggcgctgaactatttataggaacacttgaagcagagttgaaaagttagatgacctttttaagctttgtgatgccagagacaattttttttaatgcctsttcaaatggacaaccactcggctttataccaagtacttaacaaagattggatagggcttatcgacctgtggaggaggaatagcctagggttgaaaatcacaggctctagagtcaactgggttcagaacccagctctgccacttacgagacatgcgatcttggcctacatttttgaaatctctctgagttgtagtttgtgaggattaaatgagatcaatatgtatcaagtacttagcacactactctgtgcttggcatgtrtatcagaaattgatgatattcttttgttatcctattgtaccctcaaaacagcaatgcaaatgactgtggaaagcagcccttttctttgaagatttgaaaataggtatctgaggatgtgcttatctgtattccatttgatattaactgcttaaaattctttctttgtccttaaagtattctttctcttaaccttggagtccagggttttataagtagatatcttggcattgtcctctggttgttaaatttcaacgatgagtcttctsaattttttataatcacttctgggacatttccttccattataaatttaattacccatgcagttcagtttgttcacacttattattcataggttatacacctttgccctattctgaaggttaatttttttcttacatatttctcaccaacgtatttaatttttccatgctttagatttgaatttctagtttgtcttgttttaattcagtgttattgcttctgtcagccatgtacatattctctagcattctaatctttctttttttttttttcttgttttgcttttcttaaaagtgggcaaatgtaatataacttctatacttttttttaatttactttaatagtcatcttactgaggaataatttacatacaatcaagtgcatccattttaagggtacagttcaatgatttgacaaacctaagggcatgtgaaaacaccgccccattcaagagaaggaccactccattacctcaaaccagtccccttgggccctttgtgttaacttggaatggcttctgtttcttatttcatctctttatctacagatcttgtcacccaccgaacctgagaccagtaccctagttattctccactgtattcccagctcctgkcataatgcttatatagtaggcatttagtatgtatttcttgaataaattgtaattttgaattttgtaatcattgccttctaaaagttgtttgaatctttttgctgcaaacccttttttcattgttttgttttcattattggttattggtayttttcttgaaggtctttttgatattgcctatgatattttgataagctcatttattcattaaacatgtattgaatatcttctctgtaccagacacatacagtggtgagccagaaagattaaagttcctgctatgtggggcttacattgtaccaggagctcacattatcagaaagaarctttctgctcttcttcactctgttatatacccagagtccgtgtgaccttcaaatgatccttgagcttcctctccataggcatcgtgatccatttgattatacactacacacatacacacaccataaccccaaggatgttaaataacttcgagagagaagagcctgaaccaagattggggctgaggagttggagaagtagaggtgattcagaagggatgtggaaagttacgattggaagatttgtgattggttgcatatagggagttctgggaaaggaaagaatttaggatgagtctctaagtatttgacttgggcagttgactgcatgaagattctcctacctgaggaaggaagtattggtcatcatgagcacttcaggtttttgtttgtttgtttgtttgttcttgagacattgtcttgccctgtagcccaggctggagtgcagtggcgcgatcttggctcactgcaacttccgcctccgggttcaagcagttctcctgtctcagcctcccaggtagctgggattacagacatgtgccaccgcacccagctaatttttgtatttttagtagagacagggtttcaccatgttgaccaggctggtctcaaactcctgacctcgtgatccgcccgccttggcctcccagagtgctgagattacaggcatgagccaccgcacccagccaggcacttcggttttgaatgtattcactggaagagtctatattttagttgacaagtgcaaaaggcaattgggtatatggatttggacctcagaaggaaggtctggactagagaaatattggtagccaatggcatctatatggcaggtgaaacctttgacagatgcaattactggcagagatcttatgaataagaaaaatggttcacatatgtgccctagagaatacagcatgtaaggggcagcagaatgagatgagcccacaaaggagcttgggaaggagtagctaggccagatatagtggctcacacctgtaatcccagcactttgagaggccaaggcaagaggatcactggaagtcaggagtttgagaccagcctgggcagcatagtgacaccctctctctacaaaatgaaaattagcaggtcatggtggcatgctgctgtattcccagctacttgggagggtgaggyggaaggatcgtttgagcccaggagtttgaggctacagagagctataatagggccattgcacttcagcctgggtgacagtgaaaccctgtctctgaaaaaagaaacctaaaactggaggtctgtgtattgcaatgagtgctctttagacattaagacttgaatatgaagacttgacctccagaaattaacaagtaacagtatcatggaggcrtgcaacacagtattgtcagatggcatgacctcaaagatgcataagggtgaatcagtgatctgaaagcagcagcaggctcccggaatacaccagcaccctcctctgggccctgtggaatatggggacatgctagaatttagcarcttcctcttgcacatttcagttaaggcaagtaggtggaggatgtgtccttccaagtcattggaggtagatgagtttgccccacagaggccagtagaaaggattcagcttttattgttcctaggatacttgagttcaggttacagaggaccaagaaaaggcacagatgtgtttataggataggtacacagagaaaccagcacttgagatgctgatgaagatgacagaaatgaaaggcattacattaggtggtttccacatcacacattggatgctaaagctgatatgagcctccaagtgctcagaggctgtgattatggctgcatttggtgtttctgggaggggacagagtaaagcagaacctcaagcactgaagagctttcgttactgcctgctgtgcaacagggaaattggagttttgagtggargaatctcagaaaagagtataatccttgcaatggtaaaaagaacctgtgggcacttgagatctaatgacagaatgaagagcaaaggctggggtggagaaggaaagccaaatgggagtctcctgtgcaaagaagcaccaagaaactgccaagcttcaggagagtggaaagggcagtgtgtgtgcgagcatcatcacctcactgtttctgtggctgtggggctgctgctttgtatttggttgtgttgccctttctgcgttagtttttcatgccgtatttcagacagcgtctgactcattaggatcatcctaatgcacagcattgtgtagcacctagctgccattttcacagcaacttctgcaaatttttctttgaaatattcttgctcagtggtatggtcaagaggctgatagccagaatctgcaaaaaagaaaagcaaagaaaaaagaaaaaaaaaaaagcaaatgataaaaaccagggcagggccaggattgaaataactggtgattagccccctcccaccaaatttgaagattcactcagatttttgatgactttcacaaagctgtgatcattcgaaataagaattcttacaactaaggaagaaactcttcatgcagtagtagttttgtggttctgagccagtgaaatattttcccttagggcgaagaataacactgggtgctttaagtgaggcagaaagagcaggaaagagaggagggaaccattacagcattcatctcgaaagtgcatcgaaaatttgaatcatgactcttgattgctttagacacatttaattccaagatctagagctgcttttctttaggtaaggactttggagagctggggagacaaacaagtatacatagcagaatatcctgaccctgggccttgagctcagttgatataaattgttgagtgttttaagctattttctcatttccttaaactttggaagaccttaggtctttacattccaaacagtactccttttttcctagctattctaagctagttactagcttttagaaaaatgagtttagcaatagctactgttgcccattttgtttttccaagaagcccatgcagcatacgaaatgaaaaatttaaacaatagatgattcctggaggtaaattcatgttataaaccaattttgcctgtggaacaaatattagaattaaattattttgtcccctctttgctgccatcattgccaaaaaagaaactgctttggaggagtatgtggttgtcaagaagaacagtgatgctgtgttttataaatagccattaggctatgcaagaaagtgccagaaattgctgttaatttacctagctgctatctaaaatcttgttagattagcagctgcacctgaggagagtctgtatctgatgtattccatttgtaaaatcctcccatatccctttagaagtgaatgagccccagttatttagcagctgctagtacatggattccatgcccaatcgctgtagccctttaggattgatactgagcgctcagcagctcctctgaaatactccagctggttcacagagggttaagatcaaagtctcagcagtgtcttacattctaagtaccggttcctaaactcttcccttctcctttatgattcctagtatcataagatttagttttactcttgcttttaaatgcaaatagacctgacatttgaattttttaatgtaaaatgcctttttactttaaaaaactttatctraaacaatttgtcctttttaagataaagtttcccaataagttatatgagctcccaacaccccctccgcgctgctcccaaggaaatttatatcccctcctctcatttctttgcctgtatttccattcttctgttgctaaatattactactggcatcacatggattctttaaccggtgctccaagttaaaagcagagcagtctgtgatcattaagaagacgagagagccaggcactgtggtgtgtgcttgtaatcctagctccttgagatgctaaggcaggaggatagcttgagcccaggagtttaagaccagcctgggcaacgcagcaagtccccatcccccaaaaktttttttaattagccaggcgtggtggtgggtgcttataatcctggccactttggaggctgaggcrggaggatcacttgagcccaggagtttgcaattgcagtgagctatgatcatgacactgcctgggcaacagagggacaccccatctctaaaaaagaaaaaaaaaacatagagaaaatggtgtctcacrtgcctggctcagtctgcttctccttagtcttatgcctttcaatctggagtagttggggtagagctagagataggccatagccatctgagtatgaggctgtgtctaaggactgctgagctgtctgttgtggctaattatccacaccactctaccttctgtacacacactatggtgtgactgtaaggatgcaggatgaaggcaaggttatggcatgaggagagggaacagtaattgcattaaggcataacaagtgttaagaagaatagctttcatttattgagtctttctatgtaacaggctttgggccaaattccagacacacattataaagcctagtcctcccagcagcctttagcagtattatgcctttttgacagatgaggagacacggccttgtgttaagaagcttgcccaagttcacacaaacagtagaagctggagcaaggctacaaacccaagcctgtccgatgggcaagccttgctctggaactgctgtcctgtactgcaagtgagctgtctggttgggggtgggtggtaggcgtgtgcactttcaagatggaggtaaagaaagcgtgttggcctaattccacaggttcaactgtggtgggatcctaatgtggacaacagaaagggaagtgagagccagaatatgggacaaggactggaaagcataggtcactatctgggtacatgcaaatacgatcgtcatgtaacctctgaattttttcttcctttcttttaagacagggtctcgcattgtcgcccaggctgaagtgcagtagcaccatcatggttcactgccgctaacctctgagttcttgatttgtctctgtacactaaaggttcaattatccatgtaaatggaatgaagccagatgtgaataaggctaaagaaccaataatctaaggaacacttcagtagcagtttgccatttgtatgtgacttgttgagtagatttattttcctaaatctgtttgcttagtcatcccagaatggtagtggatcagcctgcgccacgagcaaagatcaaagtggattatccrtaggggaagattaracagttaattctaaaggaaaaactttaaaattcatttgaaagcatagcctcagacacrctgacaccttttcttttttttcctctgaattcatttagaacatatgctgtcaggaggataagagatgccttcagagaaaataaaaatgtaaaggatcctgtagaaattcaaaccctagtgaataaagccaagagagaccttggagtaattcgtcgacaggtaagatggttcaatgatgtactgtttttcattaagagctttaaacttcgacatattccccttgattagacagccgtgcttttggtgttggtgatttacagagcaggatcatgaaactctgttccttgtactaatacagacatgtaaaggtgaactctcatattttcagattcaagttgaacttaaaataccagctttccggaatttccagggagtgtatccttctggaaagctgatacttttaagtatgagaaacttctgcattaatttttttgaaagctaagtttttgtaagatgtatcgcacatgtgtacttggatatatttcagagtataaatatattctccctttcctagtatttttaatcataattcaggataaacagaacgtggcccttttcttgaagacaccattgtgggtggtgaacctgaattacgttgccacatgggaggtgcatctgcaggtgcagatggtgtaaagtacagctgcttgggtgctgaccccataaaggaacctggagggtgtgttagttttcgttttgtggaagtgccaaggatcaccttgacttgtgcttccttttctcattctcatgaggtgggtggagcatgtgcagcggcatgatctcctgcgtggtctgataacatccgcaagagtaattagaacgtcagaggttaaagtcaccgtccactgatgggttttcttgctctctaaaaaacacccttttcactgtttttctttgacttagcagcaatcacgcaataaactccatttctgcttccattcgtgtttcccttttacttgcaggaaatttgcttataaagtgtggagggggaaactctttaccatttttgtaagttatgctgtrctgttttgaaagggcttctttagcatcaagagatgccagcttggctgacattaaattagataataatctttccctgacccttcttcatgcttgactctaaaaagaattcaaaaaagaagcaatatttgaaactataatttgcagtttatgtcaagattaaaggtcttgttatattgcctacataatgtaacagttctttctagaatagcatttcggattctcctaaccatccttgagttctacagctatttagtaatacagtaactgccacactcagacaggcctaggaaatgatctctaactaaagccatgaggatagtaaggtactcagaaaagaaactgatctgcacatttatgtatactttgagagtggcatttatatgagtcagcattttgaaaactctagaacaatggcatttccagtcaccagtagttgaattttatgaggtcctttagcagtggagcatagaagaacaagcagctgagttcttaytttgcataaactcagaaagattttgttctttggcacttactctgtgtagaggttggcaaaacaggcaggttttatctttagcgtaaaattatccagagtataaactgcctagaaaagggggattgtaaataatctgtgccatcatttctcccgctatatctaattgtctgtgtcacttcttggtttgaaatgctcaaactacccttgcaaaaaaaaaaaaaatactaaactggccctcatctgacatcccagtgagttcycctcccaggacagacgcactggagcagtggcatgtgcagggcaagggcgccctccccagggcagcctggccactgcacgttcccgatggagaatacacacggcgaccttgcagaacagcttgctgtcaccacctcagggatgaaagcattctcatcccttcagagaaccagttagacagcagcagctgggaagtttctactcacttccctttcatgtcaagactcttcctgaatccacatgcagcctttacmgtagttagggcgtaaggcacagtggctcccccggccatctggctgcaagctggcgtaagttgcctttggactaacagcctatggcaaggtggagagtctgtattcttgcacactgttctctgtaactggctgctgtagcagccttctgacctgtcctccgggtgcccctgcccctactccaccccacacatggtctgttctccacacaccaccaccacagtgwtctttttcaaaagaaagatcgggccactgccccgttcaaccccttcaaggctcttgcttcgtgacaccctaacataaaacctgaagccagtgtgaggtccccagaggccctccattgcactcctctccctcacgctccctatttccttgaacttcttgctcccatctcaatgcttgtgcaccacctgcctggaggagtccctccaaatgttcctgtagctccctccccyttccacccaggcctgtgctcagatttcaccttcccataggggcccccctgggaccacactatctaaaacagattctctctctctccgctgccctgccttagtttttgtgacagcacttatcagtacctactatgacattacttgtggccttgtctattttctccctcttctgcaagacggcaggggccatgaggacagggatctcccctgtcgctgtcatcatctccactgggtggcgaagagcatggactctgcggccagccggcctgtgttcacatcctgactcagcctactagctatgtcactctgagcaagatatttaacctctcagtgcctaatgcaaactgcagatgaaagtaagccctacttcatgcgttgtagtgaggatcaagtacactaacatatgcaaagcccccgggataatgctagcacataggaaatgttatgcaaatgcttgctgttattatccacaggatctagaacatcccacatagagctggctcttagtaagttttcactgactaaataaatgcatgaagtatgttccctgagatcatacatctcagtggcagggtctataccaccaaaatcagggtgtctttttggccacccacagtctccctcctgaaggaatgaaccatgaaaggaatatggaaatctgatggggatcgtgacatattaaccctcatggagttgtgatactcttcatatcacgtctctctcccacttgaagatttggactccaagccccacccacccaggtgcacatggatcccagcttcacggttccaccagtgaggaagcccacagccacttttccagctgccagacatgcatgccataaaggcagtgctcacactgaaatctcacccacaacacttacctgctcaccctgctttccactcattcttcagagggtggcttcttcagtcacgtgagtcagctgtggtgctaatgatacccctccacccccgcgtcccataaccctagtaagttttgctttttaaaataagtctctggacaaaaatgacctggttttctgggtagagaaaccgagatgcaggaaaggtggaagccttgtctaaggccacatggccaggcgtgagctcaggtcttctagctccttagagcaaactcagaagttcaaggacatgggctcctgagtcagtagaaactgaaggatagtcttaagtcatcctcccattttgttccgatggtatttaaggagcacttcaactctgctcagaggtcattcattcttcctttatgtccttaatgtgcaagatcttcagtcttcattctggcaaccctgagggattctagatacatcagcatttgttagccttcacacagtccttaaggattactctcattccaagaagtggcagctcgtttttctttcatgataagcaagtcagcctccttttgcccattttccatgattatggcccactcagtagaagccagacatacacttgttctttccttaacattcttggaccacgtctcccctggaaaattaccatccagtctgtcagtctcgaatctctttcccacttcatgcctcatgtcatagcccagaattagcagagacattcttctaccttttgataaagtgccattatttccatataagatgattctgtaaagccagctgaccctgaaagctcttataggttctccctctctgcagaaagcaagttctgggctagcccccactaaatctaatttccctatctgcctcccaggtgagatcagaaagatttgagaggccttttatgtccagaccagctggagccagaaagaatggacaaacctgggtggtttgtaggcttgggcaaatagctctcaaacagtctgagcagcaaagaagcaccaaaggatttctaccccagacaattaacaaggcttcgtaggtgttttacatcaggaacagcaaaaaggcagccagattttgcttttgtctttgtactttgctccattttgctgttctaaataaagatactcctctggaccctatttgcaaggcgttagttagaataactatcagtaaactgccctggcttattgtagctctgcagtttgccacacccctttggtttttaaacaactctagtgtaccttgttttgtgtcactatttcctgtctgttagcacctgctcttcgagcatcttctagagacctgcagcatcagcatcactgaggcaccttccttccctgtgtagttcatagagatttagtgttcaccaaagagaaaatattttctaagcattttgaaatagagttgtaatctttgttatagagctagcttcatagcctcatgtctagagaaaacagtaaaatagagtgttgggaatgggaaacaggaatgggaatgcagcaccasagaagttgccagaactgggtttctggattctaatgagattcccctgaacaaatgaattaagatcatgatttcaggaatattcagcaaaatctaagtatttggatgaaaaaatatattgttactatagtacataattgtgcagtaagaagataaactggatgtgttctaattctagataatggtagggttttggagtcatgcccatcttcccatcagcttttcaggggtcactgttttctaccacagcagctgttcttaagcttgtgcttttttagttaaggaactcaaaatagtggatgtattacacccaagttcagaatctgcagttgtaagaaattaagagcagacactatgtacagccattaaagatcattggaaaggggttaacattacacgtagcatccatttttgttaatgtaagtgtgagatgaagcattttcagtgttkcttagcttacactttttttttccttttgtagatcgctaagcaaagtaatttgctgaatttattgatgtttggggtagtggtagttgagtctctgaaaccatacttatttttacttttatttgctattatatggttcagtgtttgaatgtgctgttgtgaaattagaagctagtaaatcatgaccaggccctctctcattgtcagtcactgcaatatccgctccagttccctagatggtggttaaaactttaatgaaagtgatatcttacccacagttctcatccttttacaacagcctgagaaaaagtaggtatgtttgaggtcctttgcaggaaaacagatagtgcaccccatatctctccacttgtatgcatttaccttaagtattattaatatttgatagtttgagagaatttataaaattaatatgcctcttgttttagtggaataaagggaagtcaatccctatctaagggacatttaaaatacatgaaaatgattatatactattcacaatagccaaaaggtagaatcaatccaaatgtccatcaacaatgaatggataaacaggatatagtatatacatacaatagaatattattcagccttaaaaaggaacagaatcctgctacatgttagaatatggatgaaccttgaggacttaacactaaatgaaataagccatacacaaaaagatactgtatgattccatttatatgaggtgtctaaagtagtcaaatttgtagaaattgaaagtagaatgatgaataacaggggctggaggaggagaaaaaggcaaattgtttaattggtacagagtttcaatttgggaagatgaaaaagttctggtcatgtttcacaacaatatgaatatacttaacactgctgcactaaacgcttaaaaatagttaagatgatacattttatggtttgtgttttttccacaataaaaataagtcccttctttttcaaaacgaattatagccagtcattggtttttttttttaaytggaagcatgaaattaaattcttcagatgctggtatttagggataggaagcttaagtcatttgaagcttgaactagtgaatttacacccgcgagccctctgttttctcatctgtaaaaccaaaggattatactgtaatttctaaggctgctgccagttctaaaatcccatggttcaacattcacataaatatctgtccccttcttctctatttacagaaactactgatacatgttagactgaattactctatgcctggttttccttggccatttttcaccaagaacttaacactacagagtttaggctgcagatgaacaaagttatatgccagctatatatttatatcattatagattccaaagacttctcttcatctagcctttctgttagaaggaaacccagaaaattgaattatttcattcatattgttagcacctctgctgttagccttcttccttcctggtagaagatgtgttaccagtactagaatatatctctgatcagacagttttcttccaaagaaaatgaaataatagttgaagaacaataatgtaataactgataggcaaagagagatttaaatgcttttcccaagccccatcttaatgtttatactagtgtcttggtttgatttctccctgttccctggttggcttctcagctatgttccacatcatctgctggataagtaacacacactgtgtcgtttacaattccattgcccaaggtttcttttcctagatatttactgagcacccattctatgccgtataattatgaaatggggagttaccatggaattatgaggtccttccggccttgtagaagttctttctcattttgactcttcagggacctagcactcttcccacttctaatgtcccatctgttcgctcatttaatagaacagggataaagtttaaaagcatacgccagcagcactttcccctatacctttataaatcaactacgattaaatcaaaggatcaatctacatatttaaaaagtaataataggctgggtgcaataaaaatgtaataataggctattgtaataaaaaagtaataatagattcacacctgtaatctcagcactttggggggccaaggtgggtggatcacttgaggtcaggagttccagatcagcctggcgaacatggtgaaaccccatctctactaaaaatacaaaaaaaattagccaggtttggttgcaggcacctgtaatcctagctacttgggagactgaggcagcagaattgtttaaacctgggagatggaagttgcagtgagccaaaatcgcgtcactgcactccagcctgggcgacagagtgagactccatctcaaaaataatagtaataaaataaaaagtaataataaacccatcagaggcaaaggagatttaaatactctgtcttggacttcaataaaaatcctcaggaaagcaacatgaatttatatacaatgaccagaactgccccctaagtgaaccctatatcttttggatataagaagtttttccagatgagtggaaaattccccagccccctgtcgaagtttaagaaagcaaggcaatgagacagtttgtttagttttatagcttggcccctgtatgacattcatttgttcagtctatttaatatataattcctctgcagctataaaaagatgtcttcaaataggaatttgaactaatttcctccctgctttttctagaaattccagtaaatcctcgagtctggggcaacagcattcccatagttggcgttcctgtggaaggaatgtctctcatttggttggagattgcctgttagttttgcttgattcctccgaggatgatgtgcataaaacaagattccatttcctttctaaaagaagcctgtccctatgcgtctttcatatacaacagttttcctttagtgtatttccatgtgctggagtgctcccawaaaaggcagcagtaatgctgtgtatagaaaacttttgcaagagtttcatttgggaatttttattatgatatccatccttctcccatttagtcctcatatcattcactgtggaattccttaaagaactgttttgatgctgaagcagatattattaactctggcagagaaagcacattggtctcacaggcaagaagcggaagttctcagctcagatgatattttacctcatgatctcrggcaagttgcctatttgcctaatttaccacatctgtaaagagtcaagtttatgatggtggtggcagcagtgatgatgtgtgcttgtcagtgctgcttccttacacacacactgtgcaccacacactgtactccacactttgaatacgttgtctcagtgtctcctaagagaaaggaactcttatcctcatttttttaggtgaggaaattctgacctgacatgctggggtaattctcccaaggacacacaattaggagaatgttgggcccacctgcactctcacttgttagccagctctcagaagagggatcagattatgggtggccttatcttgacagaaggagacaagacattgaagatgaaagacagtggcaagatgcatgtttcctttttctaattgttcatttagagctcttgttagaaggtaacagcttaccctctgtaggctcatgaatagcttgatccctagaggccaggctcctttatcacatatcagaaaactctctctctctctgccgtcaaaagaaaataaatacgaaaactacactccgaaaatgtgaaagttcaaccaccttatttaagaagtatttgctcagaatttccccatagatctgaaggctacagctccaattgtgcttttccagacaagctatcactgaagtacccttaagtggaaactttttgatgcctcactgcttgtcttgtcctttcaagtaatcaaagttgactccagtcctgcttatgcagaagaccttctcccaagatgacaaaggaacagtgtcacatcttttaggaaagacaatccaaggggctcccccttgtttgtgttaatttgtatttctgtgttgcaccctctgtggtgcagggaggtgatggccccttgcctgctgtgtatatgagggcrtgcactcattttctgagcccttgcctgctgtgtatatgagggtgtgcactcatttcctgagcccttgatagctgcagctgaattttcttttcggactggatggatttcacctgtgtatatgtgacagctcatttcatcagtgctgttgggaagatctctcctaattatacatctatcagtctaaaaaacggcgtggctttttcctccctgagatataataggagtggtgagtaagagaagaggttttgagcaaggtacacctaaatttaaatcctaataacacttactcagtagctgtctatccttggtcgtggtattgactctgtctaaagtcatgtcatcactcagtgtttctactaaaggcgaaggagcaccattctagttttgtactcaatgtgtttttgaaataccagagccaagctatctgtcagaaattgtatatcttccctagtctggtaatgaagctgcgatttcatggattggtcagttatgaatactgaaaaggcgctaagaattctctaaaatgtggtaccagaatgcccttagtttgattaaataatgctagtgtggaattaaatcagtattttacttactttcttttccccaaacatttccatttcatccagtctaagaagcacttctcttctccccactcctcccgcctcttcaatggagtaaaaatagcaccaaccctgaagtcataaggattccccttcaaagtctgtcacaagttagtgatagcatcaccatgaagtcctcacctctaggcctcacctgtagaaagtaagaatttgagcatattggtttccragatcccttatagcacaagaattttttcaggaattggctctattgttacaacctaaatttaactgccttgttgagatccttggggtttctttcattagactattccactccactgataagtgagtgcatttcggaattacacacagagatagctaggccatgggggcccaataaatactcactgattgttggcccagcgagccaggagacctaggttctgctcccaccccccactggctggcagccaaccctcataggccagcttcctcctgtggataaagaggattgctcagtgtatctctaaggtccctttcatgcctgacattttctggttctgaaaataaatgctaatgattgccaagtcccagaaacaccctggtgaatgctggattttgaccaagggtgagctatgtcactgaccctctctattgactgaactgactataaagggaaagcctgactgcccagatctcccagcaagtgtgttttcttgcacatgggggagtaactggatkatgtaatgytgagttatgtaatgctggttcttcacggtcggctccagcagcggggcctgtttgagaaaagcctggagctgcactttgtgaaagcttttgacacccagcaatggcaggagtgttgcatggatcatggtgatttctggggtactgtgacctggaaaagagaacctgccttttcctacaggtgataggttatagatatctcatttacgaatgaggtttccctccctggaactcatcagagcttctgagaaggagtgaggtggagaagggggagctggtaaaaatagcaaaaataaattttcctcttgctttgaaccaggttctattttagcagagccaaacttagtgttttgttttttaaaaaataagtatcagctattatttgaagctcactgctgtstgtatagctgttcatgttttttgtaatattaaagtatttttcctactggaaataatttttgaaactcagcctgtttttttttataagacattgaccatacttttttctctccctggcagttcagggaaccactcggaaaatggcttgctcctgtctatttctgtactgtgttcagcctgtcccccgatagtcgtattttatggccagcctctgcagtattccagttgatttgtaaccatgagtctctctccagccagattgcaggatgccggagggctgggccttccatgtccttgggacctagcacagcacgaggcacacagcacacccagtgcacttgtgtctgcattcacctcctcccctagggaaggccttcagtgaccttcctgcccctttcttcctgctgcaatctcattgttctctggaccaacaacacactttattgtgactttgcttaatagcatgatcacattgttttagaatggcattttaataagtcatcctgtccctaccctgtgagcttccagaggattagcgttgttcttattcactgtgatccccagtgccttgttgatgcagaaagcactccattaatgcctaatataataaggccaagctggcttggtaggaaaacgtagggagttccgctgaaactcagaaggatggttccagtccagactctgacttgctttctggccagaagtcttcacctaccctgtgcaccacttagcatctttgcgaatagacaaagtgagatgatgtgcrctagcaccctgtggaaacagcaaagctgctgatcagtgtaaagcaaaaagtgaccgaggcagatctcaatcgatagaggtttatttggccaaggttgaggatgcacccgggaaaaagaaacacaagtcacgggaggatctgtcatctgtgcttttttgaaagagggttttgggaacttcagtgttgaaaggggaaagagcatgcaggagaggaaagggaaaaaaaggagagagggtaagcagtgaggcaagtggttccttccttgtgaggctctgactagcgctcagtgagtctgcatttcacatgggaagagagggagggagaagtcagttacctgtttgggagcagaaggaaggcagtttttgtgtgactcacttcccaagcttccctttccctttggcatcatgagtttggggtccttcgattctgcttttctttcacaccagtgagtcctgttatccttaactaacaaacactcagactaaaactcctcctttacttgaggaagtgggcatatccctttccagaaaagaagccaaggaaactagagtattcccctgtcccccagcccacccccagagtcagttgaaaagaaaaggtgatccatgaggtaagttccagcaggatgaaaggagactgtggaactcttttattttccctggtgccccacgggaaggcatgaaggcacaggcccaggagtacaacaggagtggtttcaagtcctggctatcactcccaagctttatgagtttaggcaaatgactttctgtgggactctttctcttctgtaaaataggcataattgtctgcccttcctaggggtgtgaaggagactgacaatgtttgtgaggcacacagcacagcgctgggcccatgataagtgttcagtaagtaagagacagctgcagcctcatctatacttcaaactgctttttccttactacttttaaaaactcaagtgctaaaacaaatcctgatggagacgttcccactttggtttcagccccataagtgtgcggaaagggagcagctgtccgttcttctttcatgtgcttctgctctccagccgcttagacgcaacacgaggggccctgcccagctgcaggctctcggcatgctgttcttgttataatacacgtctgacttccccggccgcttttcagtgcattaagtggagctgtgaagactaaattccaagtgacagtttcagtgtgaaatatttattgcatgctgataaaagaatatccacctgaatagaatcaggagggccaagggaaaattgcagtccatgtaatcttccatattttaaacgttcccatcacattgcagactgctaggcaaggaagtgaaataaaggcttcaggaaaaatctcatggagggcaaggtggtgtttggaagtaaaaaatgggagtcccttaatttgaataaaggtgttctcaaattcagaagatggggaggcaggaccaggagccattaggaggcctaccaagcagctgtcccaggcagcagactactgtatacagacagaaaggcctgatttcacagttgtcttttcctccatacccatgtgcgtagaatggtgcctgatcaacaagatatgcctaatcagagcttcagtgaaattttccttggatttctgtaatacccatctcagcctgtatttccgagcatcatggaatgtcccctggagcaagttaccaaagtccggggggcgtgggtagttaatcgtctgtatttgaggaatttgttttctgatgacagatgaaggacagatttcacgtgtgcatgttcaaacacatgcctgtagaggtggacaagtactcagagttgcttatgtgactttttggtttattagtgttgtatgtcgttctctccttggagactagggctgtcctctctgtctcacacttatcacagtgccctacacactgataatggttagaaaatgctgccaaatgaattatatgctataattataaaggactagattccacaaacttgaattccttcatagtagcttgtgtcattcactgtatttatggaatacccttatgaaaaaagcaaaaagtctaagccaacaaaattttagccatatcctggaacaataattagagctgtaactaattataacagccctgtctttggaggcagttggcagccctgacatacatacgaacttatggcaggctattcatcttttcttgggagaactagggagaaataaggtgggtggggtggccaaaaaccactttggaaaggcctgttggaacaagtacttcttgcccaaacatctgaacagaaggccctttgctgagttaggccacatggtccatccagtgcccacatcatccttttgcagcctcttgggatggcatagaaagttcatattcctcctgtttgtatgtaaggaggttggacattgggaaatcaggctgcccctggaagttggaacatcaaaggcaagtccaggaaccacatactgcacaatgagccaggcccctctgcctgtcagtttgtctctggacttccatggaatacaggtattgtagacacacaaacccttcacacaatgcaatttactcacctttacctgtgggagaattctatgtatgtgaattcagacatgctgaaaatacagaaagatcatatatagtaatgttcttgtcagggcactttgtttacacaaattcattataaaaatttagaattgcaaagtgtaattcagttaattgagcacctgcaaaaacaagttttggtcatggttattcactgattatggaggctgaagcagttaacttttcatttatgttttatataccaggtgccgcaggcatggatcatttcatgaaagaggatgaccctgcagggcctccttattttgcagatgaggaaactgaggctcagagaagttaagaaatgagctcagagaggttaaggagcttaagactccgcagccagtaatggttgatgccaggatttgagctgaggtctccatcaccatatcatgctgcctcccaataggatcctttaattgcattttaatagaatgaattttattaaaattttaggtagatatactttcgtagccttggctaaccccttccaactgagagccagtgacttgctgaaagtcagagtgcctctctggggaaggcacccacagccccgtgattcctgactgccccgtcttggtgccctggatcttcaggagcgcacagagagaaatgaggtgcagggggtcactgccagcaggtttggaaagacagatggttccctctggagcaacaaacagattagctaagcaggtgacccagcagggcagccccagagctgagcgcagaaggctgaaaagaggatttagccagctcggtgaactgattcacccaaagaaaagtaagacagtttgtggcatgagcttgtcaacccctttaccccttgccagttgatgatgatttgatgcattggtmtgtttccaggccactctcagggatctgaaattcttggctagacagggaagagcatttgagcctgcccgtgcacttgcactgccaggactagcaagcagtgccaaggtttgcctgatcacttgtccccatccttgatggggacaagaaaactaaaggaatttttcttttgatggcaaaagaaaactaaaggaagactgatacattccatatcagatacccatgttgcactctaaattactctcctcagatactttaaacccttcacagctggagttttccattatctaagcacttgtaatatttggaaagaaaaaccataaccaatctcaaaacaaccatgattcactcccccacaaaaaatgaaaaattaatcttaattttaaaatattttgttcttatacattacagtacacttggaatttcattcaactttctgttttacacggtattactgggtgaacaaaaggctttctggctctgagggtatcttcaaagacgggacttttaccttataccagtggttatcagccctgactgtacgtcagaaccacctacagtgcttgtacagaccagtctactccagaccagttgaatttgaatctctgagtgtgggagtcaggcatcagtatcccgaagtgatgacagtgtgcagccacagttgcgaaccagtggcttacaatgaactagagaggggccttgtcctggtctactccacctgtgagccctgcagagtgcatgttctccacaaggctagtctccgggcaagctgtctttggtttttgtgatgactttccctgatctctggatctctctaaattcaatctttgctctcgtgattatttttattctgttgcacttttaccgactttcagactctgtttagaagttttattttaaattaaacaatgaaaattttactgcaactgaaaatttcrtgtgcttccacccggtggagtagagtgcatgctcctgaggaggctctttggggttcgagctgatatcacaagacaatatccttaacaaccaagtagaataacagggcttagagccaaaagaataccagagacatgtcctcgagagtggagtcctcatctgagggagatgttatttaacattctttgggaggcatttttctagtgcagctaagggtttgctacccatacaaattgtggctgatccatcctgcacttctggagacacgcttatcatgtaaaccctggcaatgagaatatccacagtgtcctatatatttatagcaggcattttcccaagcaggattccaagtacatctacagttattaagaaagtcayacaccttctctcctttcagggggaatttgtgggaagaaaagattaatatacctatataccaagaaagacatatgtaaaattttttcagcccttcaggattgttgttatgaatatgctctagaccagtctgttttgaaactgtgttgcagccctcagctgcacaacttgttctcagtatcaactctcttatagcaccttgggggcagcaaggagacctgtagaagcaaaacaaggcaatggctgttgggagctgacccagtgacaaatgctaataccctgggccaaatgtcctagcatccaaaggaactggatggcacagcttaaattgggakgggttggccagaccagaacaccaacttttttcaggcaattgcctggcaattcctggcaatttgagaaaaattgagatttttctcaacttcagggccattcaaggttcagcctgttgatggaaatctctgtgacagtttcagtctggtagtgactgttcttccctgcaatattgtgtagatttcacaaaagcatgtgtaacagctttattgagatgtgattcacataccacaaaattcacccatttgaagtatacaagtcagtggtttttagtatattcaaagttgcacaaccatcaccatgatcaattttagaacattttcatcaccgcagaaagaaaccccatacctatagctgtgactccccattttcccccaacccactcttccctagccctagccaatcatcagtctactttctatctctgtggatgaaatttatattcacgactggcctctttcacttagcgtaatgtttgcaaggttcatccatgttgtagcataagagagtacttccttcctttttaatgccaaatagtcttccattatatggatatactacattttatccattcatttgtagatgaacatttgggtcatccccactttttgctcttgtgaatgatgttgctatgaacattcatatgccagtttttgtgtggccatatgttttcattcctcttgtatatatacttagaagtggaatggctgggtcatatggtgactctgtttgaactttttgaggaattacctagtctttttccaaagtggctgaaccattgtgcattattaccaccagcaaggtataagggttctaattttgccccattcttgtaaacacttgtttttttctgtcgttttgattatagccatcctagtgggtatgagtggtgtaagatataccttttatacatraaacaaccagatctagattagaaggctaackttgacctagttaccctttaaggaaggttaagacagcagggaggcggggatggacatggaccttaggccagtcctctgtatctaaactcaattctctgtggattgagaaccaggttagccctttgctgactttacagtgcttgtaagagatgggtattactgggcaatgaggtttagatagccaggggctaattcagagcatctggagctctgggtaagaatcctgtctctcactgctccctgtggccctccctgagctgcagtggaagagaatgacctccagatggacaagagtaatgtgccttgccttttgtggtacctcatagagtcctttcacacagtaggtggaggttgatttttttaacatcaaaaacacagaccttcttagtgctaagccagccagacttttgttagcctgattcttcttgacaaacctgatgctgcttatcctttgaaacttcatctttagtcttcttttttcatgcaaaatataggcctctgtgacaagtagatatttgcacttgggtgttttatgagtacttgaaagccgtgatgtccaaaactcagttagttgccctccctttctcttttcttttttttctttgagacggagtctcactcttgttgcccaggctggagtgcagtggtgcaatctcggttcactgtaacctccgccttctgggttcaagcgattctcctgcctcagcctcctaagtagctgagattacaggcacctgccactacacccagctgtttttttgttttgttttgtttttgtttttgttttgtattttagtagggatggggtttcaccatgttggtcaggctggtcttgcactcctgacctcaggtgatccgcccacctcagcctcccaaagtgctggattacaggcgtgagccaccgcrcccggcgctgccttccctttctcttaaactaatttaccttcccagttcctccatttctcagtaactgaggctcaaatcctccctcttgcctacacataggaaatgtgaccttgattaggttatctatttgaaataaattcgggactttgctcaggtcctccaaaatagaagatccctgtgaatattaaaatatattcttttattttatttatttattttttttgaggcagcgtctcactctgtcacccaagttggagtgcagtggcatgatctcggctcactgcaacctctgcctcccaggttcaagcagttctctgcctcagcctccggagtagctgggattacaggcaccygccaccatgcccagctaattttttttgtattttcagtagagacggggtttcaccatcttggccaggctggtcttgaactcctgacctcgtgatccacaggcctcggcctcccaaagcgctgggattacaggcatgagccaccgtgcccggccaaatattaaaatctattctaagatattaccctttttcttgaggttctggcttggcatatgctctagacttatataatcaggcacagccaactcaggcacttggccccccccttcaaccaactcagtgtgtcatagtcttgaatcctcttgaagaccttccttgcctaccttatcatgaatcaccagtaagcacctatgttttttccaaaggacttggtttgaggttctgttagatattcctgttgactagatgctcatctgtttcagtratctcacttgaatgtggaagcaccctttgtttcctggcagcctaatttctctgcacagttacagtggttagatgtgtattgatgagcattactctctaactgctcgtgtcaaagcacttggggaggctcatcaatcttgtgcgtttttaattgacatcaataatgtgtttgcatttatcaatatttcctaattgccgagttgtcacagtggaacttctataataaatcatgcccacagatagcttcagaggttacagcttaacattcctgtcaatattttgatgtattataaattgtttttatcagaattttttcctgtgagaaaggaggagctgtacagcaagagacaaaagaattgagtcactgtcaccatatacagttatgttaaagaaccaaatcattccaatggaaatagaaaaaagctatttcccaagctgatacaattcattcccataaagtttggcatcatcatctagattaatgcaaatatgtttcccctgatagtggtgtgctgtgcccagctcctctgaggagaggcatctggatggtcggacagtgagcactcttaggaggaaggcactgtaccaacctgcttttcagaagaggaaactgtgaggaagcttcgtgagctgcagttacttgcccagagtcaaactgcttttgcagagctggaactcaactcagggccgtctgagtccatgtttggactcttgacctcttagggacaagcttaaacccaaaggaggatgaggcctggatattagaaggcatgagtctccatcatctgttaaagcaggtagaggcagtagggtgttgggcttggaaaagcaatggttgtgaaggctccaggacctgcactcctgtacctgcaagacagtcacatgagggagagttagacatgatatctgcgccagatgatggggactggaaaggcagagggagtccactgccctgggcagaggcagtgctgcggggtcggagccacgttgccccagcgtccttgagtgactcttaccactctctgtcccagtttcctcagctctgagatgggaatgtgggagcacctcactcacggggtcattaggaggattcacaaactaatacgtgacaagagcttatgatgatgcttggggcatactaagtgcaatataagggtttgctgttgctttgttataaagccagactttcagttggtgtgaggaagtttttttctaagaaatcattcaatatttattcattaattctggggatacagtgatagataagacagatatagtacctgcccctgccctcatgcagcttacaatctgtgttagaaagggaattgctatgtgcctcaggtgaatagctgttgagcacctgaaggagccatttctgagaccgtgaccccacccttttcctgtcattgaagatgcccaagcagacactgaggtccttgtgagaagggcttcatactgtgggggttctttgttttgttttgttttgatgagacagggtctctcactttgtcacccaggttggagtgcagtggcgctatctcagctcactgcaacctctgcctcccaggttcaagagattctcctgcctcagcctcctgagtagctgggactacaggcgcatgccaccatggcaagctaattgtcggggttttttttgtttttgtttcttttttttttgtagagatggggtttcaccatgttggccaggctggtctcaaactcctgacctcaagtgatcacctgcctcagcctcccaaagtgctgagattataggcgtgagccaccatacccggcctgatactgtggggttttgtaatgtccttaacatccctctgcaagggaaggttaattaaatgcaaccaatgataataacatcaatatgtacattgctttactttaaaactacctggcaccctccaggtctctagggtgaggtgagtaaacttcaagattttgcagggccgtcctgtgagctgcaagaatgaaaggtaggacttctacttagaattttcatttgtctattgtgtgtattttaataagcacaatttagtggtacaggaacacatatgcataatttttaaataaatgtatgtacatcaagcctttatgtgtaacagtttcttgctaatgacgtaaacagttttaaaagtttaaagtctaccactgtaggttttaccaaaatacctgaattctgtaaagccagaagctattatagtaatgaaatggtgtttccatagctgggtgcagtggctcacacctggagtcccagctacccaggaggctgaggtgggaggatcacttgagcccaggagtttgaggctgcagtgagctatgatcgtgccactgcactccagcctggacaacagagtgagaccctacccataaaataaaataaaattcacagtgtttctatattttcctaattttctgatttagccatttatggataattttcaaaggtagtatttttccaaagacgctttcacttctactggagagcttaaaaaagaatcatgaaatacttgatgtttttataggacttaacaatgctattgcatttaaccctcctactagcccatgaggtaggtcttatgtcccacctcgaagaagagggaactaagcatttcagaaggtatgcccagttctggttgtacctcatcattttgccagagaagagaaattacagacttaggaacagtaaagctggtgctcattaccagccgcacaccagggtatgcctgttcacacgggtcacaggggatgctgggagggactgtggccatttgttcttactagtgccaccctctgctcttacccaaagacagcacccttcaaatatgtatccttcaacaagatttattaggaaactacagttggccaaaccttcaggagctttcagtttataagaagaggtaacgtatcttttctaatccccaaatggagcgtatgaagctgactgttaattagtggcaaactttaatttggagggtagtctccatgtttgtcctctgtctctctctttctcattctcttcccccaccccccacccccccacacacaccctgttggttctgtttctctggagaaccctgcctaatacaagatctaaacctttgaaatcagacctggcctacataacgtgcctttttaacaatcatatatttcttttaaagcagctgaaattaagcatgaaccattaattttgatcatccgttttattaaaatttgggaaattttaagtacctaggtactatatgtcctttttctgagtttctcttaattcctaaccaaatcatatccatagtatgctcctttctaagtcactgtcagtcctggctgcgtcatgctttccaagggtttttactgatggattctcagtttcagcctaggaaggttgtcaggatctctggcytgctttctttggctgttcatctgtctcagccatcaacatggtctcttgataacttagattgttggttaattagagaacagctttagtttgcccttttagcacttctgattaactaggacagtctgctttactctccctctgacttctccaagattccctgctgcctcattttcaaagaccaaaacaggaagacagaaacacaacacacagaatccctcagctgagtatgaaatttctggccatccttcactgctctatctgaggattattagatgctttgggaagagtcagaaagaaccctgccttctattacatgtttcttcaactggatgrctagcaagctacaatttgaaatggtcttcagaaatactgctcttaacaaagctaaggcgttttttttttgttttctggtttttttttaaatcacatatagtacatagaggtgctaaaaatagagcttacagttacttctatttcttcactcataggagaagaaagccctgtaaccccaagggttgtttccttgttgttacttttgttgtttgtcatgtcagccctctcttcttgtttaaggaatcttgcattttgaggccttgtcctgtagggctgtgtgcctattacctctgcctactgaactgaaatccaagagtaagctcttaggcccaaatgcactttgttttttgtttttgagacagagcctcacactgtcacccaggctggagtacagtggcgtgatcttggctcactacaatctgcctcctgggttcaagccattctcctgcctcagcctcccgagtagctgggattacaggcatgcaccacyaagcctggctaatttttgtatttttagtagagatggggttttgccatgttggcccagctggtctcaaactcctgacttcaggtgatccgcccgcctcggcctcccaaagtcctgggattacaggcgcggrccaccgcgccaggccctaaatgtgctttggatacaacggaatacacagcctgttgtggatttggtgccttttaaccatgcgcagattcagaagttagatctcatcatggaagaggacagcagcaacagccccatagaggtgcagtcccctgtggatggtgcccctcacaggcattctgtcctgtgctaatgagcacagtgggggactcaaaggcctaactgtcccaatgctatggtagtgattaggacctcagaacagttttcgttaaattaaaaaaagtcaatttttcctgacagagccttactacatgtctctttggggggactgagtaaggggaggggtgcttcctcagagcacattcaggaagcgtattaacacagctcctgcagtgtgtgctgtcctcttcctgctctccaggcgaggacattatgtactggcctcctgccttgcccccagccgttctctacccacacagggtccctccaccaccctaccccaggccatcttcagtcagaagtagcagcactttaaatgtcattcacaaagtcctgtggggaacagccccaggatgctcagcagaggaaacacaaactttatattgctgaaaaggtggattataagcccactgccttttctgatgtactcttcgttttcagatttcctccattgtcctataatatcttttataacttttttaatccagaatccatgcaagcatcaagcattgcatgcattagctctcctgcattttttttaacttttatgacattgatgtattgagtccagaatgttctccagtcttaatctgtcggattgtttctctaaggttacattcataataagcacttttggcaggaaaactacgtaagtaatatggcattcttctcagtgcaccacatcaggaggcccataatgtcaattgtacaattattggttcatgctgagtttgatcatttgttagagtagaattgaccagatgtttacactgtaaacatactgtttttctttgtaattaataaatctgttccccaacaacctttcactcagtggttttcagacccattaatgtgccttgcctgaatcagttgttacattagtggttgcaatatggtgatttttctaattctctgatcaccaagttgtcttcttaataacacactagggcccgttttaatgagagtaagtcctaaattacagacaggtaaatttgtcactaatctatctcagttctcattcctagtttcacaaactcatgaccttagctcaagacagtgaaaatactctctcacaacacattttcaggccttatctttgagtcatatacttctcagaatggcgcgtagctcttatttccactcagagacatggggtcagtctggcatcaaaaggacttcagattgcttccctgagctgcctgtgacaatcatccaccctgcctggaccgctgacatggacaaaaatggagacctatgttctgtttctagtcttttggggatcgtaacctctttttaccaaatgcatcgtgaacttttctcatgtgaccccattctctcttgacycatgttgttttaatagcttccagtatttcattgtatagcttatcatttgtttattgtttcccccaaatgttgaatatttacttggtccctaatttttttttctattacagtgttgccataaatatcttcatgtacatccgtgattttctcttaggaaaaattcttattaaaataactagatcaaataatgtatatgctcttatgctcttaaggcacatgaggcaagtttttaatacaatgcctttagctgataaaaacttttcaccctttccccagaaataggtatgtataaacacagagacaaagttttgcataacatatctggaagttcctgaagccacgggctcaggttcagaaactttagtttgtaaaactgaaatctgaaaattcccaagattgtattatctaagaaattctctcaggctttctctgaccccagcattccacagttgcagacactagatttaacatcagccttatgacaacacatgagtaatgcattgcacaatggtgttaacaacggcagagttactagatgataggaatttttcagctccattgtaatttcatgggactgctgtcatatatgggatctgttattttgtggcacatgactggtttttggaattcagtgttttcagtcacatgagagatagtcaagttatcacgctctgcatgcctgcatgtgtgtgtccctcctgtgtatattacggggaaatgattttaattaaataaatatcatttaattgaatatttaatgccagagcctattagaacagatacggtgttactacagaataccaagtgaatttttttctaaatgggctttttcctaagcagagttacattgtgctaaaatacatccatccatctatctatayatcaggagagcatttagaagtcactgctacttaaaaatgttgagcattctcagtttgagccaaattggtttttaaattaaaaaaaaaagcctcaaggaaatcaaatgctttgagtctattaaggaatttactgagactccagtagtatctactctgtgtacttagcataatactttattattccaaaatcaactcagaactgattccaagaaaatcctaggaaaaaattaaagtgaggaggaaataatccctttgtgcggtgtttgaggcaaattagaaagcaggagtctctgaactcaaatctggttctgtcattaaatcactaaaggacttgggaaaattagayaaattctttttgttctatctattaaatggagacaacagtatcagcctacttttctagaccaggaaaacaattctttgtgtcagatcaacctctgttatataaagatttcttgaacacagtagtactacagggaaaaccctggattggggagaacagtgattcgattcatagattaggtgaagcatgtactgatttttttagacaggtgatttagccacctttgtgtgttttacttttttgctttttgaactcttctcactctcatggctagcatcgtagacaaatttaaaagctcttaaagtcatgctcatcgacaaaatggagttattagtagctcttaattttcctgtcttaggcaccatgtggaataatgtagagcttcatggtgccttgcggctggaatttcagtcacccgaaatgcatgtcagagcaccaggactagtggcttactggccttcagacagcggtgctagagcagcrtaaactcttgaagtcacagatctgctttcaaatcctaggctaagcactaaccttaggctcaccactaaccttaggctcaccactaaccttaggctaagcactaaccttaggctcaccactaaccttaggctaagcactaaccttaggctaaccactaaccttaggctaagcactaaccttaggctcaccactaaccttaggctaagcactaaccttaggctaacyactaaccttaggctaagcacttaatttctccaaaacaaataaaactggggctgttgtgaaattgagatacgataatagtgttttataatctaaaaacaagatgttagcaagaggcaaatattaataacaattgtatgtaatacagtacgggaaaacagcaagacaaggggtcctattaatattgatagttgggtcaggcaccgtgggagccacatgcagtggctcacagctgtaatcacagcactttgggaggctgagacaagcagatcgcttgagcccaggagtttgagaccagcctgggcaacatggtgaaacccctgtctctacaaaaaaatataaaaattagcatggtgacatgcacatgtagtcccagctacttgcgaggctgaggtgagaggattccttgagccccaaaggtcaaggctgcagtgagccatgattgcgccactgcactccagcctgggtgacaggacaagacactgtctcagaaaatatatcatcataatagtaggtcatgtttattaagttcttactgtgtaccaagctctacacaaaatgtttaatgcactgtctcatttaatcctccaatagtactataagatgaggaaacaagtttagagaggttaacttacccattgtcactcactagtaagtaaaggagccaagtttcacacccagatcactcagactaagatccgaagctcttaatcagtacttgatatgattattatgatcactgttagtatttgttaaaaataagaggaacaaaaacacaaccaataatccccttcttttatcctcccttgatttacaacttaggtaacttaatctttctgaaatttgtgtttacttaccattttttaatcaaaataatgcattctctctcttttttttttcttttgagagtgagtcttgctctgtcacctaggctggagtgcagtggtgtgatctcatggcacttctggtgctcaagcgatcctcccacctcagcctcctaagtagctggcacctcatgccataggcacatgccaccactcccagctaatttttgtttgtttctttgttcatttgtttgtttttggtagacatggggtttcatcatgtttcgcaggctggtctcaaactcctgggcctcaagtagtcctcccacctcagcctcccaaagtgttgggattacaggtgtgagccaccatgcgtggccaatgcattctaaagattagaaatttagacaaaaaacttcaaaggcaacaggaaagtttttctcctctccctttcttctgactgcaaaatctcacttcccacataaagattcttatgtagccttccagaaatttcccgtgcatttagagagattgtgtgagtgtgtacccttttttgttggtttaacacaaatgagattataccataaatactcccttacagcttcttttttttttccactaacacaatatatattgtacataattccatattggaacataaaaacctgtcttttatttttatttatttatttttattgtactttaagttctagggtacatgtgcacaacgtgcaggtttgatacataggtatacatgtgctgtgttggtttgctgcacccatcaactcatcatttacattgggtatttctcctaatgctatccctcccccagcccccaaccccccgacaggccccggggtgtgatgttcccctgccctgtgtccaggtgttctcattgttcagttcccacctgtgagtaagaacatgcggtgtttggttttctgtcattgtgatagtttgctgagaactgtcttttatttttaatggtcaaatactccacagtgtggacatgctgtaatctatctaattagccacttaatgatggacgtttacattgatttcagctttttgccattatgagcagtgctgtagtgaacaagctgatatgtgtgtctttgtgaaggacaaggccttgaggtaggagggctgagtcactgggtatgaacatttaaaatgtggactgaacgacttactgtcccagccaccctgtcttcaccctgattcttcagccctgagaagatcacatattttcacctttatcaacacagaacatgaaaggtagtatcgcctctgttaggggtcatgttaagaatattttgtgctattagcatgtgcatttcttttctatattattcattcaccattctattgtttcttagatttgttacaaatacagttcctcgtttgtcatttattttggggccccatttactattcttttatagacaattttttttttttttaagatggactctcactctgtcgcccaggctggagtgcattggaacgatctcagctcactacaacctctgcctccctggttcaagcaattctcctgcctcagcctcccgagtagctgggattataggcgcacgccaccacgcctggctaatttttgtattcttagtagagatgtgatttcactgtattagtcaggctggtctcgaagtcctgacctcaagtgatccacctgcctcagcctcccaaagtgctgggattacaggtgtgaaccactgtgcccggcagacaattataatttttatgtagttacatttcacttmattgtctttgaattttgtgtcatgctgaattcccactccaagacaataaaaattctcttgcatttccttctggtgcttttgtagattttttaaatgtttagtttttgaagtaatttgaatttattttggtataagaaaggagatgggagttcagtttaaccttctccaaaatgataactttctcctgtcctagtatcatttatggaataaggagacatttttgtcttagtccaacacaccagaacgcaaggccagaacaccctcaattccctgcattttgcttccaaaggaaacatccatccttttgctgaagtgactggtctgctttgctccgagttaccacgttttcctctgtgatgctagtaagcctgctccttcagctgtctgctctcctaaacctccccttcttcctctccacatagcatctccccagtccagaaagaagcctttggcttcckggctttcaagtcatgcttctgcccagctctttccccttctcctctatctgcagggtcatttgcactcataagcttcactgcctccccttaacacctcaaccccctggcatccaagcagtaaccccccatgctgcgctgaaccagctcctgcacagatacccagggttccaggcatgccaaaaacatgtgcgtgcctttgtccagtttgacctgtccaaagcgtctgaccattctggctggccactccaggaggctctcccagccctcctcactcctgcctccccttctgctggccctggcccagtctcgtctgctggccctcccactctgtccctctaaaactcaggcactgcccaagctttcattattggtccctctctttccctgtgatcacatccaccgccatgacacacctgtctcctgcaaggatgactctgaagtctgtctcctgtcctgacatctcacttaagtgtggtggttcagagcacaggtgttgaaaccggacaagcctgggttcagatctctgccactaaccagctgaccctgagcaagccacttagtattcctcagcctccttatgggcttgtctctcctcctggactgtggggttgctcaggcagagactagatattagattagattttaccatattgaatgcccacttggtgtcaggtgttacactgtgcacttgatgcagcccatctcggatgaagtaggtgtgtgtttgtattccctttatatctcaactcagagctatttgaatccaaaacccatttcttcccaagatttgttggtatgtctacagaagcttatgctctagcagaagacaagccatgtcctcctgggaagatgtcctttccagccgtcttaactgcctgtgctctttccactggcttagccagctttctgtctttccttagcatgagcacagggcagatgcttggtcattgtttagtcaatgaaggacaagtatcytcattcattcgttcacccattcattcattggacacatatttatccttgtctttgtgccagactttcacccaggtattgggattcatggtaacaaggggcgactcgaccctcgaggagctaggtaggagcgtattgtgatgcagcaagtaagtacaggggctggggaaracaaagggcaaggaggaagggacttcagtgcgtcaatgacaagcagggcataaggaagggacttcagtgcataagtgactagaagcagagaaagcaagaggtagcaacctcgtgcgaccctgaccctgtgcttgggcttgcgcaggggaaggggcccttccaagtgtaatcagaggtgtgatgaggatatgttcttccactgctccctcttttctctgctgatatctgcaaggaccgtctgctcatttaccaccctctcagagtgcctggagatcagggactgtcttttttagcacagaacctagaacagtacctgatccacagtagatgctcagcaagagtttgctgggtgaatgagtggatgttacagtgcagrgcatatgagcaaaagggtctacttgttcttaaaacaaaagcatgaactcatgagctgcttacatcctgttcatttattttctttgaagaacaagatccattttctaagtaccagatgacttaaattaatttattaaaatgttaataagattgccctttttaaaatataagcaagactttttgttttcctgtggttttaacggcatctccacaaagcaaaatcaatccttatggctatgtgcttattaatataggtcccttttggacaccaggatgtttaatacctactgccttctaatggggaaaaagaaaatttcaacttmttttctcttaaagggacagctcttttgaagaaggaagagaggttatccagttataattttgaacccctttcttgtgaaactccatgccactcgccatttatatcctgytttagattgttggggtttatttatttgaatacctacaaagtggacatctcgggatcattatcgttaagaatatgtatgaaaaaaatttgtcttcaatgcaggcaagtctgaagataagaaaatggactagattaccacttagtttcttgtataaaagctttgatacacaagaaaaaaaaagtatgacttttggttcttactctttaaaaaaatggacaagtaaaaattgtatgtatttatggtgtgcaacatgatgttttgttagatgtgtacattgtgaaatgatttaatccagttaccacatccattacttcacatacttaccatttgtttatggtgagaacattcgaggtccactttcttagcagttttcaagtatgcaatacattattattaatagcctccatgttatacaatagatctgcagtggttcttactattcttaacagctcaagyggagcattaaatamgattcaggcttgccttcttatttagttgtcagactgtttttctccaattttgtttatttctagtcacataattgcacagccgaaagatgagaaattaccacttctgtgccatacacttgattttgtcggtctaaagggggagaagaggggtgtgggaatagagagagaactgaggtttgatgtgaaattcaaaattggagattgtagargcatagcagaattactcagtagtaagcttattctycagaaatttttttaccaactttattgcattggtgcaagttcattccttttgaataggaaacctttgctatactgtatatgattatggctataataataatagcagttaccatttaatgcattgcttatatgctacatgctataacctgttttcactgactaaggataaaaaaaaatgcatgccactgaaagctgcagaattctacatttaagtatttaagaygatttctcccacagcagaygraggatgttgtgcagggatagagcacagggaacctttcatttgtgcatcataggaaaggtggaattagaacacagtacttttattttctctttcttcctccaaccatgtccccataagctctagattagccagctagaggcctcatctctgaatgtctttctaaataaatacacgttggctgtaggttagttttggtagcacatggagcctaaaccctggagagaggaaagtggggtgaagggaagaaaaagctttagtaatgaaataatataaatgtgccaggtactttcacttaaaatctaagatttatgctttcattatagtctctacaactgtatgtggcaaatgctagattataaaaatcatgcatgcagattaaatcttttacaataaaaaattctctataacataaaatattctccactctcaggcaatggcctccttcaaaactgatgcatttcagctaaaaaaatatagaaggtccatgaatgtcaagcaaaattagatttaactagtaattcaggtgttatacaggccacactgattactgtcctctctcatggctgattaaaggatgtgtctaaacagtggttctcaaacagggttacctttttaaaatacacatattcaggctcgtagttctgagcccctgggctctcctaaagtcattgttctaaaccactcttaggatgaagagagagatgtgtatgatatacawctaaagtattgatgggttttcaatatctagagggcttatgaccatgtataagtttattctcagttgaatgatcaatttattaattttacacatctaataaatgaaactttaaaatgaatttttgttaaacatttaagcattgattaaaagctaaattatatttctataaccaatttaaaaagcagttgctaatctaatatrgctgtttcttttaaagtcttcaaacaccttgaagggtaactaaaacaacacaaaaatagtcattacaaaaccagttactacatttacaattccacctatttcaaaatattgacatcattggtttaattcaaatctcattctttctgcataacatcataggggttcagaaatgtcacattaattaatacctgtctcagttaaaaacaaaagaaaaaaaatagctgcagttacaggacctggaggagatatcacctgattcctggacagggcactggtcaccagtctggactgcctcattatgggmgaagttcatttgttataaagtttacttattacaaagtatgtctggggattgggggggaggtatttttttgcttggttcaacaggaatgctcttaacagcaataaggaacaaaggggatccatgtgaaggaaggagagttctcttagagacagactgagtctaagatgctagcattgtgtcttctaggtacattgagcaggcaggtgaaaatgcagacctagagctcagaggccatctgggcaggaggcctgagtttggaagtcatctggtaagaggtgaagctggactatattacctagagggagtgacyagaaagagaagaggctgagaagagcagtaggaagaagagagttgtgaaatgggatgtttggcaacatctcttagagagagctcggcagggaggccagttgagcatggcccgtgggaaagaatggaatctgctcacaggggacctggagccagggcstggtcaggaggcaggggcaccagacctagaggagcagtgtggtggtgaagaggaggagaggacacagggaccatttgaaaatctagggaatgggcagatgggcccgcgtggggtcttgttttgttttctttggattttaggttgtggtttttataaggatgtaaagattgtattgtgtgtgttgackgggaggaaaaagccaatgcaaaagaaatcattgacgacacaatacagggtagaaaaccattcatggagcctggtcccagggcaatgaggggaaagtagggtttcctacgtgagtcctcgatacatcgtggaagaaaagagggagaggacaaatgagagctatgcaggacaattctaaggcaaagaagttggagaagctcacattttcttttcccaccttgtcattcctcyttcaaccaggtttgtggttttgtttttttaaaaacaaacaaacgaaaaccttgtaattgtgtaatcaaatatttcaattatttctttcatggttttgtttatttggcgtgaaaattcatcttaaatgggcgtgatcctttcaaaaaattaaatgaagaaagcaaaactctgtgcataaagtctgcattgtaggattaagatgtattgcttgagaaaagtgaaaagggttcaataataatgtagtggatgtagggagggtgagaggcactccattaacaatgggttcaaggatagctgtacagcagtgataacaaaggtgagtgacatacttcactagcaagaccagtcagtcctgttttacagtgttctggcgcacatgggagagagagattggtgccatcttccccaggctaggattggcaaggagaatgcagcaatagaagttaggtgaagcaagggtatccacgagagcatcgctgcagtgattggtcaccaggtccacgctggcagagcagctgagaggctggaggcaactctgggcyaggaaaataggaggaaccaacgaaccagagatcatgttgaggaagagcaagctcaggggtgacagattgagaaaagtgggaagacaggaaactgagtcaaagtctagggctcaaatatgttctaaatggtggtgagatccaagctgcaacctacctaaggttaggtaacattagggaggcaatgaggatctacatttgaggatgctagggcctgtgtagagccaggctgtttggaagatctttagcatagatgctgagcctaaaaatgcagactgaatattgacaggaaaactgagctcggtattgacattgtcacagtaaggaaatcacgagataacagtcacacgcttaggaagatgttcaatcctgccacggtgtacacctgtgccaccatacatggtagccccggggaacggctgctgtctgtggagcagcaggaggtgtaaactgcggaagaatccacaggttctgtagagacctctaggattaccagcccttcagatttcattagtaaccagctcctgtgacatgctggcattgtcagattagccccataaacaaatctgcttatttagctgagtcattatttgtggttctgtgtttagctttagccttgtttctgcctaagaaactggtatgtgaccagaagtaaaggaaattgattattctgagtgactggcacagtaagattctatctgccatacttacatctcctatgattaggcacagtaagaaattattgataagcagagccatagtctaaagtgtgttgtaagcatgatggggcaaaatgttataaaacccaacttagtaatgctgtttctccaaaaatgaaacacagcattaccataggatgcaacaattacacttctggctatatactcaaaggaaatgaaagcagggtcttgattaggtctctgtacacctatgtgggtagctgcattttcacagtagcaaacaggtgtaacccaagtgtccatggatggatgaatgggtaaacaaatgtggtctatacgtacaatagaatattatgcagccttaaaaaggaaggaaattctgatacatgctataacatggatgaatctggaggacattatgctaggtgaaataagccaggcacaaaagaacaaatactgtrctattccaattatatgagctactaaagtcaaattcatagagatagaaagtagaatggtgattgccaggggctgggtgatgaggggttgggggagactgagggatgagaatggagagttggtgtttgatgggtactgtgtttcagttttggaagataaaaaaactttggagctggatgggggtgatagtagaaaaacaatgtaaatgtacttcatgccactgaaattacacataattacagtttaaatggtaaattttgctacgaataattaaacactttttaaaaaatacatgaataggtccttctggaaaagggctttacatgctaaattttgtgttatatatattttaccacaataagaaaaaaataaaaataaaaacttagccctgactttgagttattgaggggtgtttcctcttttctttcttttttttttttttttttttttttgtttttttggtttgtttgtttttggcaattttacatttacttctcagtgagaagaaaagcagcaagtgcatggcctatagatcattttctaatctgacaaaggcatgtaaaaatatatgctttattcagcttttgaaacggtggattcaaactgccagtaaacttctttccttaaaaggaactcactgtatttcaacgctttgtagcagtgaggtacaatcagaggaaactcttttttttttttttttttttttttttttttgagacagagtctcrctctgtcgcccaggctggagtgcaatggcgtgatctcagctcactgccacctccgcctcccgggttcaagcgattcttctgcctcagcctctggagtagctgggattacaggtgcaggcccggctaatttttgtgtttttatagagacagggtttcaccatgttggtcaggctggtctcaaactcctgacctcagctaatccacctgcctcggcctcccaaaatgctgggattacaggtgtgagccactgcacctggcctatttctgtatttttcattccccgctccacccactactgcagaaagtagtttacttttagaagcttaattaaaaaaaaaaaaaagagttatgaatccctaaacaatttttttaagaaccatgtgagaattcctacatccaggtgttagctttcaaattatttgccttagagggtctgtctgtttattccaataaacttccttttcagaatggccttcagttttagtttatgatacacataagaaaattgagtagtatagtggcctctttcttcatacttgactctgaatgacttttgactgttaccaaaaaaatctaccctcaaaggatgcaactgccaacacagacratatacaaaacaaagtatgtgtgattcaataaatattgagtgcctactatgttgccaggtgttctgctagacaccagggatataagatgaaaagacaattttagtcactgctcttaagctggtgacactcttaggggaagacagacattctcacaagtaattaaatacttagttaaaaaaaaaaatagtggcatatgtgggtatagtgagagcccagggtgagcagtggctttcagaaatgttttaaacaaagacgtcatccccagaatgcattatcccccaagttggcagtgttgaggagcgcgtgaggcctagtatgttcttggaaagaaatctttatttcctgagaatcacttctcatccctgtataaatgcatctgacctgtttgtaagagtatgaaacagacactgctatgtgtgataacttgtcctcgagcccctcaaactcttcagagaagataacaagtcacagcatcttgtgactctagttggatttttttattagtcacggaaataacctggtgccgtaaggatacatttgacagctgtagctaaaaggattaaagaaaatacataaatgaaagattcctcaagccagagcggcaggacagaaacagcatgtcctaacaaggcaaygtgggagactgggtctagaggtcaattcaacaatggtcacctgaatgatcattgtgttgrcaccaagagcttgtgtctcactgaatggtgccccctagagaggcaggcagtgcctaggaaggggtcatcccggagagctgggtasgctttccagtcagatgactgagttccaagcgattaaaatgtttgggtgcagtactcctccaaggacatgcttatccctaactgttactgcattactaggaaaacttctttgttcagtctgtaagaggactgtggcatttgaggacagccttaagaagatattaagtagcagagaatcttctacgctcacctgtgatttcagcagtggtcacacctgttaagagcagagttcttttaaacacacggggaagacacaggaggccttgagagtcctctggcagctgtcgatggtgcaactgtattcgcacttttccatattttcccttcctaytggcattctcaagttttgtgcacatgtatgacatttacacagtaggggatctattgagatattttcaaacagtcaacaatcctaatcaaaatgtgtgctactgaaataagttayttggagtattaaaacaagtatcttcctgtggacaacactactcatttgtaattatgtgatgggaagcttggggaaatgtacaggagctttcagaacttatacttctgcctcatgccattgtagatgaaattatatactcacacttttagaaatcygagatacacattcaccaaaacttttaaccactgtgaaagaaacagataatcagctgtcattatccttgtgttcaagatgaagaccgaaacttcattttcaaaggtaactctgtcagatcataacataagcacacttccttcagtgcttcaggcctcagtaacagccaagacttatttctaaaccacactgctcatcagggtgcagtctatgaaaactgcccaggaaacctccttcccattggttcctgaggaggggaggaacggacagcagacaggtgagtactcaatttgattatctcaggtaaagcttagaacccagcaaaggctaacagacagtatcactggtagcaccaaagaagccatttcagataatttcttagtattccgtaggccttagtataccaacaatctgtttctaccaccttaaaatttaatagcgtaggccaggcacggtggctcatgcctgtaatcccagcactttgggaggctgaggcgggtggatcatgaggtcaggagttcaagaccagcctggctaatatggtgaaaccccatctctactaaaaatacaaaaattagccaggcatggtggcacatgcttgtagtcccagccacttgggaggctgaggcagaagtatagtttgaacccgggaggcagaggttacagtgagctgagatcacgccactgcactccagcctgggcaatagagcgagactctgtctcaaaaaaaaaaaaaaaaaytaatagcgtaatacaaccaccatttttgttataactcacagattatctgggccgggaatgctgatagtgcacatgctatcagccatagctgggaagactgtaacactgggtgtactcaaatggctggggtttggaatcacccggagacaggtctggtgcctaggccaggatcagcagcagytgtagagcagaatgtctgtgtggccggggcttcctcacatcgtggtagcctcagagcagtgcgacttcctacttggtgggcagaactgcagaggagagtgttctggaggacagagcagagctgtgtggccttttgtgaaacagccttggaaatatgtagtttcatttctgccatatttttttggtcaaaggagtcacaggctcagattcaaagtgtgggaacatagacccccgattctcaatggcaggggtgtcacaaaatgtgtgaccctgttttaaaaccaccacaggccccctctccttagtattccactggccctttatcctggaaacctcaggaaatggtttttcctgattttcttctttaattctcctctcccatcccttcctcaatccagttcaaggataagggcctagaactccacctgtgtcctattccctcttgaatccacaggtcgagcaggaaagtgaaggatgaggctggcatgtgtagaagtgycagtggagggcgctgtggctgactagaaggcctctacgttttaaaggacagctgttccaaacggaggtgggaatgaagtccttgtgtttccagatttcccattttaatgtgaaattagatattgaaatattgcttcataatgttttaaaagcataccatgagatctgggtttatgctcttgtctatgcactggctctgagcccctctttgaaagacccagaactcataaaacaaggcattatttaagattgcacatttatgtttatccccagaaatttccacattggggtctggaatgccattgcttctttaaatactacttactktaaatcatatttgcaaagaattcttgtaactgagaatctaggcgctcaataaatagaccgcatccttccttcatctgcacatgaatggcagcattttgtgcattaattacgtgtgtgatgtgtctaagctgaattggctgaggagcagaactttaatgattagctgtataaaactgaaagagagcttcaattttgacgttaagccttgcttatcttttatattctcagcctttctcgacgtttgttagaatttaaacttgtcctaagcatgacaacatctgttcaaaagagaggggggataatatatgtttatatatacacaccttaatttagtattggggaccttccagttaccaattataagtgtaaagactaaataaaagttatagaaaattagacaaaataaacagtgaccaagagaagatttaagaaatctgaagctaaagatttatttttctgcctgccctccttgaagtaaccattaagtttataaatagcctccttcctctgagaagaaaggtcctagtgacaccaaacaggatgcgacgcgctgagtactctcccctttcattttgaaactcgagcttttgtgaagactatcattgtgcatccgtctgtctctcctcattaccacttctggttggagccggaagcaggacagatgcatatagtcctcatttcaaccacaggaattgactttaaaggtgacactgtccttagtaacacagctgatgccctgtaggggtaaaattagttgtgttttctctgtgcaggtgaaattttaatgaattttttgatactctgtagakcattcactgcaaaatgcgttgtaagctctaaacaccaacagctgattgtgaaagactctttattttttctttgccctaacttaaaaaaaaacagagaatgtttccagagaatctactaaggaaaacatcaggtctgacaacaaaagagaactgagagagcgaagaggaggcagctttctgcactttgcacactgggttgcagttctcacagaatcctggggctcaggacaaaatggaagcttcctccttggacctgcatttaccccaggcctcgaaacaaagccccccagtctatagtttccagtgtcacttcacagatcttttcataccacagcaacccatactgccaggaatctgcctgttgtctccagcacagcttcctattgaaagcaactctatgtctaacctgccttaaagcaggttacggctatattttaaaacccaccgcattaattcaggacatatctttttatcaaatggatttctcttctgcatacatatttaaacatgagccgtacactcagagcaatggactgttttatgaaaggtgattagcatatagtactcaatcaaagaatttgtaaatgaaaaaagttgaaaatatgaaatattgatcactggggtactcattaactgttcaaaagcataatttagttgaatttcaaatgtgttaatgtaggatatcattcatagaaaagaaaaggattgtaattttacacatcatgtttaactttttaaagtgtggcatctttaatgcrggtatttgttcttagaactcttattgtatgactgattcagacttcgtgattcattagccctacaaatctcgagaacatacatgaatgtgctcatacagaggttagaaacttgggctagctcaagggtagcctaagagaatattggagacagaaggttctcattccttgagcagtgctcagagcatagctccatgtatagtgagcataacagcgttgatgtgtctgattggtgtgttggtattaacaaacatgtaatggcacagaggacaggaaatttcattacatctctggcaaattcatattgaaagaaagaaggacagatggttgaaaacagccataaaatattctattacatgtctgcagaagtcattagcagttaaagagatgttattaatggatcagattcacttggggagtcatgtttctataatgcacattaaagcaatgatacttccggtatttttaatgcagtcagggccaaagacaaacctgtctttctgaataattagaaaatggatttattggcagtgaagaagctgctcttcagcttgactccagatcatttggggaggttgtttttatcatctaatgtgaaagagtagaatgtaactggctgctagccctataggtcactgaaataatgccatattgctttattagtattttgggggagaaaggaaggaataaaattagtatttctgaaaatcatcaaggaataatwttagtctctcaagtgccttaacgtgtctctttagaattaatgcaaacatcagggttttgactttgtgagcatgagaatgatttttggtgcrtgtttctgtctgtgtgataaacaaaacagtgtctgtgagatgctggggagccctttggaccaggtgcagtcatttgtgtggtcctccctttgcagagaggaactttcagccccacaggtccaggatgtgagaacaygagatgctcagtccctgggaggagagctttccttagggcatctcacatttcaaagcagggtagggtcggggcagcttagtgacgctagcatcaaagcaaaaggaagggaggtgctcgtgaaactgtggtcatcgttcctggacagtccagagcttcctctccctcgaaagtatttggaaatgcaccgacaaatcctccctcctcagctcctttttttgggccttctgagaattgttgccgctcaggtgatgctcttccgtgctgtgcagctcgtgttacagcgtgctttcccagcatgttggaacacacggtgtgcagcaaatcctcacttgcctccttttagatcagctgccaccctagggtttccgggtaggcctgtcgtcaggtggttagtatgtctccagagcacctttcagggatggtgaagggttcctgaatgcagcctgtgaggcttgtggrtgttgactctttgcattctgtagccaggagagctttccctaaaggacacgacccagagctccacataaagactgcagtcctgtccatgaccctctattgccatgtgggtgtcactgttatgtttatggactctcttccartggagtggtgatttacagtgttctgtcctagaaattgatgaactctgagtaggttttcccccattcataattcttcccgtatcccttcaacctaaaaatcatgataaaaaacaatttaaagatgctgtataaatctgccatgtttgataaaacaggggaaatctcatcacctmcaatgacagtggtgtaaaagccctgcattttgtatacttttgcttcatgagggttttcgccacagaaagaggtgctttgtcagcacgttrgactcttaaaatgtttatacggttggttaacaagcaccagcaaaatggtaacaactgcttatcgattcttatatcgagtacgggaaaaatttaaactccctgatttatttctgcttataaaaatatttcctggctttcttttagccttcactgtttctccccccaccacttcccctaacacacacaccaggaatcatttatttttgtttgatgttggtgtgtctttctcaggcaagaggtataaactggaggccagaataggtcttccaaatgttagatgctgaatggctttagtgattcacagttgtaaacataggagctggagggatggaggactctcccgaaacagtgttttagtgttgtgcctgacaggaaaggagagttagggtaggagctggagagggatgtaacgtwgatgkatgactaggggtttggttggcattaggaggggtggcttaagggaagtattgcttttttattacacagataatctgtggttattgtaataatatttgagggtagaaagaatattcataatctttttatcatgaaatattattttcatgtatatcctttcaaaatgttattccacagatagataaatatgaatgcatagttttccttaaatggaatcctactaatcatttataacttacttttattatttcctaatttcaaattaacatctttcatcagtaaaaaatatgcctgcatcatcagtttaaaatggacacatagggtacactcaacgcagtaaccatcatatgttgagccaacycctaatggtggaccgttaggtcacttcagcttttgcttctttaagtggtgctatgatgaacacctttgtgaatcctatatctttgttcactaggatagattattagaagtagaattgataggtcaaaatgtatacccagtataaagggattttatacatccccaattggggagaaaagggtgtgtgtttgtttttaacattctactgctgtgttactcttgtggtataagactggatgaaaccctgttactcgtgtagccctatttaaaagaaagaaagtcgcgaggctgaggcacaagaatcgcttgaacacgggaggcagaggttacagtgagccgagatcgcgccactgcactccagtctgggcaacagagcgagactccgtctcaaaaatataaataaataaataaataaataaataaataaaagaaataaagtgagaaagctcttttgatacccaagaatattttgggtcacaggccctttgtgaatctgactaagctttggatactccccttgaaaaatgcatrtatatatatatgtgcacatacacacacaattccactaaggcatggacctaatccatggatttcagttaagtctttgatttctagctatttcctaatgattggttttcgtatataggtcagtatgctaattccagtaggttttctgggaaaataaaatgaaaatgcttgctttcaaacaaacatttgatgttgacatttaccttgccccctttctcagatccaaaaccctttggcatccaaagatgccaggtgggaatcccataacctcttcagccttcaaccaacactgtacactgtagccaagctaggcttttctcctaaaattctgctttcacaaccattaccaaatccctgacacttcagctctgtcagcctgcccagttgttgtctgcgtgaccctgggctatagccgtgtttgtaccttgtccgtaatacccctccacggcacctttgctggccatttctttttaaacgcttgtctctctgaaagctttctcaagttatcctaccgttggagcattccctcctacactggtcatgggtccctccctccaatcccaatagaaggctcacagcagacacagaatgcaaggtgatctgtggatcttacaaaatagtgagaaaaatcatcggtaaataggcaagcgaataagtcagcgtgtaattgtaaattgtgaattgtatcccaagacaagaatcactttcaaagttgaaaaagaagttttarataaagggggaaatgtgtatggtgtatatgtatgaaaataggtgtgtatttcacatactgtctactctcattctcattattcatatttataaattcgcctactcactgaatttatttgtaaccttagaacccatgctcactgcatttttgccttgtatagttatctgctcagttccacttatttgactatactcttggccgtcatttaaagtcccgttgtaattcctcatcttaaaagggattcctgcttgaaaatactcctgtgtgcccaggtgccttttgtccacgcattttgtttgtgccagttccttccttttgttcttattctggccagttttatctccaccattgaattccaaaatgatcagatctgactgctgtcagataagtgataaggtttggtgttcaggcaagagcaagtcagtgccaggcacggtggcacacacctgtaatcaccgctactctagaggctgaggcaggagagtcgcttgagcccaggagtttctggctaacctgggtagcatagtgagaacttgtctcaaaaaaaaagttaaaaatgaagaaaagaacaagccaaatgcacatttgtcttttttccccctaattttttacattgcaaattttcaagaataaaaataataatataatgaaaacccatataccttccccagttcaccagctgttactgtttgccacatttgccaggtcttgctcattcacacacgccctggccctcctccctctcctttatcaccgtcactcttgcagtatattcttgcctgagccatttgaaagtaaatcgcacatgtaatgagacttcacccctaaattcttcaacatacgtctcctaagaagaagcgtgttctcgtacataaccacagtacctatgtcacacccaagacatttatcaatgatgcagtaatactatccattgccggaaaatacaatccaatacaaatttctccaaactccccaccaagcccttccctgcccctgcccctgccccatccaggatcagtaaagggtcagtccattggctctccttgactatcatgtttgttttatctcctgtaatctggacacccccactttctcctgtttttgtctttcgtgatgttttggttttggagaacccaagccaggtgtcctgcagtctggacgtgtctcattgtcgtcatgcttgggttcaggttaaacatttctggcaagaatactgcatgcatgatgtgtgcttcccattctgtcacatctgcaggcacgtattgtgagttccattattggcgatgccaactttcagcatttgcttgagatctctctttctccttgtcattaacaagtaatatttgaaacctagttgataccctgttctgcagcagttttgcccacrttttgcatccattgatgatcacccttgcctgatttacttattacatgagtggttgcagaagatgattttgtacgtagctggccttattttataaagaagagcttcttctttcctccttcctctctcttctcccactgttttttgttttttttttttaagtatcatgatagattcatggattctctcttattcagcacattacaatccatgaccatccttattctttttgatgttcacattgtcccacatccgccagtgggagcccttgcaaccccgttcctgtgtccctctgacatggccccattagtctctgaacacatccttgctttataacagtttttttttcctttgtcttttcccggtagtataagatgyaatagttattttctatccatagttatatcagaagctgagtatttcaaattagcaaacaaaaaaaggtgtataccccattcatagcttaaaaaaaaatgcaatgtatttctctagaaatggatctctggatcagagcccagctactaataacccaaataaacagggacttcctgtccatgaagagtacaccattaagaaacatcgagctcagcattgtttgtgtgtgaaatgcctccttcttgacaggagaagaaggaaggtgaattctacttgtgattcagaatgtaagaacattcatcggacaggggttttatcgtttatgttgcgtgcccagcaccacatgaagtgctattatggatataaaaggagttgctgttaaaaaggcaaaataagatgaaacgaattgaaaaatagaggcttttatgaaaagtaaatacattatggtgtacttattagtgttacaggaattaataggcgaagagggaaggcagtgaagagtgtggaggaattagtctgtttctgtgtatttgtgtaggcatagaacaagacattttctggtataagactattaatggtgattatctttggggagggtgaccagagggataagagagaaggaaaattaagcttttaactttatgcccttctgtgcttttaaaaattttatcccttgcgtatattactctgacaacaaaaagactaatgtaaggtttttgttttaattaaagtatttgaacttacgggaaaaaggtatctacaccaactgaacaaaatgcctcaagcctcatgatgggttgggtcaggtgatgagagtacagctgatcattcaggcaacaggaacttctggaagccagtgatcaaagcaggcattgggctgggccggcagctctcacctataaaaccagcatcttgggaggctgaggcaggaggatggtttgaactcaggagttcaagactgatttggtttgaatggctttttggttttgacaagtttcaggtgtatatacgtgttgtttgtttctctcccttgaatataacaacttatatcgaaggaaaagaatcaaacactctgaataattcaactttcattcattcacatacaaatggtcccagttcatccaagcgagcttttgaaaaagaatatttcattcctccttgattttaagcaacttatcactttcctcctgtctccaaaagtaaccatgtgaaacccagaccaataatttgtttcatctgtgcttaagtctcacctgatgtggtgatgataatatacatcccaacgtgggttattttggggataaaatgactcggttttttctctcttctactcttggaccgatatcctagaacaaataggacaagtaggaaaaggcttcaatacaataatgttgtctgctctctttctaccctgcccccaaaatcaacagtcagtagaataccttgaaaacaaatgaagaataactgcatgatctattcagcttaaacagtgggctggagtatcacgtgacagggctttctaaaatgattgtcaaacactcagctctccgctgtttatgtcatgatatggccatgtcaggtaacttctgtgctttcttaaatgaaacctttaaatacttgatgtggtttttaaaagtttttctatgaacggctttcaaaactaccacagtctatttgtagtgatagttactgtaatgtgtttcttaaaaaattttaagtttttaatgcattaccaaagctgaggtaaatacaaacacagaacagcatattcttcaggttagctcttcacggcacttgctattctcatgtgtccgaatttatttttattgaaatatgtgttataattacagttttatataagtttataattttaaaaaaaacactaaaattatccatctagccattcagtatactcgtttgcttaaataatctaaatttcttccataattcgtagtttcatttgagaattttttagtgaattatatgtgaagctcaatcacagtaccatattttctaaaaaagaaactaaaaggatataaacttgcatttgtggccgggcgcggtggctcacgcctgtaattccagcactttgggaggccgaggcaggtagatcacctgaggtcaggaattcgagaccactctagccaccacggtgaaaccccgtctctagtataattacaaaaatctgctgggtgtggtggtatgcacctctagtcccagctactcgggaggctgaggcaggagaatcatttgaacctgggaggtggaggctgcagtgagccgagatcgcgccactgcactccagcctgggcaacagagtgagattctgtctcaaaaaaaaaaaattaaaaataggaaaaaaaaataaacttgcatttgttacaagtttcttgggaaattgggttatgtcatatctaaaaatgaatctcctggaattcagtaattgcatctactgattagtttagcattgacacaaaactagagaaaaacaaattagaacaaggacagttgtgtaactaatctgcaaaaactgaaggaacacttaaagctgctgtgccttttttatgatattgcattacagttctttgaaaaataaacacagatatacacttgtgtccamgctagagcaattgacaaattgctataacaggtaggaacaataagtgatcatttgaatgggaaattaaggcaaactgattgaaactgggaatatggtgtaacttttatttctccattttctcaactagtaacaaagaaaatgtttctaattgtatgcttacaaagaattcagcatgataggaggaaagatataatattcaaaagtactgcattaaaatgtttaatttacaattttgaaagcttctgtagaacataataacttttttttttctcttggcactagtaaattttttttttttttttttttgagacacagtctcactctgtcgcccaggctagagtgtgggggcacaatctcggctcactgcaacctccgcctcccaggttcaagcgattctcctgcctcagcctcctgagtagctgggatcacaggtgtgtaccaccacacccagctaatttttaaatttttagtagagactgggtttcaccgtattggccaggctggtctcaaactcctgacctcaagtgatcagcctgcctgggcctcccaaagtgctgggattacaggtatgagccgccacacccggccaatatggatttttatatactgaagatatcatctacccagaatacacataaacaaagggaacattactgacactccagaaacacctagaatttttttgcagtcactatactccaccaccaatcagcactatcctgacttctgaaataggttggtttttctgttttttcccttctataaaaggaatctcatacagtggtgctgtctttatatattatctagatggaatctgatcagtcttgctcattattatttgtgagattcatccatattgctgcatgtagatgtggacagttcatcctcagagctgtatgttttttcatggtttgaataaagcacaatgtattcattctttttactattgctgggcatttggggggtttccagttttgggctagtgtgaatagtgccaatgtgaactttcagatacttatctttagtgagctgtcattctaggaatggaattgctagatcatagattttgcatatgtgtccagctgtagaaaatactaccaagcagttgtccaaagtggttatgccaaaatgcattcccatcagcaacatgtattctagcttttctacatcctttctaatacttggtatttcctgtattatttttaacaattctagtggatatggtggttttaatttgaatttctctaacgagatgattgccttttcatgtatttatagatgacagcatattccatgtttatagattagaatactcaatgttataaagttgttaatgttccccaaatatataaatttaatgcagtcctaggctgggcacagtggctcatgctgtaatcccggcactttgggaggccgaggatcaccagagatcaggagtttgagaccagcctagccaacatggtgaaacccagtctctactaaaaatacaaaaattagccaggcatggtggtgcatgcctgtaacctcagctactcgggaggctgaggcaggagaatagcttgaacccaggaggcagaagttgcagtgagccaagatcgtgccactctagcctgggtgatagtgagactctatctcaaaaaaaaaaaaaaaaattaatgcagtcctgggactagcaaattttcttttgcagaaactgagacgctcattcaaaaattcacatgaaaatgcaaatggccaagaacagccaaggaattcttaaaaaaaaaaaaaaaaagttggaatgcttctgccaccagatgccaagcctgttctaaagctctggtaatgaagggagtgtggcgttggtgcgaggctaggcaaactgatcggtgaaacagaacagcctgcagaaagaaacccacttttatacagtcacctgattatgtcaaaggtggcgtgcagtgcagtgggcatggcacggccttgtcaataaatggatttagccaatgggattgctatttgaagggaaagatgtcttgaccccttcctcataccatacatgaaatggattgtagatttaaatgggaatggtgaaacaatgaagtgttggaggaaacaaaaaacacctttgtaaacttggagcaggcaaagacttcttaaacaggacacaaaagagtgaaccataaaaggaaaaaattaatacattggaccatattaaaattatggtatcagagtaactattattgagagaatgaaaaagtagaatgaaaaggaagaaaacatatgaaaaatttatatccacaatatataaagaatcctacaaatcgatttttttaaggctgaaaaccaacttttaaaaataggtaaagacttgaatgttcactttacaaaaggccatatccagatagccaattaacatacaaggattccatcttttattgttatcagtttccctttcgtctaatgagagaatatgtatgtaattcaactattcaaatactctatactaatgacgttcttaaagagtatgtttataaagcattggcattgtgtatgattgcattaaagtacaacatcctttaaatattactgtttaggctcatgatgttttggtgccatagacatataaacatacagaatctaaaggatgcaacagcaggaaacaccagatggcttcacagatacttataaccctttggaaaaagtttttccattaccatgaaatgtgagcaaacagatctccyctgccacctgcctcctgtctttctctttctctctctctytctctctctctckctckctctctctcgctcgctctctgtcgctccatctctgagctgtagacatcacatccctgacccagggccacatcaggctcactgtcgagggtcagtagtgtcatccttcrggaaacactgaagggacatatgaggagcaatgatgaagtaaggaggcctcttgtgtgctctgcctggagacttagtgggatttttaaaaataaggtaaatgaaatgggtgtaaaattgacacaaagaccaagttaaaacattctgctctgatacatactgattgaaatcatctagcgagctttagaaactagcagtgcctgaggccaagagtgtagccaggtgattctgcagtgcaggcagggttgacagccttggtrgtgctcagtcctctcatagttaaagctgaaatgccatgctcacccycctgagcaaccctgttaggctacatgacttgtgttgtggctgggttggggaggagttctttttacactttttttctgggggttgttgtaaatcctgggaatgagtaacagaaagtggtaagagtgtcttttcatgaagatgctcacagatttcctaaagagatagacttccctcccttcctaatcaccccttgagaacctcgctgaagataatgggcacccagtgttatctcagcagagagagctcttgcaaacaagaaaggcctagatcgttcatgtgtcccttcgtctttccttctcctcagccctactacactgatcaggagttcatgagcgtaacgcaagtatgtcaatactgtgaaagcacagggctccaacagcctcctccaatgagaaatgtagtggtaggagctgttttaatttttatttcttaaatgctattgtgaatacagatatactgtcatgaaaatacatctctgagatatttacatatttcatacagccctttgcaactgctttcttcagcagttaaaatcttactctcctcttcagtaacaaaaaaataataggtatattttaatattttgtactatactgctttgatttcataagttattccaaatgctaaccagtaaggctgtactcatctaataaactatttaaggttgtcatatgttcaagaaaacaggttatatagaacaatttgaagacaatgcaatagaaaaacttttaaagatagatcctactaatttatcatttagctaataggtttttgcatttcttatatttttctgtttctttacctatcttttctgccagccaaagagcaaacagtaaataaaattttcatctacaacctccaacctggttctaattcttaacatagtttttcattcactagttcagaatattgttatttaattttaaaaatctaaatttatatatcattaatataaggtggaatattttcataattctgtaacttagcaatttcttcttctagttttagatattccacatatgtagtagtattatcaatgtagggtctcagcattttccatagtttggaacaagaccatattcttaatttgtctagtgggaaaaggaaagctgaagtccagagcagttagactgtgactgactttctatattattaacatagggtacagaaaatggaatgccatttttctggtctaaatcgtttgctccccatcacatatttggagcttttccatgtctataaatggccagttgacttagaggcatagggaaggagagcatctcgtggtcagtgaaggcctgcagaaccgtgcactgagcaggtgcctttccaccctacctggtgtattagttcattttcataataaagacatgcccaagactgagtaacttctaagaaaaagaggtttaatgcactcacagttccacattgctgggggggggtctcataatcatggcagaaggcaaaggagggaacaaaggcacatctcacatggcagcaggcaagagagcatgtgcaggggaactcctttaaaaaacagccttggtggtgctcagtcctttaatatcctttaaatctgatattataaaaatatcagattttgtgagacttagtcactaccacaagaacagcacggaaaagacccgcccccatgattcaattacctcccaccaggtccctcccaccacacgtgggaattcaagatgagatttgggtggggaaacagccaaaccatatctcttgggttgagacccatgcctgatgcatgatgcatcagccttctgctctccacttctcagctgagcatgtggagggtccgagaggctagtaaccaatccaagggagttgaacccaggtttaccaaactctgaaattctaccagtttgctactactccaggagcttagcatccactgggaagaagggaatggtacacacacaaatagacacagctgaagaaaagggccatttactgttatgagttacacaaatagcagtcaccaagctaatggaatccagagaagtaagacctcacttccggatgggtggtcctcgaactgcttctgcattgagaagatcagccgtaagctgaagttttaaaaagagaagggatttcaggaagcaaaaaactaaaatggaagaaaaacatcccaggaaaaagtgatggcttcaaatgagaaaggcatagacaagggaagatgaggatgtgagaaaataaagcagattccaagccagtgcacatgtgtcaagagggcagagctgtgtttgatagaagccaaagtcaatgttcatatgctttttgaggttaaaggaagtatcaagaactgtgaactgaggaagtcccataaaacttcccagaatgtgattcgaggtagattgtaaaagataggtatgaattgtaaggaaaggtcttgaacagaatgtyaagattgaaagacccaagacctaaggtgtgctcgcccagtgggaggctagaggacaggttttctctggagagagsttgagatgggcttggatagtagccatgtaggcggtaaaggaccactaaaaatacttttgttcaaaagctactctcagcagggtcaccagtggcctctttgttgtaaatacaatgaataaattaaaataagtcctttccatcccttcttctgcatgatcactctcagcttctgataatgcattgaccagtttctctggaaaatcctgctgcactggtttttgaaacacccctctctcctggcttccctctcactatgactcagtcccctccatagccccttctaggcttgtccctttgtcccagcattgcataatctggccctgtcctctactcatcttcatcttctcctgagtggggatgacacccacatacgtgtctggggcccacccccctgccaggaccccatggggacyatcctacctgcctagtatacagttcctttggaagagtacgatcgctgctgtcagtctggccccctccagcccagctttctcccagacacagatctggtcatgcctttccccgaaatccatggctttagcatacagtggcattagaatttccatgatcccacctcccccatgtggcccagccgaggtccaccktcagaacctgcctgcatgatgaggrggccaaggttgccttctcacccacatttcagtccaattatgaacctttaaaatactccctctcaaactgctaggcatgttgcccctggaaatctttgtttcttccagatttgaccctcttccagcctggcaaaggmaatggctgccactctagatttctgcttgacagacatgacctcaagacctgcagacttgaccaggcatggtggctcacacctctaatcccaacactttgggaggccaaggtggaaggattgcttgaggccaggagtttgagaccagcctgggcaacatagtgggaccctctacaaaaaagtaaaacattagtcgggcatggtggtgcatgcctgtagtcccagctacttgggaggctgaagtgggagaatcgcttaagcccaagagtttgaggctgcagaaagctattattgcaccactgcactccagcctgtgtgacaaagcaagaccctgtctttaaaaaaaaaaaaaaaaaaaacgtggagaccagagaaataaacctgcagaccagagaaataaacctgccatagccaatttatctcactctgtgtgtggcaagggctttggaaaaraatgttatcattaatcstggtttgtgacagtgcattcagtgtaaatttttattgccaagaatacttgcccaaggtttttctgttcctgtttgtttatgcttcttgaaatactttgaaacactgcttaattactcttatatcggtatagagatatatgtacatatatgaagacacataagtgtatatgcatgcatactgtgaacatacatgcatgcattcacatgcatgcataaatgtacacacacgcacagacatatacattatacatttgggtggtgggagctatttttcttcctttttttcttttgttcttttcttccttctctctgatcctgtccccatagcaaacagagtgtgkggyttgtgttgttgttgccttggcgtttcgggccagcccccctgtcaartcctgcatcctcttttcattagacctcctggatggcagcagggcctgccgacagtgcagaggcggctgctggccggctggggtattctcactgcagtctgcgcctacaggcttgatgaaaatccaattcatgttaccctactctggctcaggcactgttaaaattgagagatatattcaattttaagcaagaacaaacgaaatctgtcttctaaagaaaagtaggaacagcctcttgtggcatttctttaaatggactaatatgttgatctcggagaaactgggagccatctttcgtgttttcattattaagccaggtaaaatgaaaatcaaatctcactcccaaatgccacctctgggaattctctgttgtttctgttttaaagtaacctacatgattccttctgtcattaaggcatactgttgaaaatgtaagatttcagtcttcttttttttttttttagttttagatactgtttaggtacttcctgtttgcagggctcatgcaaagaacatttcataatgttcactggttgtgaatatctaattgtatgagaaataattgctgtggatcttacttcacaaataaacgacaatccgaacctggcaataacctaccaattatcagagtactgcatcatagtccgtcacagatacctaagtccttatttatttacatgtttgtttttaagtgaaattatgtgtcataaaatgtaggcattaaatggtaactttyrccacactaggttattcctgatgatctagggaaaatacttttttgcgttgastgctttcgcttagtaactcttataaaggagcaaatattcatatgattgtaagagaacagaagaatgctttcttctttcttttgctaggttcactaactcactgaccttgtagctcagtgctgtttatctgactcgaagggggaaattctggaaagtgggcttagcattgctttattcttacttaccaggaaaaactcaaaaggccagaggggtgtgtgtttatttttctcttaaaaaggtggaattgggctaaagcgagagcttcaggggggatcttgtgacattcccatcatgtctgttgtgatttgaaagctttgcaggttcatgagcagctgcagagctgcgcctgggaagtcaggaytgccttgcagtacagattctcacccgtactctcctatccatctttccccgtcaccacccctccctgaagaagagctgggtgtttctgtttctgtttctgggtttagcacaaaacagattataggagatctggattcggttgcataaaacaaatctgagacagggcattattctaatgacatctagagcatgaggcagctcagcaaggagcctccgcaggtcacccatccagactcgaagtccttcaagaygcacgggcagccccggccattccacacgtgcaccattgctttgctttttatttctttgcccctctatcctggcttctgcccccaccttattctttctgctaccagtggattggctgccactgtgttctggaatgctgtgatgagttcagtatagcaaatgcacaggcacactcttgcacacatacataccatgggttcctgccccagccactccaaagacctggaccattagcaggcacctgtggtcccagcacctctcctaggacccaggggctctccacctgaagcacagtgccttgctggaaggagccgcctcttggccactctgcagaaaaaggggctgtgagcctcagcttcatgaacggctgccttgcatgttgagcttaggctgtatctttggaacacagtcttcctcttcagagctaacttcgtttcatcatcctggatttgataagggttattcattctagctctttgcctcctattttggcaaacactccagaagacrgatgataccatcctattgaaaaaatgactgttgaataacagattataaatctgtgtgtttcctctggagaactgtgtgtgaaatgagaacattgggtttgtccagcctgcctccaaacatatctcaagatgtttctctctgcctgttgtccttagccataggagacaactaatgtgtatttcacagggawcatgtataatactttggaacatacacaattccgagaggtgtaacataccagagacctttgctttttcctttgctttgcttaatgccttaaactttcctaagtgctcctccgtacattaacatgtgagccttcaaagtagctgggagaggctatccatacgttttgctgccaagaaaaacaggcccaacactttacaacagaataatggcaggaccagtgtgagaatcctggttttctggtaggctggttccctgacatcctggttcagcaacgtatcatccttaaaagatatataaatgttggcatgactacccagcctttccaacacccacagccagtgaaacccagttactgaaaaatgatggaaagtaccagcatcagtaatttccttctgtgtatatgatctcagtggctgaggaattgcctagtagcctagtaaagacggactctgaaaactgtcctgtttctgtagtagtatttattagtaatccatctcagccgggctcagaggctcacacctgtaatcccaccacaatgggaggccaaggcaggcagatcacttgaggccaggagttcaagaccagcctggccmacrtggtgaaacccccgtctctactaaaaatrcaaaaattatccaggcggtggcgcatgcctgtaatcccagctactcaggaggctgaagcagtagaattgcttgaacccgggagacagagtttgcagtgagccaagatcacaccactgcactccaacctgggcaacagagcaagactctatctcaaaaaaataataataataaaagatccgtctcacagtaggcagggtaggggactcagtaattctgtacagaaaagaagcagtgcttctgtgtcactcttgctccgtctatscatcccatccaccrtcctgttagaacggcattgtttattaaaagtcccaggcctggggtgaggagacctgaaccctgatgcccccctctgacactgtgtaatttgggtgaagttactgcacctttgtgaatccgcctttcttttttatttttatttattcatttattttttgagacggagtctcgctctgtcgcccaggctggagtgcagtggcgcgatcccggctcactgcaagctccgcctcccgggttcacgccattctcctgcctcagcctcccgagtagctgggactacaggcgcgtgacaccacgcccrgctaattcttttgtgtgtttttagtacagacagggtttcacagtgttcgtcaggatggtctygatctcctgacctcatgatctgcccaccttggcctcccaaagtcctgggattacaggcttgagccaccgcgcccggccgaatccgcctttctttttaatctgtatgaggtgttgsgttgtcttctgatgtttccatctgtgtcctgtgtgatcgtagatactgcatgccactctctgtccagcacgtgatgccctttgcaacctcctttctcacccaccctggggcttgggagctggagatgggggaataggggtggtcagtgaaatattaaaaatcagactcctatagacacagtttgcaggtgttatatggagttccttctactgtttcattctactgcattacatttttatgttaacttaataggctaatattttatgaacttgtaagattgaatatatggaatgaaatcaatgtttctgataattacttgatggggtggggagtttcaggagaaagtcatttaaaacctccagactgatattgattaaaattagtggcttaaagatttagaatatctaatttatagggtttttttcttggttgactctataacttaggtaaaaaaatgtttccgtagcttttatgataacatttagcaggtaattttctttactagatgtagggaagagccagcaatttacaatcagagcattccatatatccctgtttagggcgtttcagggtttattgctgcaatttagcatttttatctgggatgttcaacttctaagggaygggctctctgtttgctgttttaaaattattagagtctttcattgtatctgtctgtattcacagcatatatggtcatttcatttgagtgttcatgaacagccctcaatatatcagtgattactttatgtgtcgagcaccgtacaacagtggttgccagttctgactacacatcaggatgtatttttgaagacttacagaggtgattttgttgagcaycactgttgaaaaccacaggttttccaagagtgtccgtgtgtatttcacatggctttactcgtcaggaggtactggtgattgcctctttyacaaaagaggaaactgaggctctggaaggttctgtgagttgcccccggtcacaccgaacagcagcacttcatcaagttagtttccagatgtccagcttctctctgcccarctgggcaggcacaagagacttgctgtgttatgacctggtgtcttagttttgtttaagattagcaagggcgccaggtgtggtggttcacacttgtaatcccagcacttttggaggctgaggtgggcgggtcacttgaggtcaggagtttgacagcaacctggccaccatggcaaaacaccatctctcctaaaatataaaaattagccaggcgtgttggtgcacacctgtaatcccagctactcaggaggctgaggcaggagaattgctggaacccaggaggcgaggcagagctgagatcacacgactgcactccagcctgaacgacagaacgagaccctctctcacacaaaaaaaataataataagattaccaatggttcaacagaaacaaaaccaacagcctagtgtattgtgacagtcctgggacacagaggcagaattaggtacgtactgccttcatttaaggaacctgcaagcccagcggccttaagtatgctactaaggatatagtactagttgtcacataaataaaattctaaatcctgtcattaaataagccacccttatgcctttctcatctggcagcaagtttgtcagcacagggcagtgggtaaagagttgccgtctgctgcgtgtttccatttgccccgtgacctagcctggaattcctaccagccaacaacagaggaggcccaagaggaaggctttccccagaaacacgcagtcccatcccctggaaacagttccatgagcacattagcttagctgattatgagagtagctaggcatcagctcaggcactgagtaaagcagacctttgtaatggggctgagggaggaagcgtgtacaacagaggggaacagccaggccggagacagacacgcagctggggctgcctcacttctccrtttgcctccaccagccatgccttctgactgracattttcaccaaagaagatacgatggggtatagtttttaaaaaaatattagaaggatggcagattattaaaagccagctctcgccccctatttaatctagtacgtcatgccggcactggaggtagtacatgtgtgtcattcattgtttgtgggtgtttccccgagtgacatagttgtcgcttagttgccgctttcctaggaaatgcttttggcatcacatacttgcctgcagctgatcagggaagcagcttggcagggcaggagaaacacagagctgagtctgccgctctcactggcrtgctaaccatgggcaagctgcttagcttctcagcgtcatgttgctcctcatctatagaatgaagttgggtcagtgatttttctctaaggtcctttccagttcccatacttagtggttccagtgatacatattgacaagaatatggtatcattcttttattcattcatcaaatatgcgtgaatcacccatgtctgggagcttgctagatgctgtgagcaattgcagcagtgaatcccacaaagatcctgctttcctggagcctgtcatccagccagggagacaaaatgggggcacacaggattctcccagaaagcaaaatgggaaaaatactggtagaaaagaacaaggaaaaacttatcttctatttgttaagcctccctctgtgccctaaagactctatttgataatttatggacttttaatttaattatgacagtaatccggtgaggtggattttattatcccactttatagataaggaatcaaacattcagagaataaataatctgcccctagtcatgcagctagtaaattgagccaggatttcagaacaagcctttctgctttgaaagcccatcccttctccattagaacatgctgcctcctgataaaatgcttggcgaattgatacaggagatagcatatgccaccgagggcaggataagcattttctggtagaggagccgtttgctcaaggaccgagaagtgggtggaattggcacgtgtgactggggagaggatttcctggaggcaacaactgtgaaggagtcggggcaaacccrgtgaaagggagatgggccaggcagagacttcagaaattatttaaaaggcattttggaggccgggtgcggtggctcatgcctgtaatcccagcactgtgggaggctgaggcaggcagatcacgaggtcaacagatagagaccatcctggccaacatggtgaaaacccgtctctactaaaaatacaaaaaattagctgggcatggtggcacgcrtctgtagtcccagctactcaggaggctgaggcaggaggatcccttgaacccaggaggcggaggttgcagtgagccaagatcgtgccactgcaatccagcctagtgacagagcaagactccgytgcaaaaaaaaaaaaaaaawtcaaaacaaacaaaaggcattttggagcccctgaagatttggagtaagaggttaaataagtaaaggtcacytctagccatgccatgagagtactagtgtagacactgattaaataagctgataggggcttgaattgaagattaaaagtcaggaagggagaaaagaagacatggaagagaatgctataccattctcataaaggctgtgtcatcagaaatagcaaactcaaactcaggaacaggagccaaccttagaaacacattgaggactctgattttagtgactctaagctgcaagagattggttcagctgtagttctacaactcaagatagtagtcagagcctgagcatgcagcggttacacgcttgcaggggagagctggaggctcgattgagaattagtaaatgcatgacactctgctgctcacagaacatgtgcacatttgctatctcagatgcttttcaaggtggccaaaggagagaccacaaagaaagaataattatgttaatagctaacaattagtgagggcctactgtgtactaggcactgtgctcaggattttgcatacctcagacctcacctccctatgaggtgtcattattatatcccatttkcatagaaagtacctgaaaccagggtatccatggtcacagaactaatacatggccaagctgggacttgaacccaggtctgatggcctaaggtccccagccttggttaaacagagaaggaaaggaggtgcaacaataggggaaaatcagaatccaaaagaagaaaaaattgcaaggagggcagatatggttggtttctctgtttattcgtttgccattagaaactttgagaataaaggtccagaatgtagttgattaaaataatgtacacctggttcaccactgttactgatcacctgccttctacaaagcttacgtattgagcttttatgggacagatgggctgcggtgcattactgcctcttaataccctgctttactgtagcctgaaacaagggtggctgtctgaatgtcagcgaggacttggggatgccagaggcatgctgctgtgttcatctgcttctgtgcataaagatttaacatttgacgtttgccctttgttacatttatcctagagtgtcttaacattattttaaagtgatggatgttttgctcgtaggaaatcattcagaggtgtaacaaacrtartaccatgatgaactagtaagacgacatgttctgggaatggcttgcacctgcctgttgtgcatatgtgtgtccatgtgtggacaggcatgcttttaagtggaattgtgtatctgatgtttacgtatctaaataatgtatatataatttggtccagattttctattacctcatagttttattattccaatgagaactttataagaagccctctgatatcctcatctccacagtagtcagggacttcagggttcctcttcccacccccacccccagaagacataccaagattttcagattaatgcttcccctaattctagagtattttggagaatatctctctggagaagcaataaggatcagtggtttgagctaygactttgaaagcagacatgtaaagaggtttgaatcccagctttacgacatgctatctgaccttggttaaccactgaaaatctccctagcctcagtttcagtgtctgagataatgagccygacaccatccttgatatctgtgtcctggggacctggaggaattaatgagctgatgccataaaataccgatcctgggttgaagggcctctcctgtgaggtctttctgttgcagtgcgtctttgttagcaggcttttcccacgtgtcggggcttctttcaggccctcattttagtgttatcaccacattagtgcctatttcacttatttttgaaaacctgaaaatatcatacatactgatggaaatttcattgaatattaatgaacactcagaactgtacctgcaacagaaagcgaaattggctaaatattactcatccaatcatttatctgaaagatggtgtcattttccaatcctaaaaatataataattaatgtgaaatttcaggtttaaagtacagttttaaaatatcaagcaagcatcatgtcaaaaatgaaattttattaaaggagctattctagacgattaagaaatgaaaacttagagttctaggggaaaaattcagaaccacgtttaattttatacttggaagcgcgctacaaatgacaaggtaatttttatatgtatatttatagatttaattagcagttattccattatatctttcatataactataaatggaaaatgatttcagacaagaggctctcatcttcaagaattattgttggtaaagttatgggagagctgatttctcagtcactataagcagagagagagagagagaggtgtgtgtgtgtaaaggtcattacctgtcacctaatatgaattctttcattaaaaaatactttctataacttttctcattttctcatccatgttttgcacttgagactatttagaaggcaccatgacttgttcaaggcgtatacccagcccagctcaggattacgatacagagttctgactctgccccctcagcccagctcaggattacgatwcagagttctractctgccccctcagcccagctcaggattacgattcagagttctgactctgcgcccccagcccagctcaggattacgattcagaattctaactctccccacacagcacgggaagtcctgcataccctgctgatctgtgggtgtcacatagccttgaggctcataaaggtctttgcttctccttcctgcttttacgtttcagtgaatattgaggcactgggtagtggatgatggagactcggtacccactgctgagggtggggaccaagtatgcgtcatcctctcctcagtgcctcaaacggtctgggagccaatgttcaacaaacgagcatgcgggtgagtaaaacacaaccagctgtaagacgtgctgttcaaaagggcgggctgggagggtggccgggacaccagtcacggatgtcttctgtgagcaagagctctttcatctgggacctggtgatgagtaaggtgacgtgaagggagagtrggggagggcaggtggcctggggagtgctaacgagcttggtgtgttctggaactgaaagaagacagagattgttttcccgctccatgtggagagaaccagttgcccactaatttacaaaaggaaagtcggacagtaatctctcatcagcgtggctatcaatgagacytggagcttccaggaaaatttggcttaataagtaccatactgttacttcctcgggaatattaaaaaggaaggagcgatgagacagaagggcctaattcacccygccgtggaccacgtctgacttggcctgctaacaaagcatgtttaggcagtagggagagaaccgaggggagatggacgtctctacatggaaatattttstgaaygtgaattttagtatccctgtttcctgtcttccttcaaagatgaaaaggaatccatgtataaaacaggtagtcacatgagcatatgtaaagtttggttaagcaaattcaaggactttttctacttacctagggccagtatattctgtggacattgataacccatagtttcaactgtaacctcacattgatccccagttttcagagaaagaggacaccatctacttctggtcactggcattttaggtgaaatcctgcagtgattgtttactggtagcctaattaggtacgttatccattatttaacccaaaatccaggttaaaatatgacatcagtgactttagctagaccataactacacacgtttacttcctggagtcattaaactgcttaaagaaaacaaaatcccagcacacccttgttttgttaaggtaacaaaatgagctcgtatcaaacataaatacaggtttaaattactgtaaaatttttttgtggactcaaacacaaacatcacagcaaagcttacctgtgacccaattaggatcatcatgaaaacataaatcccagttctactcaagtaataccaatggcctggtaccaatggcttccagcaggccactggggtttgactgccaactaggaaaagcccctgcctctgggggatagatgatggggaaatcattccatccatctcagtgctgagctctcacatgctcttctgcttttctgtaaattgacctaaaatggccatctttgatggtctctcactttccctctaaatccctgatgtgagaatgtattggaattatttcatgtaacagtgtgtctgcccacagaccggcctcctggctccagcttagcagtgtccaacagtaaaaatagaaaagcccctgagtcttgtcttcttttgagaggaaagaacccttttgcagaaggcccaggaaccccctcctctagccactttggccagagttgtggtatgcaattattcctaagctgttcactggacaggtagctgggccccaccacaactgcctaacgtcaagcaagattgatgcctgggggctgtgctgggaagaggcccgcttcagggggaaattggggctgtgttgagaaggaaggagggtagctgtggagtgggccactgagtggggcctgcgtttcacaagcattccaggtcctgcctgggggtataaatcctggctctcccttttccagctctatggactgcacaaaagtataatactatctaacttctcggcatttctgttttttcaccaataaaaaaaatgaaggtaacaataccccctcagaagataacatgcgagcaagatggaagcacagacctggcacaggcccattctttactctgagtcaagtctagtctccttagggacagggcatcaataagggacccctcagcaccttgcacgattcatttagttctcaggaattcatttgctaggactgaatacgggaaacatgctactaaactgcccctgaactcacaggcttgtgatgtgtggtggatgagacacagcccgtgctgaggcaggcaggtctgaatccagtgccrgaagcaccatgtgccatgaggtggcattcgaatatttggagcaatgaagcgatctcattgaatgtatatatatgctagaggaattgcaatcatgagaaaaattaattgcagagttgatcgtagaggcatagtgtccaggcagaaacctaatccaagcaagagatcatttgacggctgagggaagagagwgccaaggggaatggagtggaatggaatggaatgcaggaactctagaggggatttaaaggctgaatatgctggtttgcgggcttgagttaggagcccacctctagcagtcaatattactagagcattggtggtgaagccgtgggtgtaaataagaccacgtgaagtgggcgtatattaaagacatattggtgacctttctgatgttttctaccatttcatattaataggcatgaggatcgaaaataggaaatgatttttcttttctcctccctggcagccttctctgctgtgatgttttttcctcayaaggctggggtcctattgctttcccttctgatgaagcttttttattacttggtgggtagagggccttaggtgtggcagagaaattccgcagcctcgccctcgccgtcatagtgatgaagagcgttgactycggagtcaccaagggaaattaagcacatgttttattaatctttatgaacctcagtttcctctcctgcaaaatgagaacaatactggtgccgacttcgcagcactgtttgcagcgtgagggcgataaggcrcttacacaggcgcgtgccccccacatggaaatgcctggagatgctgccggctcctccactcaccgaaactgcactttctctcctttgttctaaatgagaaaccaggtgtggggagcaaatgggagaaaggggcaggagaagcttgcctcagattccaactcatatgacctgtcagtgactaaagacggaatgccaacacatggattgtgtgtgtgaaatgccaggttggtgttttccacagggatgtgcccgttgttctctgctttctgtggaattctcttccagcgccaggcctggagatggggcctgcccttttacctctcaaatatgttcccagggaagagtgtgtccttctccgggagccaccccatcacactgactctcackttgggctcattgctagaaactctgtggcctgcgcctgcttcccatgtcgcgtcaaagcgtctcagcacagacctaaaggagacctcagaggtcacccagcgtggcctcgcagaaacacctgcgggaagggattacggaggtttgcagggaaggccgggcagcccgggagtgagcgccgcactgcagctcccagacacatgcagctcctgctcccaggcaggaacaaagtgatttcccagctcctggggccatgggtagctaactgattaaatacccggtttggaaaatwcacctgacgtatttctttttttttttttttttttttttttttttttgagacggagtctcgctgtgtcgcccaggctggagtgcagtggcgtgatctcrgctcacctcccaggttcacgccattctcctgcctcagcctcccaagtagctgggactgcgggcgcccaccrccatgcccggctaattttttgtgtttttagtagagacggggattcaccatgttagccaggatggtctcratctcctgagcttgtgatctgcccgcctcagcctcccaaagtgctggaattacaggcttcagccaccgcacccggcctcacctgacatatttcttacacgtaagccacttctttttcttgtccaaactgaggctagccctcacccaagacttgcctgtatctcagtgcaggtagctgagcaaggcacagccgccaggaggaagtcggggaacagcagccggagcctggggaagccctgcacaagttggccttgaggaaaccacctgacagacgtttgctcttcctcacagagctggtgagcattctgactatgtggtcacatcagatcagatcgctctcacctctctaagcatttctttttctggagtatgaagcagctattcagggaggaaagcaatttgatgtcaggggcttctttgagccttgggaattagacctcagaagcttagaattggagctcagctgctggtggaaratrtactgtgaatgttttattcagtaatgcatatataacattgagcagaatccaaatacataaatcacttatacaatagctgtgaagagccaccttccagcacttgagaacccggcagccagtggctcacaaaggcctctgtcgccatctgctggccgcatgctttctcatgctgttaattcttgctctggtattttttgttcccgcagcctttggcactcaggttcttctgctgtaaaatttgcctccatcagagctgtattgccttgtgtttttgaggcttgcagaagagacccttagcactccttaaaattctggcaggacagagaaaacaagatggagagagatgacaaagccgatttcttcctcctggcttttttttaaccagttctgtgcactatcaggccctctgagcttaggcctatgccagccacatctcaaggccaaggacacaatactcggtttgtctttataataggtcctgttattgtgtctgtcaacctcccgatgtctgtatcacagtcaccaatatattacgctaaggaaataggaattattcacattgccagtaaaacttgcccatgtataagcacagactcacacagttatgggcctgaagaccatccccagtggcgaaactgtgccccagaggttgccataagtcactggagccagaaggcatatttgatcccctgtgtaagattggccaccgtaccctgaatgacagtggtgtgctgacacggcatcagactccactcacacagaagatccgcttgtggtgcaggcttggcctcctcartgtggccacaggccctagagcgctaacagatgtcacttatcgggatcacccctgaggcattgtgaacaggaagtggcatcactgatctcccaccagctctgaaccaatacatgtggcatcccaacttccggagaggctggacagagcatatccggaatgcagccacgtggggagtcagagtagggcaaggatataggagtgctgatgaaaactgaaaacacaggggaccggcccgcgatgcggcctcctgggagacatctgcatgaggccagcaggccaagggtccatggctggggatggctgcrctctccttagggaaaggcattccagaaactgaagttacgaggcagcgtagggaaagcatcctgggctcttcaaatctgggcatggctgtgagtcccaaagcgttgtcagtttacaccatctcctaatgcaagggctaagtcattagggaaaaaatcatgtttcaggttttaaggggaaaaaatgaaaaggtgcatggcctttacctgtaaacagtagaagggggtggggaatggttgaatggtagaaatgaaaatcaagaaayctagcaatggctggtgatttaaggaccttgtatatcagttattgctgcacagtaagtcatcccccaaaacttagtggcttcaaagaacaatcttcatttattgccacatcccacttctataggtcaagaattcagacagggcrtggcgagggggrcttgtgttgctccacagtgattgaacctcagctggaagattggaaagctgggggcaggaatcatcttttacttagctgtctggaggttgatgctagytgtgagccaggagtctggccagggtgtcagccagaacatagcacatatggcctcactgtaacctgggcttcctcacaacatggcggctgggttccaaaggcaagagtcccagcagagagagccacacagaagccatattttctctacggcatagcctcaggagttgtacagcgtcacctccactgtcaaggttatagaacctgtccaggttcacatagagagaacacaaaccccttcwctcagtagaggagggtccattcattgtaatacaatcattggaaaacaccatctgccacaccggtttccttatcacctgtacccgcatcccccccgacacatgcacagaaacagggcagcctgtcacagaccctcagcgatcatggcatgggtttgtgctgggtaaataggtgcgtttgtgggtcagctctgcttctggtttgtagtttgacctggtcttaacctctctggatctcagtttcttcttctgggaaacaaaaaggctgagctccaaacccagtcattggaaactttaacgttttctcttaaccttttttataccctcatgcctattcctcagtggtagtgagggtcacggttcagtttggtgggggggtaaaagtttggaaaagcctccctcaaaagctctagaatcccttccagctctgacctccgtgagtgttgagatgctggtcatgctctttggctttttgggattttactttcctgctctgtaaaatgaagggtctactaaattatcrgttaaactttttccagctgtcatgtttgatgttagtatgcgttttgatataatgaggttccttcatccacaccagtactgttccgctacggtggacatgtgcgttggcagaagaaatcctgtatttacaagttcctgcccaggctattgaagaggctcttcctttctgtggaatgatagaagcttgagtggcttttgcagcagggacctgagaaatcagcctactctccactttacagagagaaaactgatgcgcagagaagccgagtgattgccaaggacagagggcgagttattgataaatcaggctacagtcctgtgacctaaggcagtgtactttactgttgtgacctcatcctcttaatagaaaatatgtgagcatgaggaccctgagwcataccacccccatctctcccatctgcattattcctatgaagggccagtaccctcaacagtgccatcttctttttatttccacaaatgtgataaatgctcaacttttgtgaaagtatagtttttcaaacatgaaaactagattaaaaagctgaacatccagaataattataaccataaggtagtggtagtcatgatcacacacagaggctcttggtctgatttctacagagagaaacaatgcttgaatacttgtagaactggacacctgaacaacaagttggaaggcttttaaatccatttggttggttatttaggaggtggaagtggcataaggaaggcagtactgctcacagtctaggaaaaaggaaagtctacgttttggtttcagttcgtgttacctcttttatttttcatagtggcaaaatatacgtaacataaagtttaccttcttaaccatttttcagcatgtatgttacatttttaacatgcttttgttgaatggttaagaatctaggaaatgataagccttacatgttcccaagtgcagatcaagttgaagcacaaattgactttcccgagcccaactccaggttccagaaacgggatcctcagccacacactgtgcatacctgtaatgcacttaagtactttctacttgtaaagtacagagagcacatcatagtttgtctaaacctttgtgttggtgtccttcaacgccacagccttatgtactttggaaatactcattatacaggtttaaatgttccttcctccaaacagattttttcaatcttttcaaattttagttaagctttatttttttttaagtattgttaaaagacaaaccttagacaaagtaaatttaaccaagtttaactgagcaaataacactttgcaaatcaggcagcctgtgaaccagaataggctcacagaggttccagcacagtcacgtggtgaaaggtttttttttcttttgagacagggtctcgctctgttgcccaggctgggaggcagtggtgcgatcacggctcactgcagcctgggactcccaggcttaagtgatcttcccacctaagcctcccaagtagctgggacaggcacagcaccatgccccactaatttttgtattttggggaggacagggtctcaccatgttttccaggctggtctcgaactcctgggcacgagtgatccacctgcctcagcctgggaattggtggtgtgcttgtcccagctgcttgggaggcttacgtgggaggatcgcttcagcctgggaggccaaagctgcagtgagccgtgatcacaccactgccccccagcctgggcaacagagcaagaccctgtctcaaaaaaaaaaaagaaaaaagtgctggggtcacaggcatgacccaccacgccccagcctggaagaaaaattataggcaaaaaaaggaaagtgatgtacggaaaatggaaatgaggtgctaaaacagccagattggcracagttcagttgtttgccttatttgagcacagtttgaacaattggctgcctatagccaaagctcagtgatcagcacaagagtagattatagtctgtgtacacatccagttaggttacagttcactgcatacacagaaacctttaaaatatgtaaagaggcagctttaggccaaacttaatttaacaatatcttgttaatattaaacacaatcatagcaaaagtgtcgaaaaccagtcaagtgctactgttttaaatcgagccaaacattaacttttatctgatactcctcattgtcctactccagtttgtatttgtaaatacagtgtgacctgtgtcatgaatgaaccttaatattctgttgcctaactttgaatgaagcctgcgccttcgttggtcagagttctggatatgatatgctcaccatgtttccagagttgctggtatttctccagttagcgaggtggaaatgcagcggtgcctgggaagatcagaggcactgggctggcaggcctgctttgccctgccgctcaccagctattgtcattcagaacaagctacttatgctctccaggcctgtcttcttctccctaccgcagagatgtcaaaacctatttccagagagtgttaacaaggacgacattcaattacatctacaaagtacctagcataagtgcctagaacatagtaggtactcaacgaacatcaatattactcttcttttgagatcaaattctcttaggcttatgtgcaacaatcactttgaagtcctctgattgctcgaaagactttctttaagacttcaaagtattaacctgattgtgaagagcaaaatgtctatgtctaaaggattaatctcatttctagcttttaacctgtcttaaacacctctagcacttgcttctgtttgaaatcccaaagaactctttctttctgttaactgktactcttaacttttatttttttctctttttacccccaggcataaagtccatagtcattgtctgccaccaggtttgttttctattgcatcttgatattttcttgtgttttcagtggggagcatgttagaattccttaatatacagatgtcatagtatataaggttttcttgtgacttagtctggaaatcattcataaaaaaaacagtcattattcttactggctactgataaaaattctttaagtaagaaaaactatcgatttttttttttttttttttttttttttttggagacagggtctcactctgttggcccaggctgaagtacagttggcatgattacggctctccgcagcctcaacctccccagcctcaggtgatcctcccacctcagcctcccgagtagttgggactacaggcgtgtgccaccatgcccagttagtttctgtattgtttgtagagacagggttttgtcatgttgcccaggctggtctcaaactcctaggctcaagcagtctgcccatcttggcctcccaaagtgctgggattacaggtgtgcactaccacacctggcctttgaatatcttctatatataaaatcttggcagaaatgtcttcttttgtcatcatgaaatttactttcatgaatcctcctcagtgccccttgtctaccattagtctttatagaatcctttttgacctgctgaaagacagcaccattgtatttttctttgcaacttgtggagccaccaccttccccagtacgttttgaccaaaggcaaagtgaactctgcaccacctcaggcctctgagtaacacagtggaaaggggtgagaagacttggctattgtggtttgcaaaaatggcaggatgaatgctccatatcctccctcaaaaatacattcacatgaggataatttgggtggtgggccacaggcagcttgcaaggacaaagcctgtcaactcttactccagtgtgtgacctgagtggagatgtctacaaaagagcaggaatcctgtctttgagaatagggcaacaatcaactgggtggttttaattattcagatagagtcacaggacattagatgcaraatattaaaatctccatcattcaggggaaatgatcttaaatacagatagaggcatatcactagccgggtagcagagtcattatttaaaggacactagagttcctctgtgaggaggaactgagctcaaagaagatgttcagtatcaatrcagtgagattacagagtacaaatctgaacacctttgtaagcttctcactaagtggaggagtggggccarctccaggagcttggtttttgcttgtctgagaatctcttgacaggtcctagaagcaaccattctatgttggggcttaaaaagaagaggtagtgtgatccagcaatcccacccctacatgtatactcaagagaaatgaaaacgtgtccacacaaagacttatatgcaaatatttattgaaaccttattagcaatagccaaaaagtggaaacaacccagatggccatcagataataaatggatgagcaacatgtggtatagccatacaataaaaatattattggtggtaaaacggaaccaagtactgatacatgctagaacayggatggcccttgagaacattatgctacgggaaagaagccagacacaaaaagtcacgcattgtgtgatttcgtttctgtgaaatggccaaaataggcaaatgcatcgagacagaaagtgggttagcggttgccaggggctagagaggatgggacatttgaaaggcgactaatgagtagtgtttccttgggggtaatgaaaatgctctaaaattgattgtggtaatggatgcacaactgtgaatatactaaaaaccattgaattgtacactttaattggatagatttgatggtgtatgaattatatctccataaagctgttaagagacatcaggaagagaccagagtttcttctgtgcggagccctctgccacaggaaaggaaggaagtctacccagtcttcctacaggcgctgctccttggggcggtttagcatgtcattaccacagactgtggctaggacctgtgggactcatttgtaaatgccaccttctttgacaacacctgggattgttgaaatgraagtaatcgattactagaagccattaattgaaagctgtgtgccaggcattgtagtaagacattataaataccatctaacttatgtaaaattgacattatcccattctgtaggtaaggaaactgagactacagggttaggtgaaacccaaggtttckgagccagtgattggcagagcaggtgtttaaaccaggtttgtcttgggacaaaccccaggctcttaagtactacattatcgtgtcttcccgcttctccaccctcaacccagccccagtcaaaaaggcagcaggaaaggggacaagttatcatttagaagaatactgatttggttttaaaagtattgaatagaatgaccaaatgatctagtgattccatttctcagtatataccccagagaactgaaagcagggactcaaaaggatacttgcccaccagtgttcagagcagtattattcacaacagcaacccagtgtccctcaacagacgcctggatgaacaaaatgtggtacagccgtacaatggaatgttactcagccctaaagaggaaggaaattccgccacacgccacagcaagggtgaaccttgacgacattgtcctaagtgaaataagccatagaagaaacaaatgctgtatgattccacttayggsggtccctagagtccccctacagacggaaagtagaattgcggttgccaaggactggaggggagggagaatggagagttagtgtttaatggctacagggtttcagtggaggaaaatgaaaagattctggagaaggatgctgttgatggttgtacaacaatgtgaatgtacttaatgccacagasctgtacacttaaaatgaataaaatgataaatgttgtgttttgtgtatttaacacacacacatacacatcagtattgtgtgtgtttgaaagtctagagctagaaagcttttttgagtatatttagcaggaaaacttaaaagaaagttctcgtctttggaggagacaggcctgaggcatccagaggaaatgaacaccacctagggagccagttccattcccatgaaaatcacacctggagcgatccgcaccctccacagccccaggagcgatccgcaccctccacagtcccgggagtgaaccgcaccctccacagccccaggagcgatccgcaccctccacagycccgggagtgaaccgcaccctccacagccccgggagtgaaccgcaccctccacagccccgggagagaaccgcaccctccacagccccgggagcgatccgcaccctccacagtcccgggagcgatccgcaccctccacagycccgggagygatccgcaccctccacagycccgggagcgatccgcaccctccacagccccgggagcgatccgcaccctccacagccccgggagcgatccgcaccctccacagccccgggagcgatccgcaccctccacagtcccgggagygatccgcaccctccacagycccrggagtgaaccgcaccctccacagccctaggagtgcsgttaccaagggagaggaaggagaagggaatagggatgagatctcttaaatagacatttgatgacattttccccaatttgttagttgcaatgacgaagactttttgctgtttaacctgttattatggaaaaatgtgaaaatatacaaaagtatgtagaattgtcaaatgagtcctgtgtatccatcacccatctttaagagttagatactctgtaatatcaatagatggtatttttcatccttacgcctacccatgctctcccgtattgttttgagaaactgtgtattcgttttcatattaaactattttggtacatatctgaaaagatgattctttttaaaacatagctatgataccrttatcataactaacaaaataatgctaattccttaatatcatcaaatacaaagtgtttaaattttaatgtctcacaaatatcaccaatcttcaaactgggtgatctgtctgtaatctgtctttaaaagaaatctataggccccatctgtatctttttttcttccttgctctwctttttccttataatttmtttgctgaagaagtcagttcttttgtctggattttgctgattttatcttggttttcttgcttatcttacrtaaaaacygaaagctctatcttaaccaactaggttcttagccttggccagacattacactcacctgggaagcttgtaaaatcctgacatgtgtggaaagcagcttgtcacttcctcaataagttaaacatagaattaccatatgacccagcaatttcactccaaaagaatggaaacaggttcagacacagtcttgtattcgtatgttcrcagcagcactattttcaatagccaaaagatggaaacaacccaaatatccttcagctgaggaaagggtcaacaatatgtggtatttccacgcaatggaatattattcatccttagaagtcacaaagtactcatgcgtgtttacaacctggatgaaccttgaaaacactgcggtaaatgaaagaagcctgacacaaaagccacatattatatgatttcatctgyatgtctacggaaacccatagaaacagaacatagattagtggttgccagaggctgggaaaataagaaaacagggaggggctgcttaatgagtatggggtttccttttgggggtgatgaaaatttccagaactaaatagtgttgatgattgtacarttrtgaaggtacttaataccactgaattacgcactttgaagtggtttaaatgattttatgttatgtgaactttaccacaattttttataattctgatgtataaaaacaccccagaccaagtaattaataatctcttaagtgtgacccgascatcagaatattctaaagccctccaagggatgccagtgtacacgcaaggtttggaatcattgacagaggctggacgggtcaggatcgtgtctttggagccttcctcacaggtggtggtggcgtgctagatttaagcccgtgcaagtttgcttctgtattctaaaggataactatgtcttttgcactcctgtcagacagcagaygctgtcaggaatctgctgcctacagtcacaaaaaatgttctctccttttttagaaaatraaatttaggaaaacctaagaagaaaacgatcgatcatcttgattttgcttttatgtgagaggaaagagccctctrtttctagctaccatatagatgtgtaaaacagtgccacccatagcctcacccgtgagatggcagcacggggacaagtggccctcaggctgcccagcacacacaccctgcccaacacaacaacagtaacaaaaagagacaaagtaaccagtcctgattccttggggaggcgggcgaaccttctctagtcatctwtgtcctgcagtggctggtgctgccgtcatacccgtagaatctcagcagtgcgtgcttccctaccctgggaaggaaatgtcatttccttgcaagastcacttctcatgagcactgataggccacagctgctgctggctctgcagccttggcagagttgcaaataggttaaacggagatgggagttctagttctcttttgcttcagccagcttccttttctggctaaatctgartaaactcaaaagaaactgggcaaggggtttacggctccccatggtgcttcacaaaggtaagttccacttatgtgatccaagaggtggttggcttgtgattttctttgctcagcattactcgttaatatcctgaactcacatttctgaaaacaactgtagctgagatgtgctcctggagcagaactacaaattaaacttggaaatcaaacctcccactttcactctcagccttttgtagcacaggctgggtactcttctctttgaaagcatgggattttcgtttaaaatgttaattagaaagaatagaagacattctttcagaggaggtgtgttgtagtttctgtttttgtttttgttttttttaagtgctagattttgaagtcagaagacctagaaaggagtatctcagctccataattcatttaccaattgtgcagatgtacacaggttactcagtttctctrgttccatatactcattcctaaggaaatatgaatattatgtattgcataggacaagggtaaaaacggtgagaaactaagtaaagcatgtaagcttagcacatgcccagtaaatgtcactttcctaaatatgtattgcttatgtattaagcaagtgatcctcaaacttaatccctgagaggcagggaggttaagagatgagatgcaaaaatgccctttttcttttctgtgggcctgtcctgaaagcaacaaggaattgggtacgatcatgaaaacttgcttcgggttaaaccaagttaaaagttaggatctgctgatatgtcttgatctgtcaactggggatccacgactgcttaaagataaaggcgtaagtcagggataaaataatgaagccaaggcatataatgattgcctctcaatcrtgagttgtatcctgctgcttcttttcacaaaacatattttccaagtctttaaatattcttctataatgtcgttcttaatgattgcacagtgaggatacggtacagcaaaaagctatggacagctctgtggcagctaatttgaaaatctaataaaaaataaattaacctgaggaatagaaagcttgaatagaccaattaccatagaagagattaaaatatctacyggtttgagccttttcagactttcttttggcctagtccttgatgaatttttgtgaatggcttacagacaatgttttctttgttgtctttggagggagcttttttgcaggcacaattttcttttttctcttttaagagatgaggtgttgctatgttggccaagttggtctcaaactcctggcctcaagtgatcctcctgcctttacctcccaaactgctgggattacaggcgtgagccattgcacccagccagacacaaatttttttcatgtattctctgagatacatgtgtgtgtatttagtttgtccattgtattattcaaattctctgtgattacctttttaagaggaatatcaaagctccccaccatcattttgcctttgtcagtttctccttttatttctaataattcaggttttatatacttcgctacagtcttatttagtgcttacagctttatgactgccgcatcctgtctgtaaatgttgctcattatttagtttgaaggttttagactcaattctgccttgtcaaatattaatataaactagaattttcccccgcatatatacccggtatatcttaactcatcccttgattttcagtcttcctttaccacttttgtttaaagggttttcatcttgttttgttacctttcccagttagtccattcacatttcatattatggctgatggagttgattttattctgtcttatgttattatgtattttagttggttctctcttttccttatttttaatggtttttatcaagtractattcattccctgtttatctctcttttgtcagtttggaaattccattctacttttctgtgcccttaatgactgtcttctgtagcccaatgtttataattagaagcatatattttttactattatgtataagaggataccagtttttcccaccaagacctgtttccctagacataaatttcataaagaagtttattgctgactagttgtttttcccgagtctctgagtgctcttgctgtgtaccacttgttgtcttcctctcctcagcagttttagaagcagccatttgtttcaggtttttctgtctggctcctggattcccttaggcaatatttctttgtcgtctcactggggcccaggtctgcttgttacagcaccccatgtgcctrcagttctgcaggtggtaaacgtgagtggctccctgctccggaggaccagtggggcagcagtggcggcagctgccagtctccctgttcccaggtcccctgtgcaatgccagcctgacgaacagggagcaacagccttgctctctagcccctgcttggcagataaagctcacttgggaggcagtgacagccagattcccagggctcacacgtctcctccaggcccactaatcccagaatcccagcgttggcctccaggccctgcatggtccaccaggaggaaagctctcatgaactccccctgcagyccacgcccaggcccaagacctcactcacaccagygtctcccccagcgctggggtgggaacaggggaagcatagtctattcagggctccacagttccagaattcctctctctagtacctcttaatgaaaaagatttcagatttaattagtttttgtagccagagctgggaatctaatccatatttagaacataatctrtaagaaaagcatattccaagtacttaccaactttgaatgaagacttctgcagcacagctgccttcccacccgtccayacccctgcttcacctcagcacgaatctctctgacttggcctgttgggctgctttgcgctctcgcttctccctcccttcagtgtggctggtrgagtaaggatggtcctaggtcctacattttcacattttccacagtaagatacattacrtttttaaaaataattgttttcaacaaagccataaaggaagatctggtaggctgaataatggcccccaaaggcgtccacatcctaatccccgagacctgtgaatgttacatttgatggcaaaagggacttcacaggtatgatcaaatgaggaccttaagatggagatcagccttggttatccacattggccctactgtaatcacaactattcttctaagaggaaggcagagggaggtttgattgcacagagagagaaagtggcagaagcagagatcagagcggctgcttcgaggatgaagcaggcaccccasgctaagcaacgcaggaggccatacaagctggaaaagacaaggaaacagattttccccagagcctcgggaagaagccagccctgacaacaccttgactttcacccagtgaaactgatttttgacttctggcctccataactgtaagagaataaacttgtgttgttcaaagccacctgtttgggggtaatttttgactgcagcattaggaagctaacacacagggtaatcctttggagaaacctgggttgtctcagggcagcccgcgagcccaatgccactatttcccatatycccagctgagtgcgggagcaggtagacgcagtccgaagatcacaccatcaagtgcagtggccactgatggcctggaagcatarctggggtgcaggcagggttgtggccgctcgcagcctctaagccctcagggacagtgcacacgtggagagaagtcctttgggggattgagcagttttttgagcaagygcatatgtaaggagcacatcagaagctctggagaggcaaagtcaagcctttgaagggcataggcccaagcactggctgcccaagagaagccccaggcccttctctgctggtagcatctgctccctccaggtgctggcggcatcacctagtcatgcaggtgacatggggcctcacacaaaaaaatgtaaataaaagcaagattgatgagcttggtcataccccatgtagtagttcatatccagagtcctgtgggaacatcgaagtgtggacaaagaggaaaccaaaagaacagtaagagggttcaagagacatgttcacaaaatagttatgaggagggaaaagaggagggaagcatcttctccaaatgcacgtatttgtgactgtcacttcctctcaaggggcactgaaatctccagatatgatttccttccctgaagaggaagaagttaaaggtggctcctttttatctgccatctgtcagccaggcagccttgtcactttgactttcttcaaagagatgtactccaccactatgaagcccagtagttccatttactcctgagtgaggggtgagctagggacgcaatttgtatctacgaggccacagggcattcttattttgcaactccatatcacccctgtgtacagctgggagcagggtgtgtgagcggtgatgggtgccctgcttccaggatataaatgtcatcactgcagtcctcttcactatggcagcttctataaaatatttctctgcagacagtaagaaacctaaattgggattttcacttaatttttattaatccaagcagaaccaagtttgctttatagagaaatcaacaactgtaagacaccctctcccattgcctgcccagactcttcctcgtccaggtgctgatttgtctaccaccaaaaaaattgtaaaggatggkgtaaatgtcaatttctgggtttcatactatcctataattcggcaggatgtctccattggaggaaatagggkgaagggtacagggaccctctctctactattttttgcaacttcctgtgaatgtatatttatttcaaaattaaaagcaagggttaaaaatggtaaattgtaatgtaacaatgttgtttttatcacaggttttaaaaaacccactaaaaataaataaaaatgaaaaaaggatgatacagatcacattgtctattagaaaaatcacgtaagctataaatgcaagctatatgtgtaattgtctagttgccacattttaaaaagcaaaaaagaacaggcaaaattaattctaataacaatttctttaacccagtatatttaaaagattgtcatttaagcaatacaaaaaaattaacatattttcctttttttcttactaagtctttgaaacccagtctgtattttatactttatagaacatctctgtttggaccagccatatttcaagtgctaaacagccacatgtccaatggagtagcacaagtctagacagtattggggctgtaattgcgaaatatttagtgactttttaacctgtattttttaacatctttattgagattcacataccttaaaatttacccatttaaggtatattattcagcygggcacggtggcttatgcctgtaatcgcagcgcattgggaggccgaggcaggtggatcacttgagcccaggagttcaagaccatcctgggtaacatgatgaaaccctgtctcaacaaaaagtacaaaaagaggccaggcacggtggcacatgcctgtaattccagcactttgggaggccaacgtgggcagatcacttaaggtcagaagtttgagaccagcctggccaacatggtgaaatcccatctctactaaaaatacaaaaattagccaggtgtggtggcgggtgcctgtggacccagctacttgggatgttgagacaggagaattgcttgaacccggraggcggaggttgcagtgagccaagatcgtgccactgcactccagcctgggtgacagtgagactgtctcaaataaataaataaagtatattattcactggcttttagtatattcagagttgtgccagcatcactacaatcaaatttaaaacattttcagcacaccagaaagaaaccccgtactcattcgcactcactccacactccctcccacttgcccacccatccccagccactaacctgccctctgtctctatgtattggcctgttctggatatttcatataaatggaatcatacaatatgtggccttttgtgtttggcttctatcacttagcataatattttcaaggttcatccttgtagcatgtatctgaacttcactcctttttgaggctaaataatattccattgtatgaacataccacattttatttatttgttcatcagttaatatgtatttgggctgttttcacttcttggckgttgtgaattgtgttgctgtgaccatctttgtgcacgtttctgaggcgtatgttttcattcccttgggtgtagttgctgtacagaatcattcttgcactgtacttcagttgctttttcatgcatttctctgggctgttatctgcctgctgtctgcattcttcaaatacctgagcatttctagcaactacactgccgatctccccagggtcttgaagggtttgtttccattcccctgagcattatactcagttggtgctggtggcctggctctggccaggtcactagcaaagggccaaggatgtgaaggtttttcatcactgtcttccaagggagaggaagccttgtgtttgcacagctctggaagagtcattgttctgcatcagaagagcttaggatacttctatcaaaaagtaaaggaaataatcttcatatctaaagggcttaactttgtggtaaactctgcagctttctataatagggtcccaaaggtaagtgacaggaacgtattactcyaattcagaaataaaccatgtgcatggtgaaaggcgatgtcttcgcaaactgcccagaaggaaggtcttgtcccaccaatgggcagtgtcctcagggttagacccagagtcagtgtccctttgtcttgatgctgagaaaagtggatcagccgccttgtttgaaccaaaacgcacatcagaaatgggtccaaaggaaagccacttactgcaggctgagtttgtgggattcagaggtcagagtgcaaacccagagcttttctcactgagcttatcatcaaagccttcaaggtttgctttgcctaaaaagagctgagtccctcagatatctcagtttcctagttcatatgagtacattagaacgtcttgtccctaaacagcatgaagaatgctcctgggaggggtgcctccctctgccaggctcagctgcaggcttgtggcaactccatgtgtggtgaccactctgggattcttgttcctcttctgccagggcttgccctgagaccttacacaggtgactccttctcttggaattcattccttcgtccagcagagtggctgaggcaccacgcgaggcactgggaacaggccagggtcactgtgctcgaggaactgacaggtgaatgggggtgtttgctcacagcctgggtcatgggctccatcccggctgcctagaccaaaggttccatgtcgaggcaaccaaagcaygtgataggccaggactagttgattggaagagggaggagagctgggggagggcctggcacccagccagggaatgaggattccgtaggagtgagccatcctagaaaccactggaggtttctgggccatgggttgatgtgatgagcatgtgtctctagagggatgacttcagcagccatgcaggtgcagcaaggtggggcacaggccccttctccttaccgtggctgcagcagccacgtcagcaaggccaggaagatgctcacagttcttgtatgaagatgactggcttcccagcctcttagggatagtttcactaggagacgagggaagccctgcactgctaggtgctggggacatgaaatgggctcatcccaacttcagggggctcacagtctcatgtcagagacaaacaccgaaaccacacaaagtatactcacaacccagtgtggctggtgctggatggtgacagggcacagttgtgaatacctggagcagttttccagagcatggtctgcggccttatcccagatctgctaactcataatctctggggaggcagagagccctccggtaaagccggcacccactgcagtctgagccctgctggccaagggagccgggcagggaggtgggtcagggacacttgctggttggagggcccgcccctgtcaggatgaagtctgccgcccactgttgatcctttgttaaatggctacctgcttgccatcatggtgattgaagtcgaatcccatctccctgaatagaggtgattgtcgcttggagatccacccatgagggatgaatatttctgaagtcacactttaggccagtcggaggcayaggcaaaaggcggaaatggaaaagaggagaaagaacaaagaagcaaaggacataagaactcagccctgtgtctgctaggaaagaaaccttttctctaaattttctaaaaactaggaagtaaggctggactcagtggttcacacctataatcccagcactttgggaggcygaggtgggaatttcacctgagacagagcagcgggggcagcagcaggagaaaagtggacatgttctggtgtggaggccaaggcttctgggccggtatgtggagccctacaagtgggttcttttccctctaggtgtttaactggaaggtatgtycagtaaactgggcctcagggaccacactagggctgtggagccaccagccaattccccaggccckaagacagccccagggacctgggaggtgagcttgctaagagagagcgtgtgcccgccctctccacggccctgggagagcagaggactaccaaagagccaccacagttggactggcaccagaaaacaggaggcccagctccccacctcccagaccccagtgtcrtctgaggctcccatccacgtcatcttcacctcttgcagcacacagctgttctgtgcagctgtgcgtgcatctcccctgcagaatgctagagaaaaactacactgtgagtggctcgatggtggcctgtcaccacagaccatggcttccttttcagggacagcccaaactcttactccgaggtcctcgccctacaggtgacactcaaaatactgaactgccgtgggccatcggcatgggcccctcagaatggaatctggtcgcgctagagcagcatgtcagtggcctaccaggccagatgggagccagggcaccccaggagagggaaaagggaggagggcagtttattaagtaggggccgtgggaacagctggaagttgttcaacttctgaccacaaggccagggcatgctgcctgaacgtcagttttgtcctataccccggccaagggtccccttcccccagaagtgcttatacgtatactcagatgtctcctagatcctgcgatgtgggggtcctacagaagagcttaggagcagtgtcttcgggggtgagtcacgttaaccagggcactgcttgttccctgctcaccgccccctgtcccaccactgctgactgcccatgtcccaccctctgttctctctcacctccactctccatgaccagctcttcctgagggcttctgggaacagagctgctgccttcccgaggctggggttgggatgaggacgtgtgtgctgrgcgagggtcaagtattctcagagcaccgggcccactgccccagctgaggccctgtcaggccctgtggctcaaggcgatgtttttccctctcaccattttggggctcccttcagcctgacttctgggtggggggagacaaaggagcccaggtagttgggtatgttggtataccgatgaccccaatatcgttagcctgtgacatcattcctggaaggctcccaagccctgggaaattgagagggtgttgctggccacgtgtttacaagtccgtggatgtcgcgtagcagctccctgagggaggtgagcagaggaacatactgcagccattgggaggagacagttgggtctgtgcgtgccaacgtggaaggatgcctgggatgctgagcgtgaaggagagcatgtactgggaaaccgtgcagacggggatgtctgcctcgtttgtctctgttggtattcacmaccatttcttgcatgagccagatgttggcccacgagcgcagaggtaggacagctgccaccagccatggcatgcagccaggaacaggtggatgtgggactgtccaagagaaacttctggaaagcactgggtcggcragaggagggagcccaacggggaaggggcactcattgcatctcatcaagggatgttgttcattcctgacgatttgatgccaaaaagcatcagactcccctggaccacttatttaaagaggccagcaatcarcacattttacaagcctaaatttaaagaaaaaaacaagtatgacttctggttcctactctggaagccctttccagttctgagtgttgcatttctggtgcaggacccttgactctggttctgctgtgttcgttgctctggaaattgtgaaactctcagagtggtgacatctcaatgctacccgccatctggaagcccacaaagtcaggaacttctagaatcagattagtgtgggtgattattctctgtaccgtccaaccaagcagggtgctggcagtcatcaccggatgaaggtgacaggcaaaaccagggaggccgtccatctttaagtctctgcaaacaagtcttctggggatgggtgagcagactcgggatgtgcctttttcccgcaggtttctgctgagcttgcctgctcagttatatttgattaaagcaaatattaaaaccagaactggttcaagtcgactttgaaaaaaggtgtccctggaggagtaaaataacaacaggcagcctgattgccccagaaagtttgtcaaagatatgtatcccccagagcaggtggtgaacacaccatcaagaacttgctcattccccagcacacatcccaggaaggatcagcctcagcatttgcatcaccttgtagctaattgtagaggggccaggattctggccttgccgctgtggttttggtggcatgaagcagagttcagggacagacatgcagctgagctttggtctctccccaaatgcaggagtgtgacctctgatgggacattacctctggcagtttgcctgggctctgttgtcgccatcccagggaaatgccaggttttcctctgaygtgatgtttgggccctgagttctgcccagttcccagaagggcctggtgacagttgcggcagtgctgacatgtaacgtggtgtgctgtttggatgcttttgtctcggggatcctctgttgtgcaatgctgcaatgccagctccaggggactcctggctagtggctggcactgtttgtatccactcttcccatgtggccttctctgcactgaccatcaggggtcggggaggtagccgtctcctgttttataactgtcttccccaccctgagcagtggtctagaccagcagatagaaatcacgcataaaacccagctcctctaaagtacaggtgtacatatagaagacaggaagatattccctgccttcagctagcagtgtagcaggcgatagcatcctataggaacactgtagggtgcaaagatacttctgtcccctggttttgtagtccatggccctatgtacccaaagtacacctggtaggaaaatagatactctggttttttgcttgttttttggaaaagtatgcactccattgcagggcaggggtggagggaaggaaaaccaggtaatactcaaaaaataagtgctaagcctgaatccccttagatgagcactgcttctcattcagggacgctagtcagaagcaaggaagcaatgacatgcgtgcccccaccccccaactacctccctgatgagaaattccacaggtagggctgggccacctaggtcctactgagaggcgaagccagctggacttcctgggtcgagtggggacttggagaacttttctgtcttacaagaggattgtaaaatgcaccaatcagtgctctgtaaaaacgcaccaatcggcactctgtagctagctagaggtttgtaaaatgcaccaatcagtgctctgtaaaaatgcaccaatcagcgctctgaggctagctagaggttcgcaaaatggaccaatcagcaccctgtaaaatggaccaatcagcaccctgtaaaatggaccaatcagcactctgtaaactggaccaatcagcaggacatgggcagagacaaataagggaataaaagctggccacccccagccagcagcagcaacccactggcgtccccttccacgctgtggagactttgttccttcgctctccacaataaatcttgctgctgctcactttttgggtccacaccacctttaagagttgtaacactcacggtaaaggtctgtggcttcattcctgaagtcagagagaccacgaacccaccagaaggaacaaactccgggcacactacaaagcagaccctgtggctcccgtgcacagacctcaataggaacctctgccttaacatgtgtgcccattcaaaaaggactcattcctgcagagggaacagaaagcttgtgagatgagaaccactgctagctgcccacgactttgggctctttgagatccattcaaataatttcattcccggccaggcaccgtgcctcatgcctataatcctagcactttgggaggccgaggtggatggatcccgaggtcaggagatgatgaccagcctggccaatatggcaaaaccccatctctactaaaaatacaaaaaaattagcyagacgtggtggcatgcacctgtagtcccagctactcgggaggctgaggcagaagaatcgcttgaacccaggaggcagaggttgcagtgagccgagatcatgcactccagcttggatgacagagcgagactctttctcaaaaaataaaatagtttcattccctttcctatgatgatgcggaatgtcacagatgccacagaaagagaccatcacatggtgggccttttttgtggttgttttttttttttttttttttttttttgttatggagacagagtctcattctgccacccaggctatagtgcaattgtgcaatctcggctcactgcaacctctgcctcccaggttcaagcatttctcctgcctcagcttcccagtagctgggattacaggcatgggccaccacgtccagctaaatttttttgtatttttagtagcgacggggtcttgtcacattggtcaggcgggtgttgaactcctggccacaagtgatccgcccgcctcagcctcccaaagtggtgggatcacaggtgtgagacaccacacccagccttttttaagtgaacatgagacattcagaaagacaacaagccgrtgcagcatgctgacaaaagtggataagagtgaggacaactgcgtgttcatgattgaggcagacacctgagaatgaacaagcgctctatctatagtcacccagggacagtggatgtggactggacgtgtgggcatgctgatgaagagtgcacgctcttgcaccttgtttctctcttgtcccaacaagcaaagacgaaacatattaattattaactgtgacacgggatagtgggcagggatatgaacttgctcatcactctgccagcaacaacacagaggaaataagaggccgactccccactgcctccctccacattaagaatatmccatatctaacattcaaggcttacaggaaggatggagatggagtgtgtactgggagaggggaagcaaaaagatgcacccctggcttctttcacatggccttctttctcagctaccacacttcattggagattgaagtttcagtattccagttcggatgatcccttcaggcactcctctgttgcataaaatggtggcagaattaaaagtagcagtgttatgctattatatgtaaacattttgaaaaacaagcctgctggattctagaaagaaaaaaggttatgtggactgagggctatttttagaggaayaccatggggtcgatattcgtaagtttgggtttcacaatacttcttgctgctatacagaacagactgaaaaaatacagacataaattcatgtgtccctatttcagtgtgctttttttttgaattgggaaatataaaaagcatgataaaaatggtctatttgacaaataagcttttatcgctggtgacttgacagtggcaaggctgtggcagtgcctctccatgctgggatctcaccrgggacaattgctgcatgaattgcaggcggcgtgaaaggatgtccagccttgtcataagccagaggagggccacagatgtcatgcttaccttcctcagtgcaggtgagcaggagcaggcagtttakcatgtgccatctgagaccatatgctgaaattctactatcaaaaatgtattggccaggcatggtggctcatgcctgtaatcctagcactttakgaggccgagtcaggcggatcacctgaagtcaggagtttgcgaccggcctggccaacatggtgaaagcccatctgtactaaaaatacaaaaattagccaggtgtggtggtgcatgcctgcagtcccagctactcgagaagctgaggcatgagaatcacttgaacacaggaggtgaggaggtggaggttgcagcgagctgagagcacaccacagcactgcagcctggatgacagagtgagactctgtctcaaaaamaaaaaaaacaaaacaaaacaaaamaaaaatatatatatatatattgttttggtgacttaaggggtttttttggccttccaaagcycccatgaaagtgtagctatctyaggaaagtgcagtrtcttaaaaatatgcttctgaaactgggtgtatcagaaggtactcaaaggcaacagggtaaaaacagtgcgtcgttttggagggtcagggttacttgtcaacttggaggaaaaaaaaactgttaagagactgggtcttgctatgttgctgagactagagtgcagtatttattcacaggcgagatcgtagagcactacagcctcgaactcctgggctcaagcaaccttcccaccttagattcctgagtagctgggactacagttgtgtaccaaggtgggtttccctaccacatctggcagggaaaacatttgtatacaaaaataggcataaatatgctatagagcagagtacaccatttacatgaagatcaatacgagacttccaagaaatattctggctacaaaagcccctttaagctaagtcccaaatccccaggagaacaatttttttttttttttgagacagagtctcgctctgtcaccaggctggagtgcgatctcggctcactgcaacctctgcctcccaggttcaagcgattctcctgcctcagcctcccgagtagctgcgattacaagcgcacaccatcacacccagctaatctttgtatttttagtagagacagcgtttcaccatgtttgccaggatggtctcaatctcttgacctcgtgatccacccacctcgggctcttaaagtgctgggattacaggcgtgagccaccgcgccccgcccatgatacgcatcttgacagagacaggcctagcacaagtctgtgcatgtaagtaacgcttagcaggctcttgccaggtgcctggcactgtgcttgtttaatcctcccagtagcgttaggacatttcatatgtttgggccctgggaaggaactggggaaaatggtagattttcttcatatctagtgttttgtttgattcccataacaactctgcgaaataggcaggaagtggcagaggcaggagtagggattccagcccagggctgcatccgttccccaccttccccacccactcccctggcaactgcgcccagcttctgggacccccatcagatagagatgtgttgcggggatggctgtgcattgcttcagaagaggaagcggtgaagacctgaaacattgtgcccaattgtattttctgatatcctgctccttcctcccctgcaggttatttgtctaatgagtctcagagctcttaagtgtttctgggccatctagtcatccccagctactggcagctgagtaatctgtgtacttttccaatggactctaatgccaactccctaaacttaatagaataaaagtgtgatcagctttaatgaccaatttatgcacagtaatagtctgatgtggctgtataagtcaatttgggattctggagggactgtaacttgaaggtgttaattgcactaccttacttccgttgaccagaccctcacacctgcagcttggagcatcgttctctgccattagcaccacggcagcaatcccggctagcctcccgttgtgtgctggcacattttacagcccaaataaatgcaagagaactgttacacaaacatttactgcctcaactccttacccctcactgagataactttttaatatttcctccctgtgtgaactgagtatttccccttcttcttctgtaatggctctgaaaatcccatatagaatcccccggattctagccttmaaccctctgctgggccaaatttaaatcatttgatttcacttaatggtcagtgaacattctttttgcagtaaatggtcctaccgctgtttttattcacttgtcttcatcagttctgtatttccacttgtggcttaccatcagagcactctgtagtcactcatstctccrgattttagagtcagtgagcacagaccctcagaaccatggagtatgggactgatatttttagttgttaggtactttctgagcacttcctatgtgtctggcactgtcctaaactgtgctttgaaggcacctaagtcaagtaacatgatcccttctccctcctcccctcagtcaccgatgctcatgtaggggaactgaggcaggcccacttaccatttcagtatagggaccatgtgggtggccccaatatatgcagtatatgtatcagacagacacgcatctctgtatcctcttaataccattcacattgtaagacctgatgtcattagttcttttccccccaagggccataaaattgtcatactggaatgggttttttttaaatttaattcaaacttctgtcaaagcagactataaatttggtttgttttgatttcaagtttcctgaaacttggctcttcagattgccccccagttctttattctgtgggtttcctgtggggtcttttccatggggctgatcccacctcacagctacatgccttacgggagggcacccctcccctagaattttcatcctctagattggtggactttgtgaaatagacatgatggtaactgctgtaatgggggctttggtaaggaacgcagcagagggccacacaacaggagaatcccgtgttcttgttctagccgccgcatagagaatacggcctttagcacacagagctcacacagggagctacatggggagaagcgtgtttgttctgcgkcatgataagtgtgccgccaaagccttcaaaggggccaccagagggagcgtcagccggacaaacagaccttctggaaagtagttttgcaagatccatcagtaaccatcaaaatattcatatctgtttatccaacaattctacttctagaaaccttttataaggaaaaaatcagatttaataaaaggttatatataagaatgataatcctagcattaagtggaaacagtctaaatgttcatcatatgggagtgattaaatagattgtgatatatctttacaatggagtattatacagttactgaaaatattccttaaaagaacagttaatgatataagcatcataatatgaagttaaaaagcaagttatgctatgatcccacatgtaaatattgtgtatatatacaccacgttttaaatctatatgtgatttaacagactagacaaaaataccaaactattaatagccacatatccaaatgcaactaaatatttagagcaagcttgtccaacccacagcctgcgggccacgtgcagtccaggatggctttgaatgtggcccaacacaaattcgtaaacttaaaacatgagatttttttttttgcgattttttttttttccttttagctcatcagctttcgttagtgttagtgtattttatgtgtggcccaagacaattcttcttctagtgtggcccagggaagcaaaaagattggacacccctgatttaaagagagaaagaacagaatctttataatttcctgtgtagcttttttaaactttggaaacagctacaataggtacctgttaattgcacctccccaggtgatagggacattttttccacttgccacggggcacagatcacccccttctctgcaccggccttcgtttcattagtcctatgatctcacattaaaattctcattgtgcattcaagtcagtaaggattggtttagctgtgtgtagcaagaaacccaagtaacaggagcttttaaaagatggaggtttatttttctcacacataaaagaaagctggcaataaggcgtccagagctggcatggtggctccatggtcatcaagcactcagtctccacctttctgccccccagycttagcgtgtagctcccatatcaaacttatcttacagtgctagatggctgctggtgttccagctatcaagttcatattccaggcagaacggagacaaactggrgggcgggcaggcacttgagtgcccccagtctgaggcagcccacttcaaagaactgtcctagatgctccagccatgatgacagctgacacctcattggccacctctagctgcacaggagtctggagagtgtaaacttctagatgtgcactgaccccataaggaaaatggagagatggatgctgggcaggccacagttatctcatgtggttatctcaaattttcataacgtaggctcatagttatagtgatgtgtaattcgcattatgaagaaatcattgattagccaggcatggcggcacatgcctgtaatcccagctacttgggaggctgaggcaggaggatcacttaagcccaggagttcaagaccagcctgggcaacatagtgagaacctgtctctaaaaaaaaaaaaagagagagagaaaagaaaggaagaaattgttgggacctggtagaggagcagcattttggagaaagcactggacagagatcagaagatctggggttcatgtctttgtgtctatatggattgatttttctgggccttcattcttcaacaaaaactgagggcagtgattcttacagcatccacctgcagcagtcttgaacttgcaagggtgggtcccccttcagggcagcacccacgtattcctctggctgcccgtctataacttctgccactcctccttccaagctggaatcacctctcacctgcactctttttcttttagataacggaatctcgctctgtcacccaggctggagtgcagtggcgtgatctcagcaacctccacctcccaggttcaaaccattcttctgcctcagcctcctgagtagctgggattattggcgcgtgccaccatggcctatatatttttagtagagacagggtttcaccgtgttggtcaggctggtctcagacttgtgacctcgtgatccacccgtctcgacctcccgaagtgctggaattataggcrtaagccactgcacccatcctcacctgcactcttactggccccttaactgggtcccctcgccacaactctccacctcttcttcgccttgacctgaagacaaggtgatctttttaaccacagatctgggtgggttggtcctccatttttaacattttagcagctttccattccctccaagtggagcatggcatctgtgttctggccctascccacttctcttttattctctcttctctgccttctccacccccatcctcaccctcacccttctctatccacactcagcccatttctgtctctgrcagtctccacgtccaatcgtgtcatgggcttcttaccctgccccagctccagcctctgggcctctgagctcttcctcccttgaggctgtctcctctgagaagtcttcactgactccctaggctgagtcacatcttctagatccctctagtcctgcgtgccctcctcatgctagcacattccagatgcyaggycatttatctcagttcttgtcagttttcccttcctgactcagagatttctgcagccattratcacatctgaaagtctcacccgcacaaggtgcctggarcaggaggtgctcactgcttgtctgcagaatgactcagggcttgagctgctcctccagggctccttcrggttttctgggtctttaaacacctgtgcattgtgttctgtgtatgcctttcacttgtaggaaagagccctgcctgcctgtctgtcttcgcggcagagccatttgctctcagtgcattgggctcagattccttcgctcgctcgctcatcacagatctgctgagcagtgttgyctaccaggactgtgcgaggcccagggacacagaaagcagtgttcaccagtcctgcctttgaggggctctcagggggstggagaagggaagacagacatgaactggagcacrtgacctcatagggaccacacacagaccacacagatggyccaggtggctgcaaagaggagcacgggcttcgcgagcrtgccrcccaggctgcaggcagcgaacgggtggacagaagagcgccctcccttccggagggggcaggaagccagtcacccctcctgctactgcaacacatttctcccctccctgtctgccacgactgtcccttggccaggttcccaccagcgccctagggactcccatgccatgtaggtgctgtactggttggggatctcacacatctttctcttgactctggccagctttgttgagggcccaaagactgctggagctgcaaaggaccataaagatcacctagaagtttccagacctcatcccacaggcaaggaactgagacgagaggaagtgaagagtctcacatggcaagtggcagagccacccaagctgcagcccagctgtcctgttcctcctgcccccacccatcccagggcctttccagggtgccacctttccttccagagtgccagaagcagaacatgtggatcaacacggggtcattcagagaccacgcggctgtcattagaggcgtcccagatggatcccggagccgtggacagtgcctgtaatcacagaagctgagagttggaaggaatccatctggttcagccctggtctagcatataccttccttctccatcctcactttctgctcctcacggggacagagaactcacagcttcccaagccagcccattgcatttttgaacaggtttcttcttatgccatcccataactcctgcctgctactaaagccttgagaagatgacggtaaactctgtcaagtactcgtgaatgtccgattgtggacacttctaggacaggttcctggtgaatcccctgagatcaattaaatacagaacaagctcccaggtagctgaaccatccsagctgttatacaaaactgtttgtattagcctagttttaattatccaaaaagtaatggttcccttttttttaaggatcattggtattctagcctttcttttctcaatatcatttgatagtgggttcatctatctgttgaggttaatatatgaaaacaaaaccatgtaytattcagggtggaggacaatgccaatcctccccttctctgtagtagggtatagatggcttcagctcacccagcagctatttcaggttgtccagaagggaaggccagaaagtccctgtgctgcattcatcgtgactgtaccgtagcccctgagaaamccagtgcggctcctcacagccctcaagatgatttccgaccttgccacctaaagtgtggcccgtggaccagcagcatcagcattacctgcaggttgcgagaaacgcagcaccccagaccctccccatccacttgcgtccaaagtcttctctatattaatgagaggaaaggacgactgaagacacagtagcaaagctcatcactgtgacttgttaggagcactcattctctacaccccsttcccataactcctacctacctcttttggtttttaattaggacattcacttgcatttaaaaatacctgcaagatccccccatcccccatatctccactgtctacttctcgttcttcttagatgacgtgctgctctygcctcttccttcgctttctcttgcaccgcaacacttagttattatccatrccacggaccttcaagatacctctgtgcaagggcagactgaagaccgagcaaatggcatggaaaacaggacacctcagatggacggcgcggcggtccttggtgacagagcactgctctttaacacatgctgtagtaatgacatgatcgccttctgtccggggccttcacttcgaaatagagcactaagatcggggaggaaaaccatgaggatgttgacccctggctgctctgtttgcttaaacagcagttactcaccccgaattacccatagatagtgaccaactggtctgaaatccagatagagttgctaatgatcagcccttccttcacccattccacttgttcttaaaaatgtatcactcaggaaatgctttacagaaaaactgtggcaagaccctttgttgcagaggaaagacctgctctagccccagaggatggctccagcatccacctgggacagtggaaacattgggcattaagacacttaataaaaaggacactttaaaaagaagggggcaggaaagatagaaggcaggaggtgcaggcactcagacaactgccctcgaccccacccgggatgggccacggacaggtgtctgcattgccctgaatgcagygcttttcctaccccagcatagacggcrcccatttctgcactgttctaaaaccccttccctatgcgagaatcagttctaagggaaggaagccctcttaggagaggaggtactgggcacacatctgacagctctgccaccagcaggcaggcgtcacccagctcagcacagccccgagtcccaggctgcagcctcctgtgctgtttcagagggraggaatgggtgtgtggatctctgtaacttctcacagtgagggaaacgggggttggatggtgctctagtggccggctttgccccgcagtgcagttgccggaagggagcagccctgggatggccgacgtttgtattagaaatgttaggaaatgttccttctggcctttcccaggggctagagggccacggttcctgacctgtgtcctttctttgccttcaggtccacattggccaactgtattcaactgacaagctgatcattgagaatcgagacatgcccaggacctagcaagccggggaccagccaccagtggcggccagggaccaccttcagcatccactctctgtttgagmtgggggctcccaaaaccagcttacaatagccttttgcgctgcctgtcctgtgggagctgataaaccaagtcacatttgcattctgttgcaggcttagtgaaaaaggactgctgtctttccttggttcaagtgttagaatggagagctggagttcgttcagaatagtgctgtgtgttaccacgtctcccctgcaccccattcctaccttgtagctcatgaccattgtgtatagcatttctacactttgtttcttggtccttggcaataaaaagaatgatctccctgagcctttgaccccagataaacccctcccaattaatgcattttcatttcctactgatacaaggcctggagagggctgttgggggccctcagggagggttcaactctgagacgagaactgccttggtgaaggcaagttcaagcaccacttgagactgggggcagcatggagtagggcagggctacggggrtacacggtgcaccctgcaacttatacctgagcccagtacaacaaaggtgacgggtgtgtaggtacacacccagagatggagcactgcagatcagcaacctcagccccacctgggaatttgctggaaatgcaggctcaagcccctccccacaccyggtgaatgagagagccccagcctgacccaagcccagggcgactcccataccctgaagcctggggcatgctgggcagcaccggtgcccaaatctggctggtggacagaagcacctggagagttggagagctttttaaaaagacatctctcagcacttccctctctgcagattctgactcagtaagtgaggggtgaggcacagtcatttttctctattctgaagctctcccastgttttcaatgtttaaccaactggggacccctgctctttaagtatattacaggtaataaagatattgtttgtatgcttttattcttggaaacagattcattccaaacatagaaagaacatattaaataacttgcttgtcatctggggagtttacgagggaccagacctggcagagcggtttcttgtttccctttgcatacagtgctcagtggatttggtatctgtgggttaaggtttggaacaggctcmtataaatagcaccggtcctggaatagctgcagcactgtcaccccctcattttaactccgacggtcrtgggagtgagtacgcactgtctgagccygtgttcttctcaccctcatatgagaactcatgtcttccagtcgcttttagagagcatagatttgctgcaatgatgcgttcaaatagatgtaacgtgtagccattctatttggcagtacaacttttgatttcaggataaagtctttttttttgagatggagtytcgctctgtcacccaggctggagtgcagcggtgcgatcttggctcactgcaacctccacctcctgggttcaagccattctcctgcctcagcctcccgagtagctgggattacaggggcctgccaccacgcccagctaattttttgtatttttaatagagacggggtttcactatgttggccaggctggtcttgaactcctcggccccccaaagtgctggtattacaggcatgaaccaccaccccctgccaatttcaggataaagtcctgagcatctgtgaaaatartgaagctcttagcaagtcccagatctcttaccctctaaccagttcctgcctgggagctgcagtgttagagcatatgcaaagccctaattgggggagagctgttcggtggacagtgaacggaggtgatgtggcaagtataatcactcccttcagctgactgtcacggggcagagccgcccagcccagccctgtgtgtggctctggctcaggttttccaccttgcatcagtgcagtggagttcgtggtcactcagcagtgaatgcatccaaccacgctactaacgcacggcactgctgatttatacttaatttaagcaactgctacttggaaccgaagtccagatttgaacctccgtgctgaaggcatcaaattgccggcaagataacagctccagaggagacttctcccactcccccaggttttacgcaatgaggcagtccacccaaacttaacgtgggctgcaggctgtaacagcaggttgcttttgtgttcattaaactgcatgaatgggtttgaacatgcccaaagccttgctaatgcagacttaattttgtaaaattaactatgcctttggaatctgcagaaagatacaaatccgaattctgtggcaggaaacgccacaaacaggccttggtcctccacctttcaggtgtatatctggcaggcagagcctggcactgggtactccccaactgagatgacccaatattgatgctagagcttcgaataaagtggcattcccatgggggtgacccctggtgtttctctagggaagtattccacctccttgactatgcaccaactgaggggaatgtgggcaactccaacatccatcatggccagcctcacagaactctctagaacttgtgcctgctttgaagataggatccgggctggggtctggagatcactttgcagcactaatattgagcaaatgagaactactatcattagttaacttcccaggcagaactcattggccgagcaaggctatatcctagactttcagagacagctctgggctgggctggctgtcatgacatmatagctgggagatcttgcacggccaagtacagggctgtgttgttctgatggctgttggaatctggattttggaactgaaagaattggctagrttgctttaggtatactccgtcctgctgctaactaagtagcagtgacctttaactcccttcatccacagcctctcccgttaatctcaagccccaccatacaacccaccatcatccaggagcaaaagggacaggcagagggtgaagcctacaaagatgacaaacatcagagctcacctagtccaaccctcaaatcttcaggtgttaaaacaaagagcctgaacatctgcagatcacgtacagagtcagggcctttyccctaaacccctttcactcattcatttattcactcagtattgactaaggccacctartgccaggtgccaggtgccagggagcaaccagtgaacaagacagacgtaccttcataaagcctgtgtctagcagggaaatctgagaagaaaatgacaagtcttatgaatgttacaaagagggaaatatgagtgctgccagagccgatgggacgggccagggaagggctccccagrggatatttacacgtgcaaattaatgatgaggattggctgtgtgaaggtggggagaggagctctctaggcaggaggaacagcacatgcaaagcccttaattgggggagagggtagttccatgcaaagaactaaagggagtctgggatggtggcagccaaggaagagggctctttccacatcgtggacggccttggagcctcagcctaaggatggtgagcaactcgggagtttttaggcaagatgaggtttttgttttgttttgttttgtttttttgagacagagtctcgctctgttgcccaggctggagtgcagtggcataatctcagctcactacaacctctgcctcccgggttcaagcaattctcctgcctcagcctcctgagtagctgggactacaggcgcacgccaccatgcccagctaagttttatattttttagtagacacaggatttcgccatgttggccaggctgctcttgaactcctgaccccagatgatccgcctgcctcggcctcccaaagtgctgggattacaggcgtgagccascgcccccgaccgaagtttgtatttttkaaaaggtcacattgtctgcttttgaggggatacactgggagagatgcagggagaccagcttttcggaggagtgggggattgggtgtggcattccaggcaagcgatggtgacttcaccaagaggcaacagctgaacagaagcagagtcagcatcaccctgagaactggctggggtgggccgccattgaaggaggacaggaaacctggagcagagctgccccagctgagcacagcccgagctccccagcccacctgccgatgcgcgagaaagtccacagagtcccctagcctggtctagcttaggtcagtcatattcagccacccctcagacatgtgctaaataattaactgttacattagtcactgagtttggaggtagattattatgaagtaacagcaaactaatacagagagcatctctgtattaatgtattaatgtattactttctcagggccacatagcaaaccaaagagtaggcagacaaacggccaaaactgcaggtctcctgtatggggacatttccacaaatatcttcagaatactggtcactccctttagagaacaagtcctggagaaacagtcgaaacagtcatcacgtgtcctacagatggaagggctggccaaccagaaagaaaagaaaaagtcgagtcagcagaacttggtgattgattggatgaggagacyaggcctgagggctgcagggagtctaggaggagtcycaggagcagggcctgaggaactaagaaggggctctggctgagaccagacaggagcagccactgtctggaattttgtccccactgctgacttcgaacaacctcaacttcaaacagaaagcccagactcgatgaatttatcttttcttcaaagtagagaaagggtagctcttttcttcccaggaaattgtttatccatttaataatttttaaaaatcactggagttgggtgtggtggctcatacctggtaatctcagcactttgagaggccgaagtgggcagatcacttgagctcaggagttcgagaccagcctgggcaacatagtgaaaccctgtctatacagaaaatacaaaaattagctgggtgtggtggcatgcaactgttgtcctagctactctggagcctgaggtgggaggatcacttgagcctggaaggcggaggttgcagtgagccatgatcgcaccactgcactccagcctggatgacagagtgataccctgtctaaaaaaaaaaaaataactgggataaaacaactcgaaagacccttataaagattttacccgtaactctgtagagcaaataacttcctgctttaggcaaagctctttgtgtgtaagttcgattggaagaggagggctggtggggggagattctctactttggtcatgagattaacattaaaagtttgaggaaggttgctctatatattggctgcctgtttctaagactgaaaataaaagcacagtaaaatatcaacaagtatacagaaaatatacatttgtagaaaattagcttttttttttttttttgctaagtacttcatataaactagtatttgctttctagattaaagaatatctcctccaggtgtggtggctcacacctgtaatcccagcactttgggaagccgaggtggatggaccacgatgtcaggagttcaagaccagcctggccaacatggtgaaaccccatctctcctaaagatacaaaaaaaattagccaggcgtggcagtgggcgcctgtaatcccagctactcaggagactgaggcagagaattgcttgaagccagaggcagaggttgcaatgagccgggatcacgccactgaactccagcctgggtgacagagtgagactcttgtctcaaaaaaaaaaaaaaaaaaagaatatctcagatattgaagcgaacctataaataacagcagaagctgaagaaaagataacggatcaaaaagcagaaggagaaagcttccctgtccccaaggacctgcccacagtcgtggatgagaagtcccttgataagtagggtctgaacccacgtgatcaaatgttagctctgtgaacctgtgccagtggctgtgtgtcagtagcccagggtgattcagaagctccatgaagcagccatctttcctggatctctggaatgtacacatttgctgagatcacaaagatgaagctggcagaacccgagtggatattcattattacgaacagaagaacagccaacaggagccgtgccatgtgcaaccccgagttgacagatgcctccccgcttcttctgtgtttgccagttgttacaaaatgatctagagaaaaactggaacttgatggagaaagcaatggcttacgattcagcaggctttcttggagagtttacctaaagtctatgtggacggtggctcagctcacctctgagaacaatacgatcttcacttttcaatctttctgcagctctaattagtgccacagggaaccatggatgaaaatggcttctcgtgttgatatccatttggggaataggatggatgcagctgcttttgctcaagggcagagttttgacttcaaagaccctgaagagaacccagaaggaaaactctcagaggtcaatggactatattctttacctgggggatcgttgacaccacagcagtaaaagcgaagtcagtgtcgtgctgtcttgaaattagatgacaagaatgactgacaccaatagagctggaactgcacttggagcctgagtagccggtctcaggctaaccacacctgtgctgaccacagcgtggcccgtgttgttcatgaggcattctggctgtacctccacagggatgcaagacttccagtgagaggctgcttctgcaagaaaatacctgcctagaaatggtccgctttctcttcctaataaagtgataagctttcttagtccaatggtactaaatagaaacctttttcttccatcagccagagaggtactttatttcctttgtttgggagtgtcagttaaatattgttgaaacatttcactagaacttcctgtcagttacctagtgaattcatgtgacttcatcagtcttgaatacagagaccgtttaataacaatacaattggttctagtcttaaaggagcatttcatttacatgcacatgtgtgatttgcacagcacatacaggatgtatgaccaaggactacaatgctgaggctaagagtcttgtcaagaattgccaaagacactcttccattcatatttcaagcatgtaatgtgtttaaaattattaatttgccaagtttagcatacattaacatacttaaaacataaccaacacttccttgtggttctgtataaatagaagcttgtccaaagtagagaaagggtagctcaatagctcaaactactgaaaatataaaacatgtctttaaaaaaaaaatcaggccaggtgcaatggctcacacctttaatcccaacactttggaaggacgaagcaagaggactgcttgaggccaggagttcaagaccagcctaggcaacataactctccaaaaaaaaaaaaaaaagaaagcattagttggatgtagtgttttcgtgttttgcctgtagtcccaactaatcgggaggctgaggcaggaggaccacttgagcccaggaggtcaagtgagccatgattgcaccactgcactctaggctaggggacagagtgaaaaaaaagagagagggaaagataaaatggtgtggtggtagttttgaggatggtgaaaagaaactagtcactggatgggacagtctgagctggtgaatgtcttcatgtacgagggactctaaccccagcccagccactagctggctgtgtgatgttgcctgaatcctggttcatagaggcttcttgttgagaaaataagagcaggtcaactatatgcagcccccaggtatggacatcctagaaagtcattcattccttcatcttccagccctgccacttcctggtggtgagatcctgagcaagtagcttcaccaaatttctgtttcctcattcataaaaatgagttaatcaaatacctactttgcagggttgctataaggattttcagtgcgtaacacaaagttctttcacgaggtttaatacacagtaagcaataactattagctcctctgtcattccttctagaaactgccagataccttaggggatgaagaaatggaccaaacatggattcatcccttaatcacagaacgttttgcgttgtccttaagacatgtatgtaaatagctgtacgagttctgtaaattccctgggagaggcacagataaaatagggctggaagagggagggagtaatattcagaaggaggaactacttctacctgagccataaatgctaggataaggggtgtgggggttatgtggtggggaagggagctgctatgcaagggaacagcgatgtacggcagcgatgtgcagtggagcagctagggagagatacacagagtggccactgagagggtagggagaccagctagggccctgtggcaggcacggagacgtaaggggactaggggctggcagaggacggggcagtgtctgtgtgggtcagatggagaagaaagaatgaatccaaaaggcatttccaaatgatggacttgatgagcaatggagacacagaataaaggatgggggcgaagcaaagataacaccagcactttgatcctgaaagactggcagggggactgcccctcactgaaataagaggcaacagcacatccccttaacaggaacacacgtccacaggcccacacctcactcatcgctgtatgcctgtgttttgcagagtcctggttgcagtagagacattgggggtgtcagccaagctcacaggaaccccttttgatccctcacaacaggagttgggggttcttgaccaccattttgcatcatgaccccacccccacctctaaccacagctgatggaactgggatgacacctgtccccaagtaggcgaagtactttctcttagaactaggagtgagagctgctgtttctgtctgggattcttgctggagctcaagtgacacaggcctgggaggtccagagcagtcatcttccatccatcatgtagacaggggagaagagaaatccgctctggaaggagagacgtatgcaacctcagagagcagagatgaggcagggaccgttcctgctggttccagggctccatacgtcctggcttccaggccctggagaggccccatggcccttagattccaggcaagaacccagcatccatgagccaactcccctccttgctsacgctggcttgtatcagtttctgtaacttgcagtttggcacatgctgggttttattgaaatatggagccatattgaggcctgcaagaggtaagttcccattttttagtaggtaagttccctactgagaaggggaccgcgtcctgctgagtcctgcagaagagccacgacaggtccaagatggtaaagagagggacactggcctctggtccagacattgacaggtctaaatgtctagggctgcatcctgaggagagaccaaggaggagaggaggcacccaagcaaaatgtccttcctgtggatcaagtgcagatacgctgtcttctctgtgtgtgtatttgtttgatgagtagatggttcagagcagtggatctgggtcagattgacctgggttcaaatccaagctcaggctcttacttcctggcacatgactcaacctttctgacagtcaatttcttcagctgtaaactaggagtgatgtgccaggtgcggtgactcacacctgtaatcccagcaactcaggaagccaaggtgggaggattgctcgaggccaggagttcaaggccagcctgggcaacatagcaagaccccatctcaaaacaaaagaaataaaaaatatgaagatcatagagacagaatgtcatcctgataattgacataggctacaaggaacaacattagagtcaaaattggttctatcccagcactttgggaggccaaggcaggaggatcacttgagcacagtaattcaagatcagcttgggcaatatagtgaggcctcatcgctataaaatatagatagatagatagatagatagatagatagatagagaaatagattttttttttaattagccgagtgtggtggcacgtgctatagtggtcccagctactcgggaggctgagctaggaagatcgcttgagcccaggaggtggaggttgcagtgagccgagatcatgcctctgcactccagcctgggtaacagagtgagaccctgtctttaaaaaaaaaaaaattatataagtatataccttcaactaaccccttcaaatccaagggaaacatgagtctgcaaagcagatgcactgcccagattgtagcccccactggtacaagaagagagacaagaaagccgtgacccacccaccctcagaacctctgagagatgcgcttatgccaccagtcagtgtggacaatggctgtcacccaccaagcgggtcactgtgagcagcactgggggtgttggtggaggggaagagaccacaaatatgggaaaagtcctctcggcaaccagatgtgaagaataggtgttcctccagcccactccccatctgagagttaggattgagtaaagtcatccaggaaagtggcatcacatcctatgagtacctaaccaagtggaaagcagccattcccctcagcaagggagagacacagttggcaagtgagaacaccaggggttctgcccgccatggtactgatgggtgtgtgcctcgggtgatgtaagatgaggcgcgtggacgtgtacctccctcacccggttctgcccaccctgcctcagatgggctgttgcagcatgcattgtttccagcttttgactatgacagataatgccaccgtcaatattcttgtgcgtgtctcctggtgctcgtgtgtacacactcctgtacctaggtggaatttcggatcatggggttgttctggttcaggagatactgccaaacaggtttgcatagggacaggcccactccgagggtatgtgtaaatgggtttgctcatgagaatggcattgatgtgaagcagggatctctgggccaagcctaggatgagaagcagctctctgctgtgggcagcctgcagccaaaggcagcctggccctacaccactcccgagcagagcagagccacgtgcctgctgggcctgccctaccagagactcacagtgccaactttggggaggctgagggtccatctgaatgaagaaaatgccatttccttacatgtgtggagctggctgggttcggaacggagcaggatgtgtaaacgcagagactatctgtagatgtaggcgtggagttgtccgtataaattaaggtccaagctgggtgcagtggtgcacccctgtagtcccagccactcaggaagccaaggcaggaggactctgcctgtcccaggagttcaaggccaagctgggcaacatagcaagatcctatctctaaaaagaattttttttgtataaaaacacacaccaaacaaaaagaacagacaccaaacaggaggcccctcaagagtagctgctttagatcgggtggataatctctgaagaggctgttgtaaggaaacgcagtgtatgtaagtgagattagtgtatgtacagcatgtgtatgatgtcgtaacaatgtgtgtgcttaatacacatctgcggtggtttgaatatttgtctcccttcattgctcctgttgaaactgaatcccaaagtggcagtattgagagaatgggcctttaagaggtgattgggtcgtgcaggctctgccatcatgaatagattagtccattaatatattaattt

SEQ ID NO: 93342 - DNA, 14078 bp, Homo sapiens
cttctttcacttagcatattttcaaggtttatgcatgccacagcatgtatcagtacttcattaaatcttccgatccatgaaaaatgggctatctttccatttatttaggtctttaatttccttcagcaatgttttgtagttttcagtgcagaagtcttacacttccttgggatgcaagtcctacttaggggattttagtagtcttttggtgctgctatgatagaatacctcagactgggtaatttgtatagaacagacatttattttctcacagttctggaggctggaaagtccaagatcaaggcaccagcatctggtcagcgctttttgctgcattctcatatggcagaaggcagaaggacatgagagaagcaactccctccatctcatttataaggacacctaatctcattagggagaacccctcatggcctagtcacttcttaaagaccctatctcttaatactgtcacattgacaacacctgagttttggaggggacacattcagaccatactagggattaaaaataacatcttaatttttagcaatctagttcagattgataccaacttaatttcaatactatacaaaacattgctcttatatagctttgtccactccctttactgccactaaacttaagctcaacaaaccattctttttgataataatggtaacctgaaattccagcacctggccttaaaactgcaagtcttgactcatgcctataatctgggcactttgggaggctaaggaggatgacttgaggccaggaatttgagaccaacctgggcaacatagtgagatcctgtctctacacaatatttatttatttatttattatttatttatttatttatctatttatttagagacagagtcttgctttgttgctcaggctggagtgcaatggcgcgattttggcacactgcaacctctgcctcccgggttcaagcgattttcctgtttcagcctcctgagtagctgggactacaggcatgcgccaccgtgcccagctaatttttgtatttttagtagagacagggtttcaccatgttggccaggctggtttcaaactcctgacctcaggtgatccgcctgccttggcctcccaaagtgctgagattacaggtgtgagccaccgcgcccagccccaattttttttttttaattagtcgggcatggtggtttgcacctgcagtcccagctactcagggaggctgaggtgggagagttgtttgaacctaggagttcagggctgcagtgagctgtgattgcaccactcactccagcctgggcaacagagtgagaccttgtctcaaaaagaaaaaaaagcaagtcttcatatttaacagaaagaaccccaaaaagagatgagggcaatgtccctactcctagcatcagcagaagatgaatttttcattttgattattacacttttaaactccagaaatttctatttggttcattttttatatttctatgtctgtattgatactctctatttggtgagatattgtttctatactttagttctttagacatagtttctttgaggtttttggacgtattttaaatagctcatttaaagtctttttattagaaaacccagcatctggctgggcgtggtggctcacacctgtaatcccagcactttgggaggacaaggcaggtggatcacttgaggtcaggagttcaagaccagcctggccaatatggtgaaaccctgtctctactaaaaatacaaaaagtagccaggtgtggtagtgggtgcctgtagtcccaactacttgggaggctgaggcagtagaattgcttgagtctgggaggcagaggttgcagtgagccgagattgcaccactgcaccccagccggggcgacagagcaaaactctgtctcaaaataaataaataaataaaataaaatacattaagaaaaaaggaaaacccaacatctgggctttctcagggatggtttctataggtggtcttttttctttattctgtggatgggtcgtattttcttctttctttgcaggtgtcataattttttattgaaaactggacatttcaaataatataatgtggcaactctggaaaccagattctgtcccttccctggggtttcttgttgctgttttgtttgtttgttttcaatgtttgtttaggctgagctcggtggctcatgcctgtaatccaagcactttgggaggccaaggcaggaggatcatttgagcctaggagtttgagaccagctcgggcaacatagtgagaccccgtctcttaaaaaagaaaaaaaaattggccgagcgcggtggctcacgcctgtaatcccagcactttgggaggccgaggcaggtggatcgtgaggtcaggagattgagaccatcctggctaacacggtgaaaccccgtctctactaaaaatacaaaaaaattagccaggcgtggtggcgggcccctgcagtcccagctactcgggaggctgagacaggagaatggtgtgaacccgggaggcggagcttgcagtgagctgagatcgcaccactgcactccagcctgggcgacagagtgagactccatctcaaaaaataaataaataaataaataaattaaattagcttggtgtggtggcgcatgcctatagtcccagctactcagaggctgatgctggaggattgcttgagcctgggagatcaaggctgcagtgagccgtgttagtgccactgtactccagcctgagagacagagcaagaccctgtctcaaaacacaagtttgtctagtttttttcctgaacaaattctgtagtctctattccttgtcctctgtggccactgaagtctcttggttagcttagtggccactaatgattgaacagaaatttctttaaatgcctggaaccagtatgtctcccagtctttgccaaggggatttgtgtatgtgttgggacataccttctgcactcagcctggcagtttacaacgttgccttatctttctcttcctgcttgctcagagcctcgaggtctgcagaggtgagagattaaagcctacttagttcttctgtgggcattcgcctagctgcagcccagggcgtatgtgtgtggccttctagattcccaggcatgtgttggagttattcaagccccattttccagcctttccttcttcttcttcttcttcttttttttttttttttgagatagagtcttgctctgttgccaggctggagtgcagtgacgcgatctcggctcactgcaacctctgcctcctggattcaagcaattctcctgcctcagcctcctgagtagctaagattacaggtgcacaccaccacacctagctaatttttgtatttttagtagagatggggtgtctagtagagaccatgttggccaggatggtctcgatcccttgacctcgtgatccacctgcctcagcctcccaaagtgctgggattacaggcatgagccaccatgcctggcctccagcctttccttttaagcttgctggttgatgtattgtttgcctcaactgctattcactaccccaggttgtagcatcagtttgagtgaggtcaaatgaagacaagcctttcaagtgggttcttccagggaaccaccagacaagtcaaaacaaacaactgtaattctttgtgaataaggtccattcttttctctctggtactggtacctgtactgggaatgcagatcattatcttcagggctaccaccaagctgggagcaggagatgggacaagggtaagttaaaataccacaaagcttactgttcttatggagattcagctggtttttctccttccttccttcctttctttcttccttccttccttctttccttccttccttccttctttccttccttccttccttccttccttccttccttccttccttccttccttccttccttctttttcttcctttttcttttttgacagtcttgctctgttgcccaggctggagtgcagtggtgccatctcagctcactgcaacctccacttcccaggttcaagcaattctcgtgtctcagcctcctgagtagctgagattacaggcacgtgccaccacgcctggctaatttttgtatttttagtagagacggggtttcaccatgttggccaggctggtctcgaactcctgacctcaggtgatctgcctgccttggcctcccgaagtgctggattacaggcgtgagccactcagctggtttttcttgattaaacattcctctgcttgttacaagctttcggttagttttcaaagttctgaaaaagttgatcctgacagtttttgccagttttttcactgatttttatagaggcatagatttttggagttctctattccaccatttactttgtgttagcaacattaaacattttaaacatcattacttgacattaaaaggtttaaatttgatgataactttagtttccattttcacatgtcctttgattactttaactctaatctccttctctttcagtgtttgtgttgttgtggcctagaactttatttttgttgctttttctttctttttccacatgttctaatgtggcctagtattttagtaccacttcaaatttatgatccccaaatgctcccaatcaatatttttccaaatgacatcatctttatgaacactggattataattaaactacattaaagcagcatgtgttttagtgaataattccttaaataataaagtaataggtctgggtgagctcacataaggagcattgatgctttttaccaaagctggaaaattctcagccattattcctttgaacattgttctccataaatctttctattctccctttctagaatttgtgttcaatatatgtgagctcttttcattctatcctccatatctttatattttccatttcttttttgttttttttttttttgacacggagtttcactcttgtccaggctggagtgcaatgacacaatctcggctcactgcaacctccacctcccaggttcaaacaattctcgtgcctcagcctcctgagtaactgggattacaggcatgcatcaccatgcctggctaagttttgtatttttagtagagatggggtttcaccatgttggtcaggctggtctcgaatgcctgacctcaggtgatccacccgcctcagcctcccaaagtgctgggattacaggcttgagccaccatgcctggcctattttctgtttctttatctctaatggtgtgttttcctcagagctatattttcgttcgctaattatttcttcgtttgtgtctaatctgcagtttaataagtttattaattatttaaatcaccattttcacttctagaagttgtatttggttattgtgcaggtgttcagataagcctgttgtttctcatcctgatctttcattaagaaatgtatttttagcttgggcaatatagtaagaccccatctctaaaaaaaaaaaaataggtgggtatggtggcatgtgcctgtagtcctagctacttgggaggctgaggcaggaggattgcttgagcccaggagtttgaggctgcagtgagctataattgccccactgcactccagcctggatgacagggcgagaccctgtctcaaaaaaaattgtatgtttttccctttttacttgggaataatagatttatgggaaattgcaaaaatagtacagatatgtcccatataccctttactgagtttcctctatattatagtagtgtaaaaatactatagtacaatatcaaaatcaggaaattgacattggagcaatagtgtgtatgcctttttatcccatgtgtagactcctgtaaccaacaccgtaatcaagatacagaacatggctgtgctttgtagacagtgtgtgtcccgggtggtcctcaggcactgtcaggagattttggactctctgaagatcatccttggatcttgggttaaaaatctgtattctagtctgaaccatgggaagaaaaaaatagtcgatctgtggtttttctacttgaaggacacaatgttttccaaactagcacctttgcagaggtttgctgtacttagtcgtggagctcattcttcagtggcttctgctacatctgttgcaactaaaaaaaaaaaatccagaccgggtgtggtggctcacgcctgtaatcccagcaatttgggaggccaaggctggtggatcacctgaggttgggagttcgagaccagcctggccaacatggagaaaccccatctctactaaaaatacaaaattagcccggcacagtggtgcatgcctgtaatcccagctacttgggaggctgaggcaggagaattgcttgaaaccgggaggcagaggttgcagtgagccgagattgtgccactgcactccagcctgggcaacaagagcaaaactccatctcaaaacaaaaaacaaacaaacaaaaaaaacccgaagaaaacagtccaaggccctccaacctctgactacatttttgaaagggaatctaagtgtggtgcgcacaattaccatcctttacctgtagccctggagagaggaaaatgtatttacttatgggatgtagaaggcagaaaatattttgactttctgagttcttacagtgctgtcaaccaagggcattgtcaccccaagattgtgaatgcactaaagagtcaagggaagaaattgaccttaacctctagagctttctataataacgtacttggtgaatatgaggagtatattactaaacttttcaactaccacaaagttcttcctatgaatacaggaatggaagctggagagactgcctgtaaactagctcataagtggggctatactgtgaagggcattcagaaatacaaagcaaaggttatttccgcagctggaaacttttggggtaggacgttttctgctatctccagttccacagacctgacgagttatgatggttttggaccgtttatgcctggcttcgacgtcattccctgcaatgatctgcctgcactggagagtgcttttcagaatccaaatgtggctgcattcatggtagaaccaattcagggtgaagcaggtgttgttccagatccaggttacttaatgggagtgcgagagctctgcaccaggcaccaggatctgtatattgctgatgaaatacagtcaggataggccagaactggtagatggctggctgttgatcatgaaaatgtcagacctgatatagtcctccttggaaaggccctttctgggggctgatactctgtgtctgcagtgctgtgggacgatgacataatgctgaccattaagccaggggaatgtgggtccacatacggtggcaatccactaggctgccaagtgacaattgcagcccttgaggttttagaagaagaaaaccttgctgaaaatacagaaaaaaaatgggtattatcttgagaaatgaacccatgaagctaccttctgatgttgtaactgccgtaagaggaaaataattatttatttatttatttatttatttatttatttatttatttatttgagtcagaggttcactctggttgcccaggatggagtgtaatggcgcaatctcggctcaatgcaacctccacctcacaggttcaagtgattctcctacctcagcctcctgagtagctgrgattacaggcacgcactgctatgcccagcgaatttttgtatttttagtagagatggagttttgccatgttggtcaagctggtctcgaactcctgacctcaggtgatccagctgccttggcctcccaaagtgttgggattacaggcatgagccactgcgcccggcgaggaaaggaattattaaacgctattgttattaaagaaaccaaagattgtgatgcttgraaggtgtgtctacgacttyaagattatggacttctggccaagccaacctgtggcgacatcatcaggtttcacctctgctggtggtcaaggrggatgagattcgagagtccagtgaactcattaacaaggccatcttatcattctgagggtagcagctgttttcaatggtycctgggagccggctggagacaggtggtcctgtaaaagctctgctctaaatgtaggcacattccactcccatgtgccgtcaaaatctttttgtgtatatatgtttttttcagttgatacataatagaagaacgtttatgaacctgccgtttgcttttgtaatataagtaagagaatgtagtggcatctatattcaatgaaagtgttttgatgtgcatatgtactttctaaggtgaaatgcatctatgtatacagacagcctttaaatcacatccttcagtataatttatatatgctttcataatttccttgctggtataaatgttttgtatttgaaaaagttatctctagcatattacataaaaggcttcaccttataaagtcaaatctttgttatcattgaattttaggaaggatgaatggttaagcatatataaaatactaatattaagtaaacttcatgttggccaacatcaggatgtattctatggatgtcattattttcaattaagaattagtgtttaaaattcctaaattgtttgagtgtttgattataatttgtaaaagaaagtttaatatttctttgaatttaaaataaagcttatatttcagaaaaaaaaaagatacagaacatggctgggtgcagtggttcatctctgtaatcccagcacgttgggaggctgaggcaggcagatcacttgagatcaggagtttgggaccagccgggccaacatggagaaaccctgtctctactaaaaatacaaaaattagccaggcatggtggcacgtgcttataatcccagctacatgggaggctgagacaagagaaccacttgaacccgagaggcagaggttgcagtgagcagaggtcatgccactgcactccagcctgggagacagagcaagactctgtctcaaaaaaaagttacaaaccattttcatcaccacaatgctatcccttgtgctactcatttttggtaatactgtcctcccatccaccatccctaatccctggcaaccacaaatctgtttttcatttctacaattttgtcttttctacaatgctgtgcaaatgaaatcttatagtatataacattttaggggcttatttcactcagcataattccctggagattcattcaaggcattaatatttatgtatcaatagttcatttttattggtgagtagtaattcgtggtatggatgtaccacagtttgaccattcacttattgttggacatattgattatttcgagcttctggcgattacaagtaaagctgctatgaacaattatgtataagtttctggatgggcataaattttaatttctctgaagtgtaattgttgaattgtgtgctcattgcatgtttagttttataagacactatcaaacagttttccatagtggctgtaagattttaccttcccagcagcattttacaaggtgtccaatttctctgcatctttgtcaccatttcgtgttgtcactatgtcttttattttagctgttgtaataagtgtgtagtgatacctcatcatggtcttaatttgcatctagtgaagcaaattagtgttgaacatcttttcatgagcttatttgcttatttcctcttcagtgaaatgtatgttcatatattttgatcattttctaattggattatttgtttgttttttgccgttgagttttttgttgttgttgtttgtttttgagagagcctctcgctctgttactcaggctggagtgcagtggcatgatcttggctcactccaacctccgcctcccaggttcaagcgattctcatgcctcagcctcccaagtagctgggattacaggcgtgaaccatcatgcctgtcaatttttgtatttttagtagagatgggtttttgccatgttgctcaggctgatctcaaactcctgccctcaagggatctgccctccatccacctcaacctttcaaagtgctgggattacaagcgtgagccatggcctactgttgagttttgagagtactatacatatccattatacattctggatgtgagtcctttcttggatatgtggtttgcaaacattctctcccattccataccctgttttttcatccttttaacagggtttcttgcagggcaaaagttttaaattggatgaaatctaattttttttccttatggattatgctttttgaactgtttactatgccctagatctcagatgtttctcctatgttttcttgtaaaagtttctgttttagttttatattttagatttaaatctatgatccacttgagttttttttttttgtataaaggtatgaagattaggtcttttttttattagcttatggctctgcaacttctccagcaccatttgttgagcagacaatccttccttctttttgtcgctttgtaaaaagtcagtgtggggctatttctaggttctctattttgttccagtgatctgtgtgtctattcttcgccccatacgacacagtcttgattcctgtagctatataagaagtattgaaatatggtagagccattcctcccaccttattcttctttttcaaaaagtgtcttagctatatatatatatgcatatgtatatatatttttgagatggagtctcacttgtgtcgcccaagctggagtgcactggggtaatctcgcctcactgcaacctctgcctcctggattcaagcgattctcctgcctcagcctcctgagtacctggaatttcaggcgtgagccaccacacccggctaatttttatatttttagtggagacgtggtttctccatgttggccagactggtcttgaactcctgacctcaagtgatctgctagtcttggcctcccaaagtgctgggattataggtgtgagtcttaatggtctccattcacacacaatgattttaaaatagactcccctctgcctttcccttccccagaaatgttcccctctgcaccgtgcaatggtacctatgagaaagaactgtcccattcccaaatcactgtccccaccccagcccccaggcccttggttggtgagacccttgatgggcagtctcatgcttctgtccaggggactttcccaccgttgctcccctgcatggagactaagtggactcttctattccctggccatcacagagtctacagtgcacacatctgcctgattcctccacgttacccagatgacgatttcatctgtgtctcctcccacatactcccaaatggaccatcccagaccttgaacccaaaaatggttcagagagcgaaggccaagatgcccaaccacatgctgcagaatcctgctccaggactgaagtgtatagtctctatcaaaataaaaactggaggccaggcacagcagctcacccctgtaatccctgcattttaggaggccaaggcgggaggatcgcttgagcccaggagtttgagaccagcctgggtaacatagcgagactttcttgacaaacctaaaaaagttagtggggtgtgatggtgcatgcctgtagtcacagctactccggaggctgaagagggaggatcgcttgagcccaggagttcaaggctgcattgagctatgatcatgccactgcactccagcctggacagagcacgacccaatctctagaagaaacaaacaaacacccagcaactggaaacatcctcctctagaatggtggtcaggaacatctgtctgccttgttccctgatgtctctccagcacctagaatagcgctcagcacgaggacacactcattagggttttgttgaataaatgactcctttgacacatcaattccacttctaagaatctttcctaaagaaatattcacacatgtgcacagagctgtgtggacaataatgagaggagcaaacaactggggaacgtttgcaaaggtttattaactggcagtgactgatacaggggaatcggatgaggggagtacatgctgaacaggaaacagagtgaggggggcttgaccaggacacgtggcaatggagaaaagcagatgggagatacttatactggtactcggtgtgtgtgtgtgcatgtgaggtgtgtgtgtaaatgcagaggaaaaaatcagaaattaaacactcagacctgatctcagtagtcacatctggggagagaggagggtagtgctgttctatggagagaatacctgacaatacttgttttctgaggtaggtgcatggatacacaagccgaaatatgcattaagcatgtcttgctcatcaaaagaaaacgctaatgtctaacagaatggcacactgcaagaaaatacaacggaaacgccaatatcgaactcttggcacactaagaaaaatgatgctcaacttttcactgttgtgaacacttgctttcacttgctatgcacctgatgacgaggggtccgcagccatgcccatgttcgtgaaaggtcaccacgttctgcttctcatcatgggcatgtgtcatattccctgaggctgaggcaagaagagggaaggaaagtaagtggcagtgagttcccaccacgtgacaactcaatctcaactcctcctgacctgcagaccctgcccactccgattctgccctatctcaggacctgcacacaccttccacggttcctcgaagtgaaccatctgttcatgccacagtgacttcctcgcctaggctatcaattcctaggctagaggaaggtgtggcctgcatatcagggctgacctggggtttgggagcccacagcatcctgggtagggagcatccctggacctacaggccagggagtaaaaagagaatgcgaaatcggccgggcgcagtggctcatgcctgtaatcccagcactttgggtggccgaggtgggccgatcacgaggtcaggagatcgagaccatcctggctaacatggggaaaccccgtctctactaaaaatacaaaaaaattagctgggcgtagtggcaggcccctgtagtcccagctactggggaggctgaggcagaatggcgtgaacccaggaggtggagcttgcagtgagccgagatcgcacctgggtgacaaagagagactccatctcaaaaaaaaaaaaaatacgaaagagcatgggaaatctcatcattcagcctcaatgctgtaccctagaaaattatgagaagggaatggtttggggaacaagtgagaagatgggataccagtatcataacagaatagcacatctgcagggatgtgaggggtgagccgaagattcacttatggagttactcgtcatcttcctcagggtcgctgatctcttcataaatcaccagctgctttctctcacgcagtctgtgggtccagtcatgtttccgccttttgggtcctatgatgaatagttggaagatgagggttgggtaggttggagagtgttaggctctgttttctccaaaaaaggagatgcctaccccctcccaagtgcccatgggccttctttatccagtttttcacattctctggcttagagaggctgagaccttagatccacaccaatacaggccaaatgcaaactaaaattttagcttctggctccttccattgtgaggtttagattcccaacctcttcacttacgggaacattcaccgatacctcctttcattcagcaagcatttgttaagggcacacaggcacactttgttttattgctcctcatttttacagtgcttcacagatgctgcaattttttttggaaattctcaccaattttatacttttccattattattatgtctgttatggtgatctgtgatcagtgagctttgacattattactgcaattgtttttgttgttttttagtcttttaaaataatttttgttctttattttgtgggtacgcagtaggtgtatattcttatggggtacgtgagatgttttgatacaggcatgcaaatgcgtagtaatcacatcgtggaaaatagggtatccatcccctcagccatttatccttgtgttacaaacaatccaattacattctatcagttctttttaaacacacaattaagttat

SEQ ID NO: 93343 - DNA, 71898 bp, Homo sapiens
  misc_feature (1)...(71898): n = A,T,C or G
nnatgtctacaaggttttattaaaattaagtttaatattaataacacactaatataaaagtaaaatttagcttatctggtataaaaatcatacaagaaacattaaatataaaatgatgtttagctttctttggtctaaaaactaataaaaattagtgctaatggaaatattcattttactagaggatcataaaagttaaagacttaaaacaaactttagcaattaagacagtatatcaagctacaaatgcctggttgaaatggatcaaatattccaactacacaataaacaaaagcaattgttatgcttgtgcacatggcaggccagaggccctaattgtccccttcccactacggtggtcctccagttcaccaggtgtgggcctgatggtagctcttttccaggattctacagcctggagtaataagtcatgccaagctctctctgctatatcctgaagtccctgccagtcagcccccgagggccatccagcttctgtctctcaacactaagttcacttcctgtctctcacggcagggaggaaacttagcattccttggagacctaaaaggatgcagtgagcttaagaattttcaagagcttatcaatcagtcagcccttgttcatccctgagcagatgtgtggtagtattgtggtggacctttactaggcactctgccaaataactagagtggcatttgtgccttagtccattgggctatccctttcaccctggcatttcatcaaccagaggaaggaaaaaataataataacacatcgtaaagtgagaggagccccttataagtctttcaactctcacatctatttagatgcaatcgaagccctgcaaggaataccagatcaatttaaagcttgaaatcaaatagttacaagatttaagtcaatattttagtagataacagtcaataaaaatgtagattagataaactacatctattacaaccaacagcaaagagcttttcatgagttaaaaaaaaaaaaaaaactcatgtcggccccagccctgaggctacctgacctgacaaaactcttcacactctatgtgtcagaaagagaaaaaaatggcagttggagttttaacccagactggaggttcctggccaaggccaatggcctgtctctcaaaacaactagacggggtttccaaaggctggcccccatgtccaagggccctggcagcaacagccctgttaacacaagaagcaaataagctaactcttaggaaaaacctaaacataaagtctccccatgctgtggtaattttaataaataccaaaggacatcattagctaataaatgatagactaactagataccaaagcttgcattgtgaaaatccnnnnnnnnnnnnnnnnnnnncttgcattgtgaaaatccccacataaccattgaagtttgcaacaccctaagctcactatcttactcctattatcagagagcccagttaaacataactgtacatcagtagactgggagctgtacgtggatgggagcagcttcaccaatccctgcaaaatgactctgaagaagacaacaaacactgctccagtcacacccagaagctgactggtccacgcatggctgaagcatgaggagactcatcgcaggactcattttcctcagaatttggacttgtacaggaaggacttcaactgaccttcctcagactaagaactgtttccagtatatacatcaagtcactgaggtggaacaaaagattgctacagtcctattactttatagttattataaaagagctaattactttatggttattataaaagagctaattgccttccatgatcacgccctcataatcgtctttcttatcagcttcctggttctatatgccctctttctaacactcacaacaaaactgactaacactaatatcacggacgcccgaggactctaaaaaaattaaatagcaacaaaaacaacaacaaattgtttgtataatgctattctatccaaggtatgtagcccaggaaataaccaacctgatgtgtgttatgaacaattttaagcctcccatgatcacagtttttaaaataaaattaaggactgctccttttctatgtgacacaagtaaggtaataggtagaaccgaaaaaaacagagctcctcaaaatgtaaccttaaaatttgacacttgtgccgctattaatagtaagcagcatgaaacaggatgtgattctctaaattaaaaaagaaagttacacagtaaaaaaaataagtatatctgtcaaaaatcatatttatgtgagatgtgtcaatactggtctcgtgtcattcagactacttaaaaggaaaataaaaaagatcgtgtttgactccaaaaaggaaaactcagcccctcttgcatgaataggagctacaaccttttagaattgataatcacaaacccctcagacccaaagtaaaataaaagaaaaatatatatcattagacatggataaaaagggactagatcctaatgtaagcatcctaataaaaggagaggttcaaaaacgctctccagaaccagtgtttcagactttctatgatgaactaaatgtgccagtacctgagattccaggaaaaactaaaaatttctttttgcaattagcctaacacgtagcccagtctctacaagtcacctcatattatgtttgtggaggaaccataacagtagatcaatggccataggaagcccaagaattagttcctacagacccatttcctgatgaattcccagcccaaaagaatcaccctgatcatctctaggttctaaaagtctcaattattagacagtattgcatagctaaagaaggaaaaggattcactcatcctgtaaggcagcttagctgtcttagacaaaagctctataatagtaccacaaaaacagtcacatggtggagttccaattacacagaaagaaatccattcagtaaatttccaaagttgcagactgtttgggcccacccagaattccactgggactggacggcccccaccggattatactggatatatgtggacacaaagcttatgctaagctgcctgatcagtagacaggtagctgtgtaattcgcaccattaagccttctttcttcttactgcccataaaaacatgaacttctaggcttcccagtctatgcttcctgggaacaaaaaaatgaagcatagccataggaaaagatgataaatagccccctgaaaaaaatcatacaatactatggacccaccacttaggcacaagatggctcatgaggatattggacccccatctacatgctcaaccgaatcatacggttacaagctgttttagaaatttttactaataaaaccggtcaagccttgaccgttcttgcccggcaagagactcagatgagaaatgcaatctatcaaaatagactagctcttgactacttgctagcagctgaaggaggagtttgtgaaaaatttaaccttactaattactgtctacacatagataatcaggcaagttattaaagacatagttaaaaatatgacaaaactggcacatgtacctgtgcaagtgtagcacggattcaaccctgaagccatgtttagaaagtggttcccagcactagaaaaatttaaaactcttataataggagttacaataattataaaaacctgcttactgctcccttgtttgctacctgtacttcttcaaatgataaaaagcttcatcgctaccttagttcaacaaaatgcttcagcacaactgtactatatgaatcactatcagtctattccacaaaaagacataagtaaaaaaatgagtgagaactcccactaataaaaagtgagagtctcaaaaggggggaatgaaggaagagaaggaccctctcagattattttatattgttttatgctcagtacctgttttaagaaaaaacaacaaagaagtaaaaccaaagacaggcagcctggctccaggcctgaaaccaggcctgggcctgcctgacctaaacccagtagttaaaaatcaactcataacttagaaaccgatgttattcagagattccagacattgtacagaagaacactgtaaaaccccctgccctgttctgtttctctctgaccagcagtgcatgcagcacctgtcacatacccactgcttgcttaaatcaatcacgaccatttcatgtgaaatctttagtgttgtgagcccttaaaaaggacaaaaattgcgcacttgaggagcttggattttaaggcagtagcttgccgatgctcccagctgaataaagcccttccttctacaacttggtgtctgagaagttttgtctgtggctcatcctgctacacatgcacagagaggcaactggaggctgaggagtttcctttgtctggttgctgtggcttgctctctggggtggaggggtaggtccacaagggacacagacctgagccccacccaggttttggcaccagatataaggttcttgaattggtttgatccctgagagcatgccaacagacaacacgaggcagtgcggagcagcgtgctgttttaatgagtgcctgggtgcaggtgggctgaggcctaaaatggcatcagccccaagtgaggatgggacagtggttttatagttctctgtaaagagtaagtgtcccaatctaacgtgactgctatgtagtatctggatggcctcttgatcttcaagggttcatgtctccagccagggtaggtgtcttctggccggctctcttcctgcttctgctatcttgctgacacacgctgctgatgcaagcagccttgcatnnnnnnnnnnnnnnnnnnnnnnnnnnnnnnnnnnnnnnnnnnnnnnnnnnnnnnnnnnnnnnnnnnnnnnnnnnnnnnnnnnnnnnnnnnnnnnnnnnnnnnnnnnnnnnnnnnnnnnnnnnnnnnnnnnnnnnnnnnnnnnnnnnnnnnnnnnnnnnnnnnnnnnnnnnnnnnnnnnnnnnnnnnnnnnnnnnnnnnnnnnnnnnnnnnnnnnnnnnnnnnnnnnnnnnnnnnnnnnnnnnnnnnnnnnnnnnnnnnnnnnnnnnnnnnnnnnnnnnnnnnnnnnnnnnnnnnnnnnnnnnnnnnnnnnnnnnnnnnnnnnnnnnnnnnnnnnnnnnnnnnnnnnnnnnnnnnnnnnnnnnnnnnnnnnnnnnnnnnnnnnnnnnnnnnnnnnnnnnnnnnnnnnnnnnnnnnnnnnnnnnnnnnnnnnnnnnnnnnnnnnnnnnnnnnnnnnnnnnnnnnnnnnnnnnnnnnnnnnnnnnnnnnnnnnnnnnnnnnnnnnnnnnnnnnnnnnnnnnnnnnnnnnnnnnnnnnnnnnnnnnnnnnnnnnnnnnnnnnnnnnnnnnnnnnnnnnnnnnnnnnnnnnnnnnnnnnnnnnnnnnnnnnnnnnnnnnnnnnnnnnnnnnnnnnnnnnnnnnnnnnnnnnnnnnnnnnnnnnnnntaaagggtccagaaaatgctaatctatagagatagaaattagattagtggttgcctagggtaggatggatgcaaaatttcagagtggggggttagaggctattgtatagaatcttttggagataatactgattattgtagtgaaagtaaaattctgtgaatatactaggaaacattgaactgtacacactaattggtgagtcatatggtatatgaattatgtgtcaacaaagttttagaagacattacttgcaccacgatattaaaaaatggcgtttgagttgtataattacttcttctctctatgtcaagggcaccgaacaggcaggagcctctcacctgccactgttcttaacagtattataaaataattacataagacaggttacttacatattctaggtcataaaaattattgcttgactagagtaattgtaaatataaaagaacaccaaacacactaaaataaatatgaggtcaactcaaattttagcagttatattttaacttgattgatttttcctcagatataagtatgagaaatgacagaaagaaacaacaactggaaaagaagcattgcataagaccaggatgtctctgaaatggatgtcagtctttctgctgatgcagctcagttgttactttagctctgggagttgtggaaaggtgctggtgtggcccacagaatacagccattggataaatatgaagacaatcctggaagagcttgttcagaggggtcatgaggtgattgtgttgacatcttcggcttctaytcttgtcaatgccagtaaatcatctgctattaaattagaagtttatcctacatctttaactaaaaatkatttggaagatttttttatgaaaatgttcgatagatggacatatagtatttcaaaaaatacattttggtcatatttttcacaactacaagaattgtgttgggaatattctgactataatataaagctctgtgaagatgcagttttgaacaagaaacttatgagaaaactacaagagtcaaaatttgatgtccttctggcagatgccgttaatccctgtggtgagctgctggctgarctacttaacataccctttctgtacagtctccgcttctctgttggctacacagttgagaagaatggtggaggatttctgttccctccttcctatgtacctgttgttatgtcagaattaagtgatcaaatgattttcatggagaggataaaaaatatgatatatatgctttattttgacttttggtttcaagcatatgatctgaagaagtgggaccagttttatagtgaagttctaggtaagtcgtgtgtccaattggtgtttattaagttctaattttcctgtgcctttgaaggtgggcttatataaatataatgtcagaagatagtgtttttatgggaaattatgaattgcaaatgtaagatgatctatgagtctcaaaannnnnnnnnnnnnnnnnnnnnnnnnnnnnnnnnnnnnnnnnnnnnnnnnnnnnnnnnnnnnnnnnnnnnnnnnnnnnnnnnnnnnnnnnnnnnnnnnnnnnnnnnnnnnnnnnnnnnnnnnnnnnnnnnnnnnnnnnnnnnnnnnnnnnnnnnnnnnnnnnnnnnnnnnnnnnnnnnnnnnnnnnnnnnnnnnnnnnnnnnnnnnnnnnnnnnnnnnnnnnnnnnnnnnnnnnnnnnnnnnnnnnnnnnnnnnnnnnnnnnnnnnnnnnnnnnnnnnnnnnnnnnnnnnnnnnnnnnnnnnnnnnnnnnnnnnnnnnnnnnnnnnnnnnnnnnnnnnnnnnnnnnnnnnnnnnnnnnnnnnnnnnnnnnnnnnnnnnnnnnnnnnnnnnnnnnnnnnnnnnnnnnnnnnnnnnnnnnnnnnnnnnnnnnnnnnnnnnnnnnnnnnnnnnnnnnnnnnnnnnnnnnnnnnnnnnnnnnnnnnnnnnnnnnnnnnnnnnnnnnnnnnnnnnnnnnnnnnnnnnnnnnnnnnnnnnnnnnnnnnnnnnnnnnnnnnnnnnnnnnnnnnnnnnnnnnnnnnnnnnnnnnnnnnnnnnnnnnnnnnnnnnnnnnnnnnnnnnnnnnnnnnnnnnnnnnnnnnnnnnnnnnnnnnnnnnnnnnnnnnnnnnnnnnnnnnnnnnnnnnnnnnnnnnnnnnnnnnnnnnnnnnnnnnnnnnnnnnnnnnnnnnnnnnnnnnnnnnnnnnnnnnnnnnnnnnnnnnnnnnnnnnnnnnnnnnnnnnnnnnnnnnnnnnnnnnnnnnnnnnnnnnnnnnnnnnnnnnnnnnnnnnnnnnnnnnnnnnnnnnnnnnnnnnnnnnnnnnnnnnnnnnnnnnnnnnnnnnnnnnnnnnnnnnnnnnnnnnnnnnnnnnnnnnnnnnnnnnnnnnnnnnnnnnnnnnnnnnnnnnnnnnnnnnnnnnnnnnnnnnnnnnnnnnnnnnnnnnnnnnnnnnnnnnnnnnnnnnnnnnnnnnnnnnnnnnnnnnnnnnnnnnnnnnnnnnnnnnnnnnnnnnnnnnnnnnnnnnnnnnnnnnnnnnnnnnnnnnnnnnnnnnnnnnnnnnnnnnnnnnnnnnnnnnnnnnnnnnnnnnnnnnnnnnnnnnnnnnnnnnnnnnnnnnnnnnnnnnnnnnnnnnnnnnnnnnnnnnnnnnnnnnnnnnnnnnnnnnnnnnnnnnnnnnnnnnnnnnnnnnnnnnnnnnnnnnnnnnnnnnnnnnnnnnnnnnnnnnnnnnnnnnnnnnnnnnnnnnnnnnnnnnnnnnnnnnnnnnnnnnnnnnnnnnnnnnnnnnnnnnnnnnnnnnnnnnnnnnnnnnnnnnnnnnnnnnnnnnnnnnnnnnnnnnnnnnnnnnnnnnnnnnnnnnnnnnnnnnnnnnnnnnnnnnnnnnnnnnnnnnnnnnnnnnnnnnnnnnnnnnnnnnnnnnnnnnnnnnnnnnnnnnnnnnnnnnnnnnnnnnnnnnnnnnnnnnnnnnnnnnnnnnnnnnnnnnnnnnnnnnnnnnnnnnnnnnnnnnnnnnnnnnnnnnnnnnnnnnnnnnnnnnnnnnnnnnnnnnnnnnnnnnnnnnnnnnnnnnnnnnnnnnnnnnnnnnnnnnnnnnnnnnnnnnnnnnnnnnnnnnnnnnnnnnnnnnnnnnnnnnnnnnnnnnnnnnnnnnnnnnnnnnnnnnnnnnnnnnnnnnnnnnnnnnnnnnnnnnnnnnnnnnnnnnnnnnnnnnnnnnnnnnnnnnnnnnnnnnnnnnnnnnnnnnnnnnnnnnnnnnnnnnnnnnnnnnnnnnnnnnnnnnnnnnnnnnnnnnnnnnnnnnnnnnnnnnnnnnnnnnnnnnnnnnnnnnnnnnnnnnnnnnnnnnnnnnnnnnnnnnnnnnnnnnnnnnnnnnnnnnnnnnnnnnnnnnnnnnnnnnnnnnnnnnnnnnnnnnnnnnnnnnnnnnnnnnnnnnnnnnnnnnnnnnnnnnnnnnnnnnnnnnnnnnnnnnnnnnnnnnnnnnnnnnnnnnnnnnnnnnnnnnnnnnnnnnnnnnnnnnnnnnnnnnnnnnnnnnnnnnnnnnnnnnnnnnnnnnnnnnnnnnnnnnnnnnnnnnnnnnnnnnnnnnnnnnnnnnnnnnnnnnnnnnnnnnnnnnnnnnnnnnnnnnnnnnnnnnnnnnnnnnnnnnnnnnnnnnnnnnnnnnnnnnnnnnnnnnnnnnnnnnnnnnnnnnnnnnnnnnnnnnnnnnnnnnnnnnnnnnnnnnnnnnnnnnnnnnnnnnnnnnnnnnnnnnnnnnnnnnnnnnnnnnnnnnnnnnnnnnnnnnnnnnnnnnnnnnnnnnnnnnnnnnnnnnnnnnnnnnnnnnnnnnnnnnnnnnnnnnnnnnnnnnnnnnnnnnnnnnnnnnnnnnnnnnnnnnnnnnnnnnnnnnnnnnnnnnnnnnnnnnnnnnnnnnnnnnnnnnnnnnnnnnnnnnnnnnnnnnnnnnnnnnnnnnnnnnnnnnnnnnnnnnnnnnnnnnnnnnnnnnnnnnnnnnnnnnnnnnnnnnnnnnnnnnnnnnnnnnnnnnnnnnnnnnnnnnnnnnnnnnnnnnnnnnnnnnnnnnnnnnnnnnnnnnnnnnnnnnnnnnnnnnnnnnnnnnnnnnnnnnnnnnnnnnnnnnnnnnnnnnnnnnnnnnnnnnnnnnnnnnnnnnnnnnnnnnnnnnnnnnnnnnnnnnnnnnnnnnnnnnnnnnnnnnnnnnnnnnnnnnnnnnnnnnnnnnnnnnnnnnnnnnnnnnnnnnnnnnnnnnnnnnnnnnnnnnnnnnnnnnnnnnnnnnnnnnnnnnnnnnnnnnnnnnnnnnnnnnnnatatatatatatatatatgaaatttgatatacccattaaggacaatggagagctactgaaaagagttaagaaatgaagagatatgatcagatttcctttcaaaaaaaatcccaatgttctcaatgtgtaatattacagaaaggcaactttgtacaatgtaaagaatatttaggaacttttacatgagtttaggcaatcatgactacttttacaataataatcacaacttcatattgtgttgtgtggaaaaaagtagttaccacagataaaacacttaagttgtctctgacacatagccagtgatccaaaaatattgttgatattatgattattattttagtcattatttctaatattttaaattagctaacatgtgccagccatttaagatatcagtcttcatttaataatgattgattttcctagcaaaatcctagagaacagatactctgtgtgcttgtttaaatataaatgtttaagtttgggcagtcagttgaacacgctggaaagctaaagttgtattgcaaaggtggaggcacttcattaatattttagcttaaaaggtaattctgtgtactcttatcttattctcaaaaaaaaatcctcactcacatcaaaagaaagtgatagtgccattagcagggggaagagaataggagaataaggaggacaaggaataaatgactagtagtacaatagtgattattactaatactaccatgatctcagctcactgcaacctccaccctctaggttcaagtgattctgattctcctgnnnnnnnnnnnnnnnnnnnnnnnnnnnnnnnnnnnnnnnnnnnnnnnnnnnnnnnnnnnnnnnnnnnnnnnnnnnnnnnnnnnnnnnnnnnnnnnnnnnnnnnnnnnnnnnnnnnnnnnnnnnnnnnnnnnnnnnnnnnnnnnnnnnnnnnnnnnnnnnnnnnnnnnnnnnnnnnnnnnnnnnnnnnnnnnnnnnnnnnnttgcttgcttttccttatgtattagattctcagataatgtttgtatatttcaaaagaataagactcttgccaaaaagtatcaagtgtttgaaaactgcatatagttattgcctttgtaatatattcacatgaaactgtacagagaataaatcatgatggtaagattcaatattagtagcaaatattcgttaaaaaactctggaaataattcaaatatcttacattaagaaatggttaaaaacttatacaatgcgcataccaagccattacaatccattttttcaaaacaatgtttaattacactgtcagctgtagtacaggtatagttggaaactaaggaacagaatgatgagtagaacaagatcacaatttttttgtaggataaaaaggcatatacaatgagaaaaaatttttctaaataaacatcacatatgtacattgagttatataaatagaattaaaaccataatgaaatggtacacattttaaattgagatagagatatgggaaaaatgatttttttcctaaattttcatacttttacaagactacttacattgatcttctattaccattgctttcataaagacgtcacagaatgagatcagtgctgatctgtctataaacagacgattttttacttcaatacttggtggatgaagaagacttttgtgcagtgaatgagacaaaacattaaaccgaagttacattaaatgtggttacaggcaactgcaattacactgagttcctggatgcctcatgaattaactctaatagccatacactgaatctccaattaaaactgatatcagaccgggcacagtggctcaagcctgtaatcccaccactttgggaggccgaggcaggtggatcatgaggtcaggaggtcaagaccagtctggccaagatggtgaaacctgtctctactaaaaacagaaaaattagccaggcgtggtggcaggtgcctgtaatcccagctactcaggaggctgaggcaggagaattgcttgaacctgggaggcagaggtcgcaatgagccaaggttgcatcattgcactccagcctaggtgacagagcaagactccatctcaaaaataaataaataaataaaataaaataaaaataaaagatgtcataaagttcaattatatttttgaaaaataccaatatatggtctgaattgacatattttagaatttccttttttattcgtaaacagttttataaagaaatttcccccaatgattaggaccagaaagtatatttgttatgatagaaggggttggtcattattttactgagaaaaaaagaatttagaacaaaagggacaatagcaacaaaaagatgagtatacaattttgatattgatatccgggaaacttatgagtctacatttcttttcctctttctctctttctttttnnnnnnnnnnnnnnnnnnnnnnnnnnnnnnnnnnnnnnnnnnnnnnnnnnnnnnnnnnnnnnnnnnnnnnnnnnnnnnnnnnnnnnnnnnnnnnnnnnnnnnnnnnnnnnnnnnnnnnnnnnnnnnnnnnnnnnnnnnnnnnnnnnnnnnnnnnnnnnnnnnnnnnnnnnnnnnnnnnnnnnnnnnnnnnnnnnnnnnnnnnnnnnnnnnnnnnnnnnnnnnnnnnnnnnnnnnnnnnnnnnnnnnnnnnnnnnnnnnnnnnnnnnnnnnnnnnnnnnnnnnnnnnnnnnnnnnnnnnnnnnnnnnnnnnnnnnnnnnnnnnnnnnnnnnnnnnnnnnnnnnnnnnnnnnnnnnnnnnnnnnnnnnnnnnnnnnnnnnnnnnnnnnnnnnnnnnnnnnnnnnnnnnnnnnnnnnnnnnnnnnnnnnnnnnnnnnnnnnnnnnnnnnnnnnnnnnnnnnnnnnnnnnnnnnnnnnnnnnnnnnnnnnnnnnnnnnnnnnnnnnnnnnnnnnnnnnnnnnnnnnnnnnnnnnnnnnnnnnnnnnnnnnnnnnnnnnnnnnnnnnnnnnnnnnnnnnnnnnnnnnnnnnnnnnnnnnnnnnnnnnnnnnnnnnnnnnnnnnnnnnnnnnnnnnnnnnnnnnnnnnnnnnnnnnnnnnnnnnnnnnnnnnnnnnnnnnnnnnnnnnnnnnnnnnnnnnnnnnnnnnnnnnnnnnnnnnnnnnnnnnnnnnnnnnnnnnnnnnnnnnnnnnnnnnnnnnnnnnnnnnnnnnnnnnnnnnnnnnnnnnnnnnnnnnnnnnnnnnnnnnnnnnnnnnnnnnnnnnnnnnnnnnnnnnnnnnnnnnnnnnnnnnnnnnnnnnnnnnnnnnnnnnnnnnnnnnnnnnnnnnnnnnnnnnnnnnnnnnnnnnnnnnnnnnnnnnnnnnnnnnnnnnnnnnnnnnnnnnnnnnnnnnnnnnnnnnnnnnnnnnnnnnnnnnnnnnnnnnnnnnnnnnnnnnnnnnnnnnnnnnnnnnnnnnnnnnnnnnnnnnnnnnnnnnnnnnnnnnnnnnnnnnnnnnnnnnnnnnnnnnnnnnnnnnnnnnnnnnnnnnnnnnnnnnnnnnnnnnnnnnnnnnnnnnnnnnnnnnnnnnnnnnnnnnnnnnnnnnnnnnnnnnnnnnnnnnnnnnnnnnnnnnnnnnnnnnnnnnnnnnnnnnnnnnnnnnnnnnnnnnnnnnnnnnnnnnnnnnnnnnnnnnnnnnnnnnnnnnnnnnnnnnnnnnnnnnnnnnnnnnnnnnnnnnnnnnnnnnnnnnnnnnnnnnnnnnnnnnnnnnnnnnnnnnnnnnnnnnnnnnnnnnnnnnnnnnnnnnnnnnnnnnnnnnnnnnnnnnnnnnnnnnnnnnnnnnnnnnnnnnnnnnnnnnnnnnnnnnnnnnnnnnnnnnnnnnnnnnnnnnnnnnnnnnnnnnnnnnnnnnnnnnnnnnnnnnnnnnnnnnnnnnnnnnnnnnnnnnnnnnnnnnnnnnnnnnnnnnnnnnnnnnnnnnnnnnnnnnnnnnnnnnnnnnnnnnnnnnnnnnnnnnnnnnnnnnnnnnnnnnnnnnnnnnnnnnnnnnnnnnnnnnnnnnnnnnnnnnnnnnnnnnnnnnnnnnnnnnnnnnnnnnnnnnnnnnnnnnnnnnnnnnnnnnnnnnnnnnnnnnnnnnnnnnnnnnnnnnnnnnnnnnnnnnnnnnnnnnnnnnnnnnnnnnnnnnnnnnnnnnnnnnnnnnnnnnnnnnnnnnnnnnnnnnnnnnnnnnnnnnnnnnnnnnnnnnnnnnnnnnnnnnnnnnnnnnnnnnnnnnnnnnnnnnnnnnnnnnnnnnnnnnnnnnnnnnnnnnnnnnnnnnnnnnnnnnnnnnnnnnnnnnnnnnnnnnnnnnnnnnnnnnnnnnnnnnnnnnnnnnnnnnnnnnnnnnnnnnnnnnnnnnnnnnnnnnnnnnnnnnnnnnnnnnnnnnnnnnnnnnnnnnnnnnnnnnnnnnnnnnnnnnnnnnnnnnnnnnnnnnnnnnnnnnnnnnnnnnnnnnnnnnnnnnnnnnnnnnnnnnnnnnnnnnnnnnnnnnnnnnnnnnnnnnnnnnnnnnnnnnnnnnnnnnnnnnnnnnnnnnnnnnnnnnnnnnnnnnnnnnnnnnnnnnnnnnnnnnnnnnnnnnnnnnnnnnnnnnnnnnnnnnnnnnnnnnnnnnnnnnnnnnnnnnnnnnnnnnnnnnnnnnnnnnnnnnnnnnnnnnnnnnnnnnnnnnnnnnnnnnnnnnnnnnnnnnnnnnnnnnnnnnnnnnnnnnnnnnnnnnnnnnnnnnnnnnnnnnnnnnnnnnnnnnnnnnnnnnnnnnnnnnnnnnnnnnnnnnnnnnnnnnnnnnnnnnnnnnnnnnnnnnnnnnnnnnnnnnnnnnnnnnnnnnnnnnnnnnnnnnnnnnnnnnnnnnnnnnnnnnnnnnnnnnnnnnnnnnnnnnnnnnnnnnnnnnnnnnnnnnnnnnnnnnnnnnnnnnnnnnnnnnnnnnnnnnnnnnnnnnnnnnnnnnnnnnnnnnnnnnnnnnnnnnnnnnnnnnnnnnnnnnnnnnnnnnnnnnnnnnnnnnnnnnnnnnnnnnnnnnnnnnnnnnnnnnnnnnnnnnnnnnnnnnnnnnnnnnnnnnnnnnnnnnnnnnnnnnnnnnnnnnnnnnnnnnnnnnnnnnnnnnnnnnnnnnnnnnnnnnnnnnnnnnnnnnnnnnnnnnnnnnnnnnnnnnnnnnnnnnnnnnnnnnnnnnnnnnnnnnnnnnnnnnnnnnnnnnnnnnnnnnnnnnnnnnnnnnnnnnnnnnnnnnnnnnnnnnnnnnnnnnnnnnnnnnnnnnnnnnnnnnnnnnnnnnnnnnnnnnnnnnnnnnnnnnnnnnnnnnnnnnnnnnnnnnnnnnnnnnnnnnnnnnnnnnnnnnnnnnnnnnnnnnnnnnnnnnnnnnnnnnnnnnnnnnnnnnnnnnnnnnnnnnnnnnnnnnnnnnnnnnnnnnnnnnnnnnnnnnnnnnnnnnnnnnnnnnnnnnnnnnnnnnnnnnnnnnnnnnnnnnnnnnnnnnnnnnnnnnnnnnnnnnnnnnnnnnnnnnnnnnnnnnnnnnnnnnnnnnnnnnnnnnnnnnnnnnnnnnnnnnnnnnnnnnnnnnnnnnnnnnnnnnnnnnnnnnnnnnnnnnnnnnnnnnnnnnnnnnnnnnnnnnnnnnnnnnnnnnnnnnnnnnnnnnnnnnnnnnnnnnnnnnnnnnnnnnnnnnnnnnnnnnnnnnnnnnnnnnnnnnnnnnnnnnnnnnnnnnnnnnnnnnnnnnnnnnnnnnnnnnnnnnnnnnnnnnnnnnnnnnnnnnnnnnnnnnnnnnnnnnnnnnnnnnnnnnnnnnnnnnnnnnnnnnnnnnnnnnnnnnnnnnnnnnnnnnnnnnnnnnnnnnnnnnnnnnnnnnnnnnnnnnnnnnnnnnnnnnnnnnnnnnnnnnnnnnnnnnnnnnnnnnnnnnnnnnnnnnnnnnnnnnnnnnnnnnnnnnnnnnnnnnnnnnnnnnnnnnnnnnnnnnnnnnnnnnnnnnnnnnnnnnnnnnnnnnnnnnnnnnnnnnnnnnnnnnnnnnnnnnnnnnnnnnnnnnnnnnnnnnnnnnnnnnnnnnnnnnnnnnnnnnnnnnnnnnnnnnnnnnnnnnnnnnnnnnnnnnnnnnnnnnnnnnnnnnnnnnnnnnnnnnnnnnnnnnnnnnnnnnnnnnnnnnnnnnnnnnnnnnnnnnnnnnnnnnnnnnnnnnnnnnnnnnnnnnnnnnnnnnnnnnnnnnnnnnnnnnnnnnnnnnnnnnnnnnnnnnnnnnnnnnnnnnnnnnnnnnnnnnnnnnnnnnnnnnnnnnnnnnnnnnnnnnnnnnnnnnnnnnnnnnnnnnnnnnnnnnnnnnnnnnnnnnnnnnnnnnnnnnnnnnnnnnnnnnnnnnnnnnnnnnnnnnnnnnnnnnnnnnnnnnnnnnnnnnnnnnnnnnnnnnnnnnnnnnnnnnnnnnnnnnnnnnnnnnnnnnnnnnnnnnnnnnnnnnnnnnnnnnnnnnnnnnnnnnnnnnnnnnnnnnnnnnnnnnnnnnnnnnnnnnnnnnnnnnnnnnnnnnnnnnnnnnnnnnnnnnnnnnnnnnnnnnnnnnnnnnnnnnnnnnnnnnnnnnnnnnnnnnnnnnnnnnnnnnnnnnnnnnnnnnnnnnnnnnnnnnnnnnnnnnnnnnnnnnnnnnnnnnnnnnnnnnnnnnnnnnnnnnnnnnnnnnnnnnnnnnnnnnnnnnnnnnnnnnnnnnnnnnnnnnnnnnnnnnnnnnnnnnnnnnnnnnnnnnnnnnnnnnnnnnnnnnnnnnnnnnnnnnnnnnnnnnnnnnnnnnnnnnnnnnnnnnnnnnnnnnnnnnnnnnnnnnnnnnnnnnnnnnnnnnnnnnnnnnnnnnnnnnnnnnnnnnnnnnnnnnnnnnnnnnnnnnnnnnnnnnnnnnnnnnnnnnnnnnnnnnnnnnnnnnnnnnnnnnnnnnnnnnnnnnnnnnnnnnnnnnnnnnnnnnnnnnnnnnnnnnnnnnnnnnnnnnnnnnnnnnnnnnnnnnnnnnnnnnnnnnnnnnnnnnnnnnnnnnnnnnnnnnnnnnnnnnnnnnnnnnnnnnnnnnnnnnnnnnnnnnnnnnnnnnnnnnnnnnnnnnnnnnnnnnnnnnnnnnnnnnnnnnnnnnnnnnnnnnnnnnnnnnnnnnnnnnnnnnnnnnnnnnnnnnnnnnnnnnnnnnnnnnnnnnnnnnnnnnnnnnnnnnnnnnnnnnnnnnnnnnnnnnnnnnnnnnnnnnnnnnnnnnnnnnnnnnnnnnnnnnnnnnnnnnnnnnnnnnnnnnnnnnnnnnnnnnnnnnnnnnnnnnnnnnnnnnnnnnnnnnnnnnnnnnnnnnnnnnnnnnnnnnnnnnnnnnnnnnnnnnnnnnnnnnnnnnnnnnnnnnnnnnnnnnnnnnnnnnnnnnnnnnnnnnnnnnnnnnnnnnnnnnnnnnnnnnnnnnnnnnnnnnnnnnnnnnnnnnnnnnnnnnnnnnnnnnnnnnnnnnnnnnnnnnnnnnnnnnnnnnnnnnnnnnnnnnnnnnnnnnnnnnnnnnnnnnnnnnnnnnnnnnnnnnnnnnnnnnnnnnnnnnnnnnnnnnnnnnnnnnnnnnnnnnnnnnnnnnnnnnnnnnnnnnnnnnnnnnnnnnnnnnnnnnnnnnnnnnnnnnnnnnnnnnnnnnnnnnnnnnnnnnnnnnnnnnnnnnnnnnnnnnnnnnnnnnnnnnnnnnnnnnnnnnnnnnnnnnnnnnnnnnnnnnnnnnnnnnnnnnnnnnnnnnnnnnnnnnnnnnnnnnnnnnnnnnnnnnnnnnnnnnnnnnnnnnnnnnnnnnnnnnnnnnnnnnnnnnnnnnnnnnnnnnnnnnnnnnnnnnnnnnnnnnnnnnnnnnnnnnnnnnnnnnnnnnnnnnnnnnnnnnnnnnnnnnnnnnnnnnnnnnnnnnnnnnnnnnnnnnnnnnnnnnnnnnnnnnnnnnnnnnnnnnnnnnnnnnnnnnnnnnnnnnnnnnnnnnnnnnnnnnnnnnnnnnnnnnnnnnnnnnnnnnnnnnnnnnnnnnnnnnnnnnnnnnnnnnnnnnnnnnnnnnnnnnnnnnnnnnnnnnnnnnnnnnnnnnnnnnnnnnnnnnnnnnnnnnnnnnnnnnnnnnnnnnnnnnnnnnnnnnnnnnnnnnnnnnnnnnnnnnnnnnnnnnnnnnnnnnnnnnnnnnnnnnnnnnnnacatggtaatgactggctatagctgaccatatatcaaggctgtcaatgctaggtagtgcatcatctaagtgtgaaagatcagttaagcaaaaagtagcaaaatacaattttctacattttcagcatctgtattgttaatcatgaattgtcaatgggctcctttttcctacattgttagcatttacaaaagtagcaatactgataatagtctgaatttgtgtcaaacactgccacttgaaatttttcctgaaagtagcacttgatagttagcaaatgaaaagaaattacacatactacatatgtagcattatttctcaccatatgtgcagtttaaatatttagtcttttgtaatcaatgatgtcaaattcataaaataacttatgactagtagacaagtggatataagtaaactcttctcatatcactcaaaaattaataaatttatattaaatttggaaggttacagctagtataaagtatataaaataaatatataggttattactaatttgctacttttttattactagaattaagactgcctaacaattcttaaatatttgaatatttcattgataatcttgtgaaccccaaatatctgatacaggtctcagtacatttagaaagtttatttttgccaacttgaagcagggaggaggcattcctttgactttctgattagcctctccaaggaggcaatcagatatgcatttatcccagtgagcagaggggtgactttgaatagaatgggaggcagtgatttgcttagtgactttggggcccccaggcttattttccttttacatttaaaaaaaatcttttggagaaagcattttagaagaaaatgagtctctggtctcaggttttcatctgatctctaatggcaaggaaggtttattcctaagcaggtcctgagttattaggaaagttcatttttagtaggttgtgaagtctcatgtcctatgaagacaaaataaagggagaaagggagaaaaacaaaaccaaacaaaagaaaaatccttgaaaattaatataggcccattactctgaagtccataaatcagtaggcaggtatgaaagtggattatgtatgtaaattggctgctgttattttcttctggagtttaagttgtctagcttaatttgtagggctttatgaaagcatgacttagtttacagtgactccaaactaggaaaaatggtggaaagggaggaaaaaaaacctgaagacactattttgaagacgtgtcgccatgaaaaattagaattcagtccaaactgtagacagtaataaaagttgaaaaacattaggcaagactagaatctaacaacaggtatactgttatttttgaaacataatttttctgtcttcagtttcccaattttactaaagacaaaccatggtacaactgatttgctttattatacttggcctgattattgtatacagaggaggaagaataattttttatttacataggcttttaaagtggctttgatggaactttgtcttatagaaagaatctcagataggacttttttaaagctgaggaaagccatagatttctaccatcaaatacctacgagttgggtgaattcctctcctcttggggttccaaaataaacttggggttcctgggcctgtcagaaagttacattctttgcttaacacagttcaggaaccctgtacagggaccttatagatgaaggtatgaggccagttttcccaaggggttttattggctccataagttaagtttgattccctaaaggaaagcccaccattccagtggaagccttgataaaataaccagtttctccaattgtgttttgttaaaaatgaaaatagattcttattgcacttatgcaaataactgtattgacaaaagtaaaaaatactcacaaatagtttccaaattctgaaaaatcaggtagagggaaacaaatatgttctaaatttttttcataggagtatactaaattgttaaaagctgttaatagctcaaaaaaagaaagattccttcactctaaaaaaaaaaacaaaacaaaacaaaggatcagcaatgttttaagcaaagtcaaaaagattactttagttttctattatttcagtccatgtagttaattcctgttctgcttgatattcatgaacattttagttctccatgagtcctgaaagtttttcttccattctaatgtcacaatctccaaaattatcaaaaactttttttcaagagcacctgttagaatttcatggctgagtataaaatcgccttctaaagaggaccaaagtcagacaacaattgtctgtggatgacaaaaagttttagggcagcctcagtcaaagacacaatggacaaggaaatttgttacctctgtggcacacaataacttaacataacaaatataattattactgataatgtacacactaagtcatatcagaattataggagtttcccataattttggaacacatgccaataacatatttatataaatacagctcaaaaagaccaaacaccatttcatgtttgacaatgttccctgtataatttttataccaaataagccaaattatgtcatttttggactttagggaaactaataaattaaaggattacttaggtcagaaaaaaacataattttggaaaatttgtcaaatatcaaaggattaaaaagcttgatatcacaggtaaaataaagcattcatttgactaaagtagtaactcaaggatttcaaaaaaaggcaaaaatcttcattctttgagagaggagactcaatttgccaaacaataagccctaataaaacagcatgaagccaaataagtttgtttttcaaaattgtatgaacaatctataaaattctaatcttgaccataagatataactttcctcagcctttcataacgtttataatctttattaagaagtcagtttatgcttcaagaaaaccttgttaatctgacacaggggcccatatgttggtcttgcattagtgtgtctttgacattaatgattaatttatgcataaacggaacttattttatctcttagtatcagttctttcaatctcacacacccacctcttctgtgatagtccctggaccttgaggagttgaatagcttttagaaaacactgttagcattatgccacaacaaacagaacttgaggaaaaaacttacatgagttgaaaatgagttgaaggagagtgttactatttcacaccctttaaaaggggagagaaaaccaaaaacagtgagatgcaagaaaagttaaactttgggttaaaaaaaaaaaactcataatattttaagagtaaatcaatcccttaagaaaatgttattgttctaaccaattatttagtgcataagtgctttttttacatcaagcccaatctgtagaaacaccattataatttccctttaattatagacaacttgatcatataaaagtttttttaatcttcttattgtgacttacacagatcattcatgatatgtttggactttctggtttgtcctgaacatccttctttcttacacaactgatcattttattctaggactaaatttaccacacaagattctttctcatataaaattatttctcttcaagctttttacaaaaaaaaaaaaaaaactttttatttttataactttctttacatctcccttacttcctggttccttttaccttgttttatacataacctttaaataagctttgaattagacaacacttcttcacctttttaaaaaagatgcacttttttttggaaagaatgttttcctacaaatttttttttaaaaatacccaaacaatgaaatatctattatttaatttaatataaccttagattctaaattatgagtttgtctataagtatttatcccattacatttacctaattatttagtcatttacctagaatatttgtgaaaagtgtggtagtcatcatttaaagttatggaattgccattgcaaaattataactgagacagtgaaaaagatctgacctaactccatcttgcttttaacctccaagctctccgtgtttatttctgggtgtaggccaaactaacttaaggaggaacttactttatagtttagctttgaaataaaaatgataacagtcttttcccaaaacaaagcttaatgcctgtggactagattgcttaaggccacaagatgagaagttatgataatcttacttaattcaaggtgtagctatttgcattaaaccaatattaatgtcttatttattaaaaattacacaagtgaagatcattctgttttgggcttggtttacagttttgtaacccctatgtcaaattttgacaccttaaagtatttggcaagaataagtatgaaatttnnnnnnnnnnnnnnnnnnnncatttctaatattatctactttatcataattgttgttatcttatttataaaagattttatttaagttacataaacttgaaaaagcatttgactagtctttttttctggcaaagtatttaattcaagcacttttattttcttaagccaattaattagagctcttttatatattttcagtaataaaacattgtgtacaaaacacataaatacatagatgtagtaagcatgccaacagaagtacatcttacaagtttataaaaactcctctttgccatattagactttcaaattcttgataacctgtttcaataggtaatctgtatgaatacttgatcaccataggcagttgtgagctaaataatcttacatttgcatattaaaagaaaccattcaggtgaaaatcaaatagcaaaatttacatcataatgtacacagagaaaaaaattggtgtgctagaaggaaaataaaatggatttaattgccaattaaacataaaattatagaaattataatggccttttaaatatatgcaaacacttacacacacacaaaagattatgtggtttttacttcagaaatttagctatgagataaaaaaaaatcaccagcttgcagacaaaaacccgttgaatcaaaacagtggtttttaacttaatagaaaaataaaagcaaatttaaagcaagaataaaagaaaatttttaaaaaagagagaacttaggaactctacagtttgtaggacaaccttagggctcttaatgtatatgtgcacaaagaccgtattaccttcattttacataaactctgccaagtagaggtgtcataaatccaaacaggcgatatcaggggatcattcttcttgttttctcatcattcttagattatttgtttcccactttttttcctaaaaggaggaactgagctgtggcctagggtttatgtgtggtgaatcaatgtgtgctgcttgtgggcagtactccacagtgtgtcaccactgagttgtttccaccctcttacgtgtctcagtttctccctccagaggtgtatgacctctgagagggctcaaaatgctgggtgatctgccctcatatgtgtttcctggactagcctttttttaaaagttaatttttcttggggatttccctgcaggaccactgcatgtcatagggggtcaaacccaagacactcccacaaggcccccagttgcttaggggtgccttttgcctgggaggagcagatgccctttcactttggagctgagaaaactcagtctctcattttcctatgtaaaccacagttcagtttctcacacaaatccacacagacaagccaaatgagattaatttggggaataaaaacaatagaggagaccctttacaacacatctccaaactagaattaggattcttaaacaacaacttcctaggaggaaaaaaataacaacagtcaatactacttccagtaaactgtactcagccaccctctactttgtaactcgtctgccattacacacgccaaggtaaaatcctctcacagtacaaggtaatctgtggtaatctcgaagccaaagagatcaggtcattcaacataggaaaacagagctttggacctaagaaaaaatctgcccacaactcttgaaactccacaaagaaaacagagcacccccaaaggggtgagtggtgcctttgttctgaattctttaaaagagttcaaatcattagaagccttctctagatttttggtactacaaatggcaaaagacaaaaggaggtatagggtggaggaaaagtaaacaaaagaacatttgtttttttaaagacaggaagcaaacacagaaaccaagagcatggtttttaggttttgttttgttttctcttttgcatctgtgaagaattttcaccaaattagacaggctttgttacccacaatttggaattctcactcagatatgatcaagtcaggtaaagtttgtcaaatctgatgggagaaatactggaatgtacaaaaaaaatactcccaaaaatgtgatcattaagcactgtaatggtaaggagaaattaagtccagctagttgttaaacattaaccaagacaaaaccccaattcagctatttacctacggatgggtttcaggctaaaactgccctctgtcgtcctagaagtaggaaagaaacctcaaatttatcctccctcctgggagtgagctcaaactccatagagttacctgccttccattgtcatggaaacaggaaatattgcctttcttgtaggaagcaagtaaaactccaaaaaaaaataaaaaacaaaaaaaaaggagttgtacagcaaaataaacttttggtcttgactgaattttggggtatcagggattctctggaggggttgctcccagacctcagccaattgtcttatttgtttgagccataaagttagctcatgctggtaccaagcactgacaggacatttatcaaaggtcagggaacctccactcagagtctcttcatggttaccaaaatgtgaaccctgaatatctgaggcaggtctcagttaatttagaaagtttattttgccaaggttgaaaatgtgcacccatgacacagcctcagggggtcctggtgacatgtgtcccaaggtggtggggggacagtttggttttatacattttagggatacatgagacatcaatcaacttatataagatggacatttgttcagtccagaaatgggggacaactagaaacaaaggcagagcaacttgaagcatggaaggggcttccaggtcataggtagataggagacaaatggctgaattcctttgagtttctgattagcctctccaaatgagkcaattagatatgcatttatctcagtgagccaagggctgactttgaatagaatgggaagtaggtttgccctgagcagcttaacttttccctttagcatagattttggggcaccaagatttattttcctctcacactctcatgtgtctagctattaagttagaaatgtcatttttttatataccaaattgattataaaagtaaagatattaaatgtgggtattcagcttacctcagacttttagtagttctcattacttgacatcacttcttcttatttcttcatcttttatatggattaactgattattaatctcttcagaattctaacaagttatatttttagagttctattcattgaacaagatattttccttgccctaacaggttctatggagatttgatggcaagaagccaaatactttaggttccaatactcgactgtataagtggttaccccagaatgaccttcttggtaagactctggagaacaaatactgaatatattagtaacagccaattagaagtgataatatttcaacataaaacaaacatatttaacatttattattggaaaactaaaaaaaaatcaaatttaactactttatatttattttctagtcttagtataagaagaatacactatggtagttggcattttgttacatacagtcacattctttatggtcagaataaaaatctctttattcaggtgtaattacctctcacaggttttaaataacatcctggattttctgtctcttatttctgcaactttacatctgttccttcccctactgcagggttatttcaacaggtactgaaaaataacagacattcttctattaccagtgactctattttctgtgggaataaatcaccaatctttatcataaagtgataacacatttcatgatgatgtgtaacctgtccttcctcagcaccacctccaccctactccttgctgcctttaaaaaaaaatttaagtattttaaatattttaactatttaaatattttttaaatatataaatgtgactgcataatttatactacttaagagactatgttcttgtataccaaatcttattcttttcttttttgcacattttaattttttaattaagaatatgttttttcattttgttcacctggcaaacttttaaatttatgtttccactgtgaagacacacagaccaccaccttttcatgtagccttcacttacctttccagcagaagtaggtgcttcttcctctgaaatttgaaaacaatttcaatgcagttttgtgggtataatgttacctaaggaacagttttgctttaagttccttatattgtgcatttcttattcaattcctgtgccttataattaataactttgttaaaatgcatccacttttaggtcatcccaaaaccaaagcttttataactcatggtggaaccaatggcatctatgaggcratctaccatgggatccctatggtgggcattcccttgtttgcggatcaacatgataacattgctcacatgaaagccaagggagcagccctcagtgtggacatcaggaccatgtcaagtagagatttgctcaatgcattgaagtcagtcattaatgaccctatgtgagtattacaattttgtgaccaggtggtacttacaaattattttgtcaacagtgaatatgagtttgaaccctttgttaagagactaattttgaagggattgaagtgatttaaccaatgtaaaatctgctcttattttccaccagacaattatttcaaagttacatttcaaccccacagatttaatgggtcaccaatgactgcaatgaattataaaatcaaaaaaattaaagatatgtacataattattttaaatatttttaatgatagaatacacaatagaaattatgtaactagagaaatatgataaaatatttcaattcaatacctaaaatttctgaaagtatgaatctattctttctcaaaaatttatttttattattatcattattttaatcaatttgaaaatgagttacaatttgcatagcataacattcactaaaatttaaaatctaaatatatttagtatgtttacatagttacgaagccacaaccctaaataacatttttgtgagctcaaattaaactcaaaatgcatgaagtcactcccaatacacctccagtcctagaaaaataccgacttactttgtttctcaatagattattctcttcacatattttatataaatgaaatcatacaatttatagtgttttgtaaacgacttctttcacttagcataattatttttagttttatttatgttgttggatgtannnnnnnnnnnnnnnnnnnnnnnnnnnnnnnnnnnnnnnnnnnnnnnnnnnnnnnnnnnnnnnnnnnnnnnnnnnnnnnnnnnnnnnnnnnnnnnnnnnnnnnnnnnnnnnnnnnnnnnnnnnnnnnnnnnnnnnnnnnnnnnnnnnnnnnnnnnnnnnnnnnnnnnnnnnnnnnnnnnnnnnnnnnnnnnnnnnnnnnnnnnnnnnnnnnnnnnnnnnnnnnnnnnnnnnnnnnnnnnnnnnnnnnnnnnnnnnnnnnnnnnnnnnnnnnnnnnnnnnnnnnnnnnnnnnnnnnnnnnnnnnnnnnnnnnnnnnnnnnnnnnnnnnnnnnnnnnnnnnnnnnnnnnnnnnnnnnnnnnnnnnnnnnnnnnnnnnnnnnnnnnnnnnnnnnnnnnnnnnnnnnnnnnnnnnnnnnnnnnnnnnnnnnnnnnnnnnnnnnnnnnnnnnnnnnnnnnnnnnnnnnnnnnnnnnnnnnnnnnnnnnnnnnnnnnnnnnnnnnnnnnnnnnnnnnnnnnnnnnnnnnnnnnnnnnnnnnnnnnnnnnnnnnnnnnnnnnnnnnnnnnnnnnnnnnnnnnnnnnnnnnnnnnnnnnnnnnnnnnnnnnnnnnnnnnnnnnnnnnnnnnnnnnnnnnnnnnnnnnnnnnnnnnnnnnnnnnnnnnnnnnnnnnnnnnnnnnnnnnnnnnnnnnnnnnnnnnnnngttttaatattgataaaataaatatgtaatagttttccataatccaagggaaataatatggaaaatgctgtgactacaccagctaccatcaattcagagtctattaatcctaccaatattattatgatgtaaggtggtaccagctaagagaatacattaaaaacactttaccaaaaaattagtaagacaagaaatgatttaaaatacttcaaataaagtaaaaaagcaaagaaacagaaaacaggttagaaaacaaaaatatatagaataaaatggtggatttaaatgtgaactagggcaatcaggcaagaaaaagaaataaagggtattctataaatagaaagagaagaagttaaattgtctctatttgcagatgacataattctatatttagaaaaccccttcatctcagttctaaaattccttaagctgataagcaacttcagcaaagcctccggatagaaaaatcaatatgcaaaaattacaagtattcctatacaccaacaatacacaagcagagccaaatcacgaataaattcccatttgcaattgcaacaaagagaataaaatacctaggaatatgcctaacaaggtacgtgaaggacctcttcaaggagaaatagaaaaccctgctgaaggaattaagagaggacacaaacaaatggaaaaacattccatcctcatggataaaaaaatcagaattgtaaaaatggccatgctgcccaaagtaattttttttattatactttaagttttagggtatctgtgcacaaggtgcagctttgctacatawgtatacatgtgccatgttggtgtgctgcacccattaactcgtcatttaacattaagtgtatctcctaatgctatccctccccactcccgctacccccaagcaggccccggtgtgtgatattccccttcctgtgtccttgtgttctcattgttcaattcccacctatgagtgagaacatgcggtgtttggttttttgtaccttgcgatagtttgctgggaatgatggtttccagcttcatccatgtccctgcaaaggacatgaactcatcattttttatggctgcatagtattctatagtgtatgtgtgccacattttcttaatccagtctatcattgttggacatttgggttggttccaagtctttgctattgtgaatagtgcctccataaacatacttgtgcacatgtctttatagaagcatgatttataaccctttgggtatatacccagtaatgggaatgctagataaatgatatttctagttctagatccctgaggaatcaccannnnnnnnnnnnnnnnnnnnnnnnnnnnnnnnnnnnnnnnnnnnnnnnnnnnnnnnnnnnnnnnnnnnnnnnnnnnnnnnnnnnnnnnnnnnnnnnnnnnnnnnnnnnnnnnnnnnnnnnnnnnnnnnnnnnnnnnnnnnnnnnnnnnnnnnnnnnnnnnnnnnnnnnnnnnnnnnnnnnnnnnnnnnnnnnnnnnnnnnnnnnnnnnnnnnnnnnnnnnnnnnnnnnnnnnnnnnnnnnnnnnnnnnnnnnnnnnnnnnnnnnnnnnnnnnnnnnnnnnnnnnnnnnnnnnnnnnnnnnnnnnnnnnnnnnnnnnnnnnnnnnnnnnnnnnnnnnnnnnnnnnnnnnnnnnnnnnnnnnnnnnnnnnnnnnnnnnnnnnnnnnnnnnnnnnnnnnnnnnnnnnnnnnnnnnnnnnnnnnnnnnnnnnnnnnnnnnnnnnnnnnnnnnnnnnnnnnnnnnnnnnnnnnnnnnnnnnnnnnnnnnnnnnnnnnnnnnnnnnnnnnnnnnnnnnnnnnnnnnnnnnnnnnnnnnnnnnnnnnnnnnnnnnnnnnnnnnnnnnnnnnnnnnnnnnnnnnnnnnnnnnnnnnnnnnnnnnnnnnnnnnnnnnnnnnnnnnnnnnnnnnnnnnnnnnnnnnnnnnnnnnnnnnnnnnnnnnnnnnnnnnnnnnnnnnnnnnnnnnnnnnnnnnnnnnnnnnnnnnnnnnnnnnnnnnnnnnnnnnnnnnnnnnnnnnnnnnnnnnnnnnnnnnnnnnnnnnnnnnnnnnnnnnnnnnnnnnnnnnnnnnnnnnnnnnnnnnnnnnnnnnnnnnnnnnnnnnnnnnnnnnnnnnnnnnnnnnnnnnnnnnnnnnnnnnnnnnnnnnnnnnnnnnnnnnnnnnnnnnnnnnnnnnnnnnnnnnnnnnnnnnnnnnnnnnnnnnnnnnnnnnnnnnnnnnnnnnnnnnnnnnnnnnnnnnnnnnnnnnnnnnnnnnnnnnnnnnnnnnnnnnnnnnnnnnnnnnnnnnnnnnnnnnnnnnnnnnnnnnnnnnnnnnnnnnnnnnnnnnnnnnnnnnnnnnnnnnnnnnnnnnnnnnnnnnnnnnnnnnnnnnnnnnnnnnnnnnnnnnnnnnnnnnnnnnnnnnnnnnnnnnnnnnnnnnnnnnnnnnnnnnnnnnnnnnnnnnnnnnnnnnnnnnnnnnnnnnnnnnnnnnnnnnnnnnnnnnnnnnnnnnnnnnnnnnnnnnnnnnnnnnnnnnnnnnnnnnnnnnnnnnnnnnnnnnnnnnnnnnnnnnnnnnnnnnnnnnnnnnnnnnnnnnnnnnnnnnnnnnnnnnnnnnnnnnnnnnnnnnnnnnnnnnnnnnnnnnnnnnnnnnnnnnnnnnnnnnnnnnnnnnnnnnnnnnnnnnnnnnnnnnnnnnnnnnnnnnnnnnnnnnnnnnnnnnnnnnnnnnnnnnnnnnnnnnnnnnnnnnnnnnnnnnnnnnnnnnnnnnnnnnnnnnnnnnnnnnnnnnnnnnnnnnnnnnnnnnnnnnnnnnnnnnnnnnnnnnnnnnnnnnnnnnnnnnnnnnnnnnnnnnnnnnnnnnnnnnnnnnnnnnnnnnnnnnnnnnnnnnnnnnnnnnnnnnnnnnnnnnnnnnnnnnnnnnnnnnnnnnnnnnnnnnnnnnnnnnnnnnnnnnnnnnnnnnnnnnnnnnnnnnnnnnnnnnnnnnnnnnnnnnnnnnnnnnnnnnnnnnnnnnnnnnnnnnnnnnnnnnnnnnnnnnnnnnnnnnnnnnnnnnnnnnnnnnnnnnnnnnnnnnnnnnnnnnnnnnnnnnnnnnnnnnnnnnnnnnnnnnnnnnnnnnnnnnnnnnnnnnnnnnnnnnnnnnnnnnnnnnnnnnnnnnnnnnnnnnnnnnnnnnnnnnnnnnnnnnnnnnnnnnnnnnnnnnnnnnnnnnnnnnnnnnnnnnnnnnnnnnnnnnnnnnnnnnnnnnnnnnnnnnnnnnnnnnnnnnnnnnnnnnnnnnnnnnnnnnnnnnnnnnnnnnnnnnnnnnnnnnnnnnnnnnnnnnnnnnnnnnnnnnnnnnnnnnnnnnnnnnnnnnnnnnnnnnnnnnnnnnnnnnnnnnnnnnnnnnnnnnnnnnnnnnnnnnnnnnnnnnnnnnnnnnnnnnnnnnnnnnnnnnnnnnnnnnnnnnnnnnnnnnnnnnnnnnnnnnnnnnnnnnnnnnnnnnnnnnnnnnnnnnnnnnnnnnnnnnnnnnnnnnnnnnnnnnnnnnnnnnnnnnnnnnnnnnnnnnnnnnnnnnnnnnnnnnnnnnnnnnnnnnnnnnnnnnnnnnnnnnnnnnnnnnnnnnnnnnnnnnnnnnnnnnnnnnnnnnnnnnnnnnnnnnnnnnnnnnnnnnnnnnnnnnnnnnnnnnnnnnnnnnnnnnnnnnnnnnnnnnnnnnnnnnnnnnnnnnnnnnnnnnnnnnnnnnnnnnnnnnnnnnnnnnnnnnnnnnnnnnnnnnnnnnnnnnnnnnnnnnnnnnnnnnnnnnnnnnnnnnnnnnnnnnnnnnnnnnnnnnnnnnnnnnnnnnnnnnnnnnnnnnnnnnnnnnnnnnnnnnnnnnnnnnnnnnnnnnnnnnnnnnnnnnnnnnnnnnnnnnnnnnnnnnnnnnnnnnnnnnnnnnnnnnnnnnnnnnnnnnnnnnnnnnnnnnnnnnnnnnnnnnnnnnnnnnnnnnnnnnnnnnnnnnnnnnnnnnnnnnnnnnnnnnnnnnnnnnnnnnnnnnnnnnnnnnnnnnnnnnnnnnnnnnnnnnnnnnnnnnnnnnnnnnnnnnnnnnnnnnnnnnnnnnnnnnnnnnnnnnnnnnnnnnnnnnnnnnnnnnnnnnnnnnnnnnnnnnnnnnnnnnnnnnnnnnnnnnnnnnnnnnnnnnnnnnnnnnnnnnnnnnnnnnnnnnnnnnnnnnnnnnnnnnnnnnnnnnnnnnnnnnnnnnnnnnnnnnnnnnnnnnnnnnnnnnnnnnnnnnnnnnnnnnnnnnnnnnnnnnnnnnnnnnnnnnnnnnnnnnnnnnnnnnnnnnnnnnnnnnnnnnnnnnnnnnnnnnnnnnnnnnnnnnnnnnnnnnnnnnnnnnnnnnnnnnnnnnnnnnnnnnnnnnnnnnnnnnnnnnnnnnnnnnnnnnnnnnnnnnnnnnnnnnnnnnnnnnnnnnnnnnnnnnnnnnnnnnnnnnnnnnnnnnnnnnnnnnnnnnnnnnnnnnnnnnnnnnnnnnnnnnnnnnnnnnnnnnnnnnnnnnnnnnnnnnnnnnnnnnnnnnnnnnnnnnnnnnnnnnnnnnnnnnnnnnnnnnnnnnnnnnnnnnnnnnnnnnnnnnnnnnnnnnnnnnnnnnnnnnnnnnnnnnnnnnnnnnnnnnnnnnnnnnnnnnnnnnnnnnnnnnnnnnnnnnnnnnnnnnnnnnnnnnnnnnnnnnnnnnnnnnnnnnnnnnnnnnnnnnnnnnnnnnnnnnnnnnnnnnnnnnnnnnnnnnnnnnnnnnnnnnnnnnnnnnnnnnnnnnnnnnnnnnnnnnnnnnnnnnnnnnnnnnnnnnnnnnnnnnnnnnnnnnnnnnnnnnnnnnnnnnnnnnnnnnnnnnnnnnnnnnnnnnnnnnnnnnnnnnnnnnnnnnnnnnnnnnnnnnnnnnnnnnnnnnnnnnnnnnnnnnnnnnnnnnnnnnnnnnnnnnnnnnnnnnnnnnnnnnnnnnnnnnnnnnnnnnnnnnnnnnnnnnnnnnnnnnnnnnnnnnnnnnnnnnnnnnnnnnnnnnnnnnnnnnnnnnnnnnnnnnnnnnnnnnnnnnnnnnnnnnnnnnnnnnnnnnnnnnnnnnnnnnnnnnnnnnnnnnnnnnnnnnnnnnnnnnnnnnnnnnnnnnnnnnnnnnnnnnnnnnnnnnnnnnnnnnnnnnnnnnnnnnnnnnnnnnnnnnnnnnnnnnnnnnnnnnnnnnnnnnnnnnnnnnnnnnnnnnnnnnnnnnnnnnnnnnnnnnnnnnnnnnnnnnnnnnnnnnnnnnnnnnnnnnnnnnnnnnnnnnnnnnnnnnnnnnnnnnnnnnnnnnnnnnnnnnnnnnnnnnnnnnnnnnnnnnnnnnnnnnnnnnnnnnnnnnnnnnnnnnnnnnnnnnnnnnnnnnnnnnnnnnnnnnctttgttcatttctttttattcttttttgtctaaacttctcttcttgcttcatttcattcatttcatcttccatcactgataccgtttcttccagttgatcaaatcagctactgaggcttgtgcattcatcacatagttctcgtgccatggttttcagctccatcaggtcctttaaggacttctctgcattggttatctagttagccattcatctaatcttttttcaaggtttttaccttctttgccttcggttcgaacttcctcctttagtccggagtagtttgatcgtctgaagccttcttctctgaactcgtcaaagtcattctccatccagctttgttccattgctggtgaggagctgcatttctttggaggaggagaggcattctgattttataatttccagtttttctgctcttttttcccccatctttgtggttttatctacctttggtttttgatgatggtgatgtagaaatgggttttggtgtggatgtcctttccgtttgttagttttccttctaacagtcaggtaccctcagctgcaggtctgttcgagtttgctggaggtccactgcagatcctgtttgcctgggtatcagcagcggacactgcagaacagtggatattagtgaacagcaaatgttgctgtctgattgttcctctggaagttttctcagaggagtacccggctgtgtgaggtgtcagtctgcccctactggggggtgcctmccagtcaggctactcggggatcaggacccacttgagtagcagtctgtccattctcagatctcaagctgcgtgctgggagaaccactactcttttcaaagctgtcagacagggacatttaagactgcagaggtttctgctgccttttgtttggttatgccctgyccccagaggtggatctacagaggcaggcaggcgtccttgagctgcggtgggctccacccagttcaagcttctgggccgctttgtttacctattcaatccatgggaatggcaggcgcccctcccccagtctcactgctgccttgcagttcgatctcagactgctgtgctagcaatgagcraggctccgtgggcgtaggaccctctgagccaggtgcgcgatataatctcctggtgtgccgtttgctaaaaccttttggaaaagcgcagtattagggtgggagtaacccaattttccaggtgccatctgttacccctatccttggctagggaagggaattcacagaccccttgtgcttccctgatgaggcaatgcctcgccgtgctttggctcacacgtggtgcrctgcacccactgtcctgcacccactgtctgacagtcccctsggagatgaacccagtacctcagttggaaatgcagaaatcattcctcatctgtgtcattcacactgggagctgtagactggagctgttcttattcggccatcttggcttcttcccacagtaatttatatattcaaagctattcccatcaaactaccattgacattcctcacagagctagaaaaaaactactttaaatttaatatggaaccaaaaaagagcccatatagccaagacaamcctaagcaaaaagaacaaagctggaggcatcacgctacctgatgtcaaactatactattaggctacataaccaaaacagaatggtactggtaccaaaaagatgtattgaccaatggaacagaacatacgcctcagaaataacattacacatctacaaccatctgatctttgacaaacctgacaaaaacaagcaattaggggaaggattccctatttaataaatggtgttttggaaaaactggttagccatatggagaaaactgcaactggatcccttccttacaccttacagtaaccaaaccagcatagtactggaacaaaagcagacatatagaccaatggaacagaacagaggcctcagaaataacaccacacatctacagccatctgatcttcgacaaaactgacaaaaacaagcaatgggaaaggattccctatttaataaatggtgctggggaaactggctggccatatgcaaaaaacagaaactatacccctgccttacaccttatacaaaaattaactcaagatggattaaagacttaaatgtaaaacccaaaaccataaaaaccctggaagaaaacctaagcaacatcattcaggacataggcgtgggcaaaaatttcatgacacaaacaccaaaagcaattacaataaaagccaaagttgacaaatgggatcaaattaaactaaagagcttctgcacagcaaaataaaccatcatcagagggcacaggcaacctacagaatgagggaacatttttgcaatctatccctctgacaaaggtccaatatccagaatctacaagtaacttaaacaaatttacaagaaaaaaaacaccaccaccaaaaagtgggcaaaggatataaacagacacttctcaaaaaaatacatttatgcagccaacacacttatgagaaaagctcaatatcactgatcattagagaaatgcaaatcaaaaccacaatgagatacaatctcatgccagtcagaatggagatgattaaaaagtcaaaaaacaacagatgctggtgaaactggggagatataggaaaacttttacatttttggtgggaatgtaagttagttcaaccatcatggaaaacaatgtggtgattcctcaaagatctagaaccagaaacaccatttgacctagcaatctcattacttgatatatacccaaaggcatataaatcattctactgtaaagacacatgcacatgtatgtctattgcagcactatctacaatatcaaagatatggaaccaacacaaatactcatcaatgatagastggataaagaaaatatgatgcatgtacagtatggcggcatactatgtgccataaaaaggaatgagattatgtctgttgcagggacatggatgaaactcaaagccattatcctcagcaaactracacaggaacagaaaaccaaacaccacatgttctcactcataagagggagtcgaaaaatgagaatacatggactcagggaggggagcaaaacacaccggggccattcggggcatggaatgggagtgagagtatcaggacaaatagctaatacatgagggacttaaaatctagatgacagattgataggtgctgcaaaccaccatggcacacatatacctatgtaacaaacccacacattctgcgtatgtatcctggaacttaaaataaaactgtttttaaaaaatgtgaaccgaccagatgtggtggctcaagcctgtaatcccagcactttgggtggctgaggagggcagatcacgaggtcaagagatcgagaccatactcctggccaacatagtgaaaccctgtctctactaaaaatacaaaaattagctaggcatggtggtgtgcacctgtagtcccagctcctcaggagtttgaggcaggagaatcacttgaacctgggagacggaggtttcagtgagctgagatagtgccactgcactccagcctggtgacagagcgagactccatctcaaagatcacaacaaaaaagtgaacctaccagtactcgcattaaatttaaacagaccaaagtagacaaaataatgatctttgaaaacttttatttaaggagataaaacatttgaagtacacaattaaatgtaacctatgtgttatatgtgtgtgtgtgtatatatattgcacatatatctgtatatatgtatccatacatatatatactggttgtgtgtgtgtagacagaaaataaacatttttaaaagagtttatggagactgggtgtggtggctcacacctgtaattccaacactttgggaggccaaggtgggaggatcacatttggtcaggagttcgagaccagcctggccaacatggtgaaatcctgtgtccactagtaatacaaaacttagccagatgtgggggatgagcacctgtagtcccagacacttgggaggttgaggcatgagaatcacttgaacccaggagacgtaagttgcagtcagccaagatcgctccgtcatactcaagcctgggtgacagagagagactctgtctcaaaaaaaaaaaaaaaaaaagattatatgtatgaaatagttactggaattgaccatatgctgggccataaaaaaatgctaagtaaattgtataagattcaaattcataaaaatagtatgttctagtcatactagaatcaaattataaatcatccagaaaatgataactaaaaacaatctctgattctttaaaataaaaaatattttttaaaaaattcagtcaaaaaattctaattataaatatgcctttctctcatcaactattcttccaagtatacatccaacaaaaatgaataartatgtaaatctaataaaatatataaatatcttaataccataattattagtaagatcaaaaaatgttaacaacacaaatatccattaatcataaatgaagagatctgtggtctttgtcaatcaactgaatactctacaccagtgcaattaaacaactgctaaacaaaaacagaaatgaataagtattatttaattcaattatataaacataatctatgatattagaattcaggttaatacttactttgaggataaaagtagtgactaaaatggcccaggaggaaagagttcttctatgcagtttgtgataaattggtgttttcacttttggataatgtttaagataatcttaaaattttgagatagtcacatagcgtatatacatttatcctatgtatttcatacttaaacttttattgtggaagatatataacatattttaaagttccagaaatcaaatagcaaagtaagcatgaagcactagagaaatcctatgggtgcctatagtgtggccaggaaaacactctctaagaggtatcatttaaggggaagcctcaaaaagaaatagaagcaaacctcaagtagttgcaagaaagaatgctcaatgagagagacacggggaacaaaaggtgtaaacgggctaaggtgagaacaccttcaggagtttaaagaacaacagaaggccattgtctctagaagaaagtgtacagggggaaagggttaggacaagtaggtgtctgtgtagcgttctctagaccacagacagatttggattttattcttaatgtaacaagaaaccagatggaaatcttgacaggcaactgtcataatttgacattaatttagaaaatgttctggctactagtaggaaaatacggtagaagacagaagattagagtagaagctgagaaactagttaggagacatttcaccagttgtgacacaattcttctttaaatatgtcaaaatgggctgggcacagtggttcatgtctgtagggccaacactttgggagacagaggcagaatgattagaccacaggagttccagatgagtatgggcactacagcaagacctcatatctaaaaatgtaaaaaataaaaaatatagccaggcatggtggtgcgcagctgtagccccagcttctcatgaggctgaggtggaggattacctgagaccgaaacggaaaggctgcactgagccatgatcatgtgactgcactcagcctgtgtaatggagcaaaagcctgtctcaaaaaaaaataaaaactaaaaatatcaaaatgatcattcccagattctatttccactatcttacttatagcacttagaatggctcacaatattttctgctctagaaaaacattaactttcccaccgaaaattccatttttcatctttaaaggtatttgtcaatgataaaactccaatttaaaaaccaaactttctgtaatgacatacattaaaacattaatattttatgtcaattcaatgacacttactttgaatcacttgtgtggcgcttttcaaagaccatccatagacttgatatgcttaagcaataaatttacttttaatgttgatatctttatatttatccttcagctataaagagaatatcatgaaattatcaagaattcatcatgatcaaccggtgaagcccctggatcgagcagtcttctggattgagtttgtcatgcgccataaaggagccaagcaccttcgggtcgcagcccacaacctcacctggatccagtaccactctttggatgtgatagcattcctgctggcctgcgtggcaactatgatatttatgatcacaaaatgttgcctgttttgtttccgaaagcttgccaaaacaggaaagaagaagaaaagggattagttatatcaaaagcctgaagtggaatgaccaaaagatgggactcctcctttattccagcatggagggttttaaatggaggatttcctttttcctgcgacaaaacgtcttttcacaacttaccctgttaagtcaaaatttattttccaggaatttaatatgtactttagttggaattattctatgtcaatgatttttaagctatgaaaaataataatataaaaccttatgggcttatattgaaatttattattctaatccaaaagttaccccacacaaaagttactgagcttccttatgtttcacacattgtatttgaacacaaaacattaacaactccactcatagtatcaacattgttttgcaaatactcagaatattttggcttcattttgagcagaatttttgtttttaattttgccaatgaaatcttcaataattaaattatgtaaaaagtctcactcttccttttgagattgcaagaccagtagtgttgcttggcttttactgtgtattcagactcagcatcacttctttcctagaagacatggcaagtttattcctagaatgaaagatagtttcacatacaaaaattaacacgtatattataccacattaacagatacagatctacataacaaactagaaagcctagaaataaatccatgaatatatacagctaactgatcttcaataagagtcccaaatatactcaatgaagaaagatgagtttcttcaaaaaatggtgctgagaaaattggatgtccacaaccaaaagaaaaaagtgaacccttattttttatcatatacaaaaatcaactcaaaatggatgaaagatggcaacataagactagaaacagtaaaactttgagaagatggagatctggcaagatggttgaataggaacagctcctgtctgcagctctcagtgagaccaatgcagaaggcagggtgtttctgcattgccagggatnnnnnnnnnnnnnnnnnnnnnnnnnnnnnnnnnnnnnnnnnnnnnnnnnnnnnnnnnnnnnnnnnnnnnnnnnnnnnnnnnnnnnnnnnnnnnnnnnnnnnnnnnnnnnnnnnnnnnnnnnnnnnnnnnnnnnnnnnnnnnnnnnnnnnnnnnnnnnnnnnnnnnnnnnnnnnnnnnnnnnnnnnnnnnnnnnnnnnnnnnnnnnnnnnnnnnnnnnnnnnnnnnnnnnnnnnnnnnnnnnnnnnnnnnnnnnnnnnnnnnnnnnnnnnnnnnnnnnnnnnnnnnnnnnnnnnnnnnnnnnnnnnnnnnnnnnnnnnnnnnnnnnnnnnnnnnnnnnnnnnnnnnnnncctcccacagccaagggaagccatgagggactatgctatccagcccagatattatgctttccccatggtttttgcaatccacggagcaggatactcccttctgtgctgacatcgccagagcactgggttgcaagcgccaaactggggagctgtttgggcagacaccaagctagctacaggagttttttgttgctgttgttgttgttttgtttgtttgttttgtgcctggagcccaagtgagacagaaccattcactcccctacaaaggggactgaagccagggagccaagtggtctcgcttagtgggtcccactcccatgaagcccagcaagctaggaaccactagattgaaattttcgctgccagcacagcaatctgaagtcaacctgggacaaccgagcttactggggggaggggccattactgaggtttcagtaagcagttttcccctgacagtgctaagcaggccaggaaatttgtactggacagaattcaccacagcgcagcaaagcagctgtggccagactacgcctctaaattcctccccactcggcagggcatctctgaaagaaaggcagcagcaccagtcagggacttatagataaaactcccatctccctgggacagagcacctgggggaaggagcaactgtgggcaaagcttcagtggatttaaaccttcttgcctgccagctttgaacagaagagtggatcctgacaaggaggattctcccagcagagtcctcgagctctgctaagggacagactgcctcctcaagtgggtccctgaaccccatgcctcttgactgggagagaactcccagcaagggttgacagatacctcatacaggagagctccagctggcatcaggccagtgcccctctggggcaaggcttccataggaaggagcaggcagcaatctttgctgttccacagcctctgctggtgatacccaggcaaacagggtctggagtggacctccaccaaactgcaggagacctgcagaagagggagctgactgttggaagaaaaactagcaaacagaaagtaataacatcaacatcaacataaaagacccccacactaaaaccccatccaatggtcatcagcctcaaagatcaaaagtagatacatctaggaagataaggaaaactagcgtaaaaatgcaaaaaaaaaaaaaaaaaaatccaaaaaccagaatgcctcttctcctccaaatgattgcaactcctctccagcaagggcacaaaactggatggagaaggagtttgctgagttaacagaagtaggcttcagaagatggataataacaaactcctctcagctagaggggaactcatattctaacccaatgcatggaagctaagaaccttgataaaaggttacaggagctgctaactagaataaccagtttagagaagaacattaatgacctgatggagatataaaaaaaaaaaaaaaaacacagcacaagaacttcgtgaagcatacagaagtatcaatagctgaattgatgaagcagaagaaaggatatcagagactgaaggtcaacttaatgaaataagcagtgattggtttacccaaaagtgatggggaaaatggaaccaagttggaaaacactcttcaggatattatccaggagaacttccccaacctagcaagacaggccaacattcaaatccaggaaatatagaaaacaacgctaacatactcctcgagaagaggaaccccaagacacataatcatcagattctccaaggttgaaactaaggaaaaaatgtgtagggcagccagagagaacggacaggttatctacaaagggaagcccatcagactaacagtggatctctcggcagaaaccctacaaaccagaagagagtgggggccaatattcaacattcttaaagaaaagaatttttaacctggaatttcatatccagccaaactaagcttcataagtgaaggagaaataaaatctttacagacaagcaaatgctgaggattttgtcaccaccaggcctgccttaccagagctcctgaaggaagacttaaatatggaaaggaaaaatcagtaccagccactgcaaaaacacaccaaaatataaagactaatgactctatgaagaaactgcataaactaatgtgaaaaataaacagctagcatcatgatgacaggatcaaattcacacataacaatattaaccttaaatgtaaatgggctaaatgccccaattaaaagacacagatgggaaaattggataaagagtcaggatccatcagtgtcctatattaaggagacccatgtcacatgcaaagacacacgtaggctcaaaacaaataaagggatggaggaaaatttgccaagcaaatggaaagcaaaaagcagcaggggttgcaatcctagtctctgataaaacagactttaaaacaacaaagatcaaaagagacaaagaaggccactacataatggtaaacggaccaatgaaacaagaagagctaactattctaatatatatgcacccaatacaggagcacccagattcataaaagaagttcttagagacctataaagagacttaggtcccacataataatagtgggagactttaactttccactatcagtattagacagatcaatgagacagaaatttaacaagcctattcaggatttgaactcatctctagaccaagcagacctaatagacatctacagaactctccaacccaaatcaacagatatacattcttctcacagcacatagcacttactctaaaatcaaccacataactgggagtaaaacactcctcagcaaacgcaaaagaacggaaatcataacaaacagtctctcagaccacagtgcaatacaattagaactcaggattaagaaattcactcaaaaccattcaactacatggaaactgaataacctgctcctgaatgactactgggttaaataacaaaattaaggcagaaataacaaagtttgttgaaaccaatgagaacaaagagacaacatactaggatctctgagacacagctaaagcagtgtttagagggaaatttatagcactaaatgcccacaagagaaagcaggaaagatccaaaattgacaccctaatatcccaattaaaagaactggagaagcaagagcaaacacattcaaaagctagcagaagacaagaaataactaagatcagagctgaactgaaagagatggagacataaaacacccttcaaaaaaagtcaatgaatgcaggagctggtttttagaaaaggttaacaaaatagaccactagccaagctaataaaaaggaaaagagagaataatcaaatagactcaatgaaaaaagttaaataggatatcaccactgatctcacagaaatacaaactaccatcagaaaatactataaaaacatctcaacacaaataaactagaaaacctagaagtggataaattcctggatacatacagcctcaccagtctaaaccaggaagaagtcaaatccctgaatagaacaataacaagttctgaaattgaggcagtaattaatagcctaccaactaaaacaagcccaggaccagacagatttgcagccaaattctaccagaggtacaaagaggagctggtaccattccttgtgaaactattccaaacaacagaaagagagggaattctccctaactcactttatgaggccagcatcatgctgataccaaagactggcagagacacaacaaaaaagaaaatttcaggccaatatccctgatggacatcgatgcaaaaatattcaataaaatactggcaaactgaatctaaccacacatcaaaaagcttatccaccacaatcaggccagcttcatccccakgatgcaaggctggttcaacatacagaactcaatgaacataatccatcacataaacagaacgaattacaaataccacatgattatctcaatagatgcagaaaaggcctttgataaaattcaacatgccttcatgctaaaaactttcaattcactaggtattgatggaacatatstcaaaataataaaagcaacttatgacaaatccatagcccatatcatactgaatgggaaaaagctggaagcactccctttgaaaactggcacaagacaaggatgccctctctcactactccttttcaacatagtattggaagttctgcccagggcaatcaggcaagagaaagaaataaagtgtattgaaatagaaaaagaggacgtcaagttgtctctgtttgcagatgacatgattctatatttggaaaaccccatcatctcagcccaaaaactccttaagctgataagcaacttcagcaaagtctccgaatacaaaatcaatgggcaaaaatcacaagcattcttatacactgataatagacaaactgacagtcaaatcatgagtgaactcccattcacaagcactacaaagagaataaaatacctaggaatactcctaaaaacagtcatgaaggatttcttcaaggagaactacaaaccactgctcaaggaaataagagaggacacaaacaaatgaaaaagcattccatactcacggctaggaagaatcaatatcatgaaaatggccacagtgcttagagtaatttatagattcaatgctattcaaatcaagctaccattgactttcttctcagaactagaaaaaactactttgcattttatatggaacaaaaaagagcttgtatagccaaaacaaccctaagcaaaaaaaaaaaaaaaaaaactggaggcatcactctacctgacttcaaactatactacaaagctacagtaaccaaaacagcatggtactggtaccaagacagatatatagaccaatggaacagaacagaggcttcagaaataacaccatacaccatacatctacaaccatctgatctttgacaaacctgacaaaaacaagcaatgggaaaaggattccctatttaataaatggtactgggaaaacttgctatccatatgcagaaaacaaaaactggtcccctttcttacaccttatataaaaattaactcaagatggattaaagacttaaatgtaaaacccaaaaccataagaacactagaagaaaacctaggcaataccattcaagacataggcatgggcaaagacttcatgactaaaacaccaaaagcaattgcagcaaaagccaaaattgacaaatgagatctaattaaactaaagagcttctgcacagcaaaataaactatcatcagagggaacaggcaacctacagartcggcaaacatttttgcaatctatccctctgacaacggtctaatatctagagtctacaaggaacttaaacaaatttacaagacaaaaacaaacaacaccatcacaaaggctawaaacagacacttctcaaaagaagacatttacatggccaacaaacatatgaaaaaaagctcatcatcactggtcattagagaaatacaaattaaatccacaataagataccttctcatgccaattagaatgacaatcattaaaaagtcaagaaacaacagatgctggagaggatttggagaaataggaacacttttacactgttgatggcagtgcaaattagttcaaccattgtggaagacattgtggcaattgctcaaggatctagaagcagaaatacgatttcacccagcaatcccattactgggtatatacccaaaggattacaaatcattctactataaagagacatgcacacgtatgtttattgcaccactatttacaatagcaaagacttggaaacaacccaaatgcctatcaatgatagaccgaataaagaaaatgtgtacatatacaccatggaatactatgcagccataaaaaagcatgagttcatgtcctttgcagggatgtggatagaaaccatcattctcagcaaactaacaaaggaacagaaaaccaaatgctgcatgttctcacttataaatgggagttgaacaatgagaacacatagacacagaggggaacatcacacactggagcctgtcagggggtctgggacaaggagacagagagcattagaacaaatacctaatgcacgcagggcttaaaacctagatgatgggtcgatgggtgcagcaaaccacaatggcacatgtgtacctaggtaacaaacctgcacgttctgtacatgtatcacagaatttaagtaaaataaataaaaaataaataaaaatttttcaagtaagaataaataaaagtaacaggttaagcagcatcattgtctggggtaaatacccaagactcatcatctcactccagggaaactgaaaacacggacacacgagaagtgagtttaagaatggaggtttaataggggaaagaaagagaaaagagaatagctctctttcctgcagaaaggtgatcccaaatagatcttctagttccatggcgaaatgcactgggttttatagacaagcttgaggaagcagtgtctgatttatatagggcccaaaggattggtggaaccaggggtgccatttacatagtgtaagaagaagcttgctgccccaccctaatcttctattatgcatatgctttctctacctggccagtgccatgttgcctgcttctttattgcacgtgtggttgacaaaggaaaggaaagagggaacctccctgttgaatatacctggcttcaaggtatcccatcccttttctttctttttttttttttttaattatactttaagttctggggtacatgtgcagaatatgcagttttgttacataggcatacatgtgccacagtggtttgctgcaaccatcaacccatcacctccattagatatttctcctgatgctatccctcccctagtcccccacaccccaacgggccccagtgtgtgatgttcccctccctgtgtctatgtgatctcattgttcaactcccacttatgagtgagaacaattggtgtttggttttctgttcttgtgttagtttgctgaaaatgatggtttccagcttcatccatgtccctgcaaaggacatgaactcatctttttaatggatgcatagtattccatggtgtatatgtgccacgttttctttatccagtctatcattgatggacatttgggttggctccaagtctttgctattgtgaatagtgctgcaataaacatatgtgtgcatgtgtctttatagtagaatgatttagaatcctttgggtatatatccagtaatgggattgctgtgtcaaatggtatttctagttctagatccttgaggaattattggcacagttgccagcatttacttatgcaagcttttagcttgtttatctatgtttgaagcttgatttttcaggctgctttttgttagcaagtgaaggggtggcctgaccctccacacctgtgggtatttctagtcaggtgggatgagagactgagaaagagaaatgagacacagagacaaaatatagagaaacaacagtaggcccagtggaccagcactcagcataccaaggatctgcaccagcaccggtctctgagttccctcagtttttattgattattatcttcattatttcagcaggaaggaatgtagtaggagagcagggtgataataaggagaaggtcagcaacaaacatgtgagcaatagaatctatgtcataattaagttcaagggaaggtactatgactggacgtgcacgtaagccagatttatgtttctctccacccaaacatctcagtggagtaaaaaataacaaggcagcattgctgcaaacatgtctcacctcccaccatagggtggtttttttctctcatctcagaattgaagaaatgtacaatcggrttttatactgagacattcagttcccaggggcaggcgggagatagtggccttcctctatctcgactgcaagaggctttcctcttytactactccacctcagcacagaccctttacgggtgtcaggctgggggacagccaggtctttctcatcccatgaggccatatttcagactatcacatggagagaaaccttggacagtacccagctttcaagggcagaggtccctgcggctttccgcagtgcattgtgcccctggtttattgagactagagaatggtgatgacttttaccaagtatactgcctgtaaacattttgttaamaaggcatgtcctgcacagtcctagatcccttaaaccttgatttcatacaacacatgtttttgtgagctccaggttgggtcaaagtggctggggcaaagtggctggggcaaagctacaaattaacaacatctcagcaaagcaattgtttaaagtacaggtctttttcaaaatggagtctcttatgtcttccctttctacatagacacagtaacagtctgatctctctttcttttccctacctatgcaagcttttagcttgtttctctatgtttgaagcttgatttttcaggctgctttttgttagcaaggaaatgatttgcggagctgctttttattaaaacaaaaccttaccgaggactctcaccctcactatctgcctgaataatttctttctagttcctgtatcacagacataactttatcagaaaactgagaaaatttacagtattcaatcatatgaaatgtaatatactgtgaaaatgaaacaaaagaaaaaagaaagctctaatacatttgatcaaattaggttgcacctcatatttttcagctaatttttttttctttagcctttgctgtgtcaaggagctttgtaaagtcatcttctgataggacaggtctctcattttctgcaccagtcttctttaacatctcttcatggaaccgtcaaagaaactcagctagccctcactcacatatgcataacctggcagtgtgaacaatagaaagtgatggttaatgatcacgccttacatccacacagcttcctactgggtccacatgagcttaagtcccaacagtcasggtgatgattagtttggtaacacattcttgtactgacttttctcccttcttgtttcaccctttcctgtcccctactcctgtaccctaagaacatttctcaaattagttattgcacactaattcttatctcaggctttgctttctgagagaaatagactatggcagcttgggcaagtggcactaaaaagcagaccctcaaaatgggactttggaatttaataattcactgataactggcaaaaacagtctccttgccaacaacacttgagaggtgataactcctggtattcagtaaaatcactttgatcaaaatggatacaattcacacagggaagaaaagaactgaggtgaaagacacggggaaagtgaatcattgctttaccaacagtataaagatcatggtaactacatagtttataaagtgaagacttttaacagtttcagagagcttgtaaaaagaaaaaagcaggctcagtttgaataaatatcaaatcaaaatatgctatgtaagtcagatgttcttggcagtgtttgaagaaaatcgacttctgcagcagcagcagctgaccacattgagaatttcatcgcaaaacaacagtgatgcacaggagacgacactgtccgcctctactacactttatgccacatttagggcctgaagagcaaaataatgggactcagatacatggagttggggaacaaaactgaaaatctgggaccaccatattcctctgtggtttggagacaagtaatgctgctagtccttaatgtgcatccggctacaacatgacctcttttctaaaaaaatatggcagtgcatttggcttctgccaacttaaatcattttgcagtaaagttgacctgtgaacagcagtggacctaggggcaaatctctcctatcacaccgtcaaaaagccatttataacttttgactcctcaaaatttaactacagatagtttactgttggccagaagccttaccaataacataaacagtaaattaacacatattgtgcatgctatatgtattgtataccatagttttacaataaagtaagatagacaaaagaaaatgttattaagaaaatcacaaggaaggttaaatatgtttactatttattaagtggaagtggatcatcacaaaggttttcttcttcatgtattcacattaagtaggcaaaggaggaagagaaagagaagttggctttgttatctcaggctggcagaggcaaaagaaaatctgcatataatcagaggttcagttcaaacctccatgttgttcaaggatcaaaagcacaatatatgacaaattagagatagaatgactcctacctgacaaatactacaaaatttaactatttgggaaaacctttgttcacaagctaattgtcttttccccatgaacttttctaaagtgtgaactggttgctttcacggtcatttataaacgttaatagtggattaaatgtctgaattgtaggttgtgataatatagaaccagcactttaaggggacttaccgattttgattatcacaactgtacatgtatatatgtgttcacttcttccaaaacaaggcacagaattattgagctaccttacagatgtttctgaaactgaatgtgtttgtagaagacagttaaaagtgaccattattctatataaccctgttttatataaggatgtctcatgtttctctctttccacagaagcctgtagctctattcatcccataacactaatatgaaaacataagtcatttagcatgactaaaaataagataatcatttttaatgtaaacatattgcaactaatcataatcagtaataatatcaagaacacaaaaattacccaaaaaatggcaaataataaaatctcaggaattctcaaggccctcctaaaagctacacatcaaggaaacactttgtgatcaaagtagtatgggttaacaaaaacctttgtgtctttattggcaagaagaccatcatccaagtctcacaacaaccactctatgacctatggcatgaatgtattctaaaaataaattaaaactttgatgctaagggaattattggaagagattgcagcagaatttttataaaatgtatccagataaatgaaacatttttaagaaatattgaataaatatagtgtcatagcagataatattgttacatcatgcataccaacctaaagtaatttacatcaagcctatcctgcaatacgtagacaaaggactggtatcccttgtacaatgagagctattatatatcaccaaccaaaaagacaaacagaccaatatgaaaatagatgaaggatatgaattgacaattcacagaagtaaaaatggccaatcacataaaaaagatgacaaaagctacttgtactagaaaattggacattataatttattaagtcaataatgttaagtcaatgaacttttttaacttttaagttcaggggtacatgtgcaagtttgttacataggcaaatatgtgtcatcacccaggtattaagcccagaacccactacttatttttcttgatcctctcccccctcccaccttctaccctccaataggccccagtgtgtgttgttcatgtgttccaggtgttctcattatttagcttccacttgtaagtgagaacatgcagcatttggttgtctgttccaagacctaatgacagaaataccatttgacccagcaatcccattactgggtatatacccaaaggaatataatcattctattataaagacacatgcaygtatatgttgattacaacactattcacaatagcaaagacatgaaatcaacctaaatgtccatcaatgatagactgaataaggaaagtgcagtatgtatacaccatggattactatgtagccataaaaagtcaatgaattattttcccacagaagattgatcaaacataagaacctgagaaaagagtttgtgagagagtataaagtgaaataacccttacaaaaaaaattatacttagagtttgactctgcaattctacatctagtcatctgctatccagatacacttgcacctgagtgcrtgtatgtacaggttgttccctccatcacttacatggctatcagtcagtgcacatacatacctcccacaaaaagtagaaggtatgaagcaattacagagaacaggcatattacagacaatatcagggaatgttctccacatcacattgctaaatgaaaaacaagttccagaaaaaaatgagtatacttctttgaaataaaattaagaatctgtaaatctgtataaacatagaggattctacttttaattttgattctacatacttcattcactaaccttgcacaaatttgtttttatatttaattatatagttttaaaaattaattagtgaaataaacattgatttgagatagcatgttcttagggtttaatataatattatcaatctattagtgccatttagaaaacttaaattgaccaggaatctggtactctctatctgataaatttacagactgtttttggacacctacttgatattttaaatatttatgaataaatatattagaatgttaattaaaatttttaatcaaggttaaaatttaaatacaaaatttttttaaattttactgtcttatgtcaacattttatgaattctatagtaatttagtgatttcttctaatttttaaggttatatttgcagtaattttgggatgtgattacaaatgcattggcaatcctctaatcaagtcatatacccttcctgtgaaatttagcaaactttgtggctgtcttaaaaaagagaatatagtggaagtgaggagcttaacttccaaagctcaaaaaagttgtgaatacattttctctgtctgtccttctgtccttttctctgtgtttctgtcattttttttcctttctctcggtctctccactcactttggagccctgtgccatatccacagtccccaggagaaatataccatttggtgtagaaatacatatgtatgcctaagaagtcacaattggtccagcactccagtagcttgagacttttaatactaattaccagatatgtgagtgattaaccttcagatgattagcctaagctaccttaggacagtaaccagttgagaaatgctgtgccataaacacctaattgagcctggccaacaacctagaattaaaacaggcgatgataaaatgttgctgttctaagcaccttcatttgagagcagttggttaagcagtgatagacaaccagaaaaatatttttacatatttgaatcatacacctgtaataatattataattaatatatatgtatgaaaaaaatgtgattctatgttacattttgtaactacctgtaacccagaaagagtagtcagcataggatggtgggtaagagcttgcactctgaatccagataacctatatcatctttgcaaaaccattacagaatcacttatggttaagcaaattacttatcaggtctatgcctcacattctccttcagtgaaatggagatgaggcaatggcactacctacttaatagcattgctgaggctaaaagagttgctgtaagtaattgctgtatatagtaatattcaatttgctacaactattattattattaggtggatgagtacatttccgcaatgaatttggacttaacataggctaatacattttttaaattttatgtttcaaatataaatgattaaaataacagcactttctatttcaataatgtactaattgagcacttaggcaagagaaagctataaaaggcatccaaayaggaaaagaattgaaggtatctctctttcctgatgatatgattctatacctagaaaatcctaaagactgcctaaagcctgctagaactgaaaaatgacttcagtagggtttcaagatgcaaaatcaatgtacaaaaatcaataccatttctatacaccaataagaattcaggctgagaatcaaatcaagaacaaaatcacatttacaccagtcacataaacaaaatatacttaaaaatacatctaaccgaggagacaaaagatttctacaagaactacaaagcactgctgaaataaatcatagatgactcaaacaaatggtagaacattttatgctcaaggctggaagaatcagtatcattaaaataaccatcctaaccaaagccatccacacattaaatgctattcctattaaaatgccaatgtcattattcacagaattagaaaaaaatattcaaaaatttccataaaaccaaaagttagtccaaatagctgaagcatgcctgggcaaagagaacaaagccagaggcatcacattacccaacttcaaactataaggctgcagataccaaaacagcatggttctgttacaaaaacagacacataaatcaatgaaacagaatacagagcccagaaatacagcaacagacctatagtcatccatcactaagtcaacaaaaataagcaaaggagaaaaggactccctattcaataaacgatggtgggatagcttgctagccataaggaaaagaacaaaactggacctctacttttcaccatgcaaaaattaacccatgatggattaaatgtttaaatataagacctaaagctataagaataattgaagaaaatctaggaaataccattctagacatcagccttgggaaagaatttataactaagtcctcaatagcaattgcaacaaaactcaaaattcacaagtgagatgtaaactgaagagcttctgcacagcagactatcaagagaataaacaaacaacctattgaatggaagaatatattagcaarctacacatctgttaaaggtctaatatccagaatctataagaaacttgaataattcaacaagcaaaaatcaagtaaccctatgaaaaactgggcaaaagatgtgaacaggtacttctcaaaagatgacatacaaggagcaaacaaacatatgacaaaaatgctcaacatcactaatcatcatagaaatgcaaatcaaaatcacaatgagaccatctcgcactagtcataacagctattattaaaaagtaaaaaaaaaaaaaaaaaaaaaaaaaacccttatgctggtgaggatccagagaaaaggaaatgcttatacactgttggtggaatgcaaattagttgaactactgtggaaagcagtttagagatttctcaaaaaaaaaaggcaaaacagaagcaccattccacataataaacaaattcacctattctaaataaaatggaaatacaaatagattaatttattaactaattattaacaaaattaaacgtaaaccatctggctcactcactaaaaatctatactgttttagtaaaattgcattgaatatatagaaaggttaaaggaaaaaacgaacctgcttactgtagagcagagatcagaataggttctataaagcctcagatggtaaacatttttgraatttgcaaaccctttggactcctgtgcctactcaactcttccattgtagtacaaaagcagccatagtcaataaggtaaactctgtaaaagtaaacaaaatcaacaaactgttagctagrctaagtaagaaaaagtgagaacagacccactaaataaaatcagaagtgaaagaggagacataaaaactgagattacagaaacacaaattattacagaatattatgaacaactatataccaacaatttggaaaacctagatgatattaataaattcctggacacatacaaccggccaaaatagacccatgaagaaatagaaaacctgaacaaactaataacaagtaacaagattgaagctgtaagaaaaagtctcccataaaagaaaagcccagtgtctgacggcttccaatgaaatattatttagaaaaacatagctgggtaataactggaaatggtagagtagaaaatataaaagctctatacttctatcaagtatttaaaataactaattctccaaaaaataaaagaggagaaaacataaccaccattcagtaagcccttatgctaaaaaccacacaatggcttcaagtcctgtcttttatatacctgtgaatataaaatgttaatttatattgtcagggtaaaattcaagagaactctgttttagggccttgtgaatttccttgtgagtaaattgggaaggaggccatctggggaggtatgtggccttctatctttgcagctatctgtttaggaacaaaatgggagccaattttacatgcttcatttcccaagattaacttttctctttgacatagtgagtttaatgactcaagatttttactttcttttcacactagcaaacaaaattcaggaacacatgaaaagcttaaatgccataaacaaatgaactttattccaggaatgcaaagttatgttaacatctgaaaaagccaactaatatatcatatcattagaataaaggaaaaaactgcataatcatttcgataactgcagaaaaacttacttaatgaaattcaatattcttcatcataagaacacttaaactagaagtaaaggggaacattctaaaactgatcaatagtgtctataaaaaaacacacagctaacatcacactaaactgactcttctcactttcactcaatattgcagtagaactttcagccaacaaataggaaagaaaatgaaataaaaggaatccacattagaaagaaagaagttaaactgtctctattggcatatatcatgatcttataatagaaaatttttacaaatccactaaaaaatattcaagtaaactaataaaacaagattttgggatacaaggtaaataaacaaacaaaaaatctacrcaattgcaatggaaatttaaactaaaataaagattacacagtcacccctataataccatgaaaaaatataattcttagcaataagtttatcaaaaaattgtacaactcttactgtgacattattaccagcggtggttactgcagcaagtatttatggttctgcagcaacctgaattcttgcctcctcagaagaatgaatttgactgagcggcataaggcagaaaaagagaccagcacaagtttcagaacagaagtgaaaatttattaaaaagttttatagcaggaaagaaaggaaagtacacttgggatagatacaagtagccattttgaaggtaaagtgtggtgtttgacctttgacttagggttttatatgttggcatactttccgggtcctgcttcccttttccttgattctttccttagaatgacctgctggcatgtgtgatggcctgctaccacttaggagatgagcatgcacagtatatttactggagtcatatgcatgctcccctgaggcattcttcccttttctggtgcccccggaatgtcgtactccaccatttggcctcttaatgtgtgtgtgtgaacccactctcccaactgctgagatcttatcaggaagctgctgattaccagatttgattttttctatctataagaaatctgcctttccctggctggctgcaaccaattattgttttaaacagtgtgacaactgcctggccattaactgatggtcacctgactttcctggtagggtgtgggagccctcttctgccctgtttgtgtctgactagctagccactgtaacaaaatctacaaaacactgtggaaataagaacatctaaataaatagaaaggcatctcattttcatttattgaaagacctaaaattgtgataatgaccatactctactccccaaactgatataccaaatcaatgcaatccgtatsaaaatcccagattgcttctttgtataaacagacaaactgatcctgaaatttatgtacatattcaagagacatactaatagccaaaagaagctaggtatagtgaaacacacctgtaattccagctactcaagaagctgtgttgggaggattgcttgagcccagaaatttgaatctagcctgggcaatatagtaagacttctatctcttaaaaaaaaaaaaaaaaaaccaagaagaaaaaaatttaaaaaaaaactgaaacaatttaaataaaaaaaagctggaaaacttacatttcctgcctttaaagacaaatacaaatatatgataatcaagagagtgtgatacaggcctacagatagacatgtagatcaatggaatgattttagaacatagaaatatrcccatgcatttaaagtttttgacaaaagtttcaaaacgttttaataggggaaagaatagattattcaacaaatataagtgggaaaaatgattatctgtatacaaaataattaagttgggaccctctacctcaaatcacttacaaaagctaattcataggtgatcaaaaacttaaatgtaagcactagaactataaaactctaataataaataacaggtactaattttcataacttggaaatggtttgtgagatataaaatcaaaaataaaagcaaccaaattaaaattgattagttggacttcattaaaatcaatacttttgtgcttcaatkaacaccattaagaaagtaaaaggacagcccaaagaataaaaaaatacaaggaaatcatayatgtgataaggttcttayatcaaaaaatattaaaaacacaagtccataagaagacaaataattcaatcaaaaytaggcaaaacattctcaacatgatttcatatcaaggaaaggtaaagcataatgagatatcacttcattcacactggctataatcaaacgaaatgtaatcccaagtgttggcaatgttgggaagaaattaaaattcttatacattgctggtgagaatggaaatggaagcaaccactgtgaaaaacaatctgaaaattcctatggtaatttagaaattgtatggtaacagacaattcctatgataatttagaaattatatggtaactgctactttgaattgtagcagttatactttcacttgattgatttatsctcagatgtaagtatgagaaagacagaaagaaacagcaatttgaaaagaaacattgcattgcaccaggaggactatgaaatcgatgtcaaatattctcctgatacaactcagttgttactttagctctgggagttgtggaaaggtgctgctgtggcccacagaatacagccattggatgaatataaagacaatcctggatgaacttgtttggagaggccacaagatgactgtgttgacatcttcggcttccattattattgaccctagtaaatcatctgctattaaatttgaagtttatccaacatctctaattaaaaataattttgagggtcttgttgtgaaactgatcaatagatggatatacgatcttccaaaagatgcattttggtcatatttttcacaagcacaagaactcttttgggaatctacagactgtgttaataatctctgtaaagatgtagttttgaacaagaaaattacgacaaaactacaagagtcaaagtttgatgtcgttcttgcaggtgcccttggtgcctgtggtgaactgctagctgagcatgttaaaggcatgttaaatacatgtcctttgttgacagtctcctggctacacacttgagaagtatagtggaggacttccattccccatttcccgcatacctgctgttctgtctgaattaagtgataaaatgacattcttggaaaggattaaaaatctaatacatgtgctttattttgacttttggttttaaatgtttgatacgagaagtgggagaagttttacagtgaagttctaggtaagtcatgtttctaatcaatggttaataagtcctaactttccttttgcctttgaaggtgagcgtatataaatataatgtaagaggatagtgttgtttaaatgaaatgatgaatggcaaatgtaagatgatctatcaatctcacaaatattatagaaatgttgatattataggctcagttagaaccctttggtcatcactcctataggacactacaggaattaaaaaaaaaaaactacaaagtaaagcacttatgatttctttaagcaactatatamgtattttactatacttttttcatctttaaaaaaggcaaaayrtatatcaataaacaacttgatgaaggcagacatttagatgaggagctacacatatttctagcataactatyaatgcagcatygagaaacttgtttctctttgtgtacctcagttttcttatttaggtattaaaatatttttctctataaacagaaggattccttcacagttgagaggtatactggctctatttcagaaacagaaacctaaaatttgaggtttctagtgtttgtayatcattcactaacaactgagaaattatttgctttgtgaattaaaatcttgttgaaagtgaacattcaagcttttaatctatactttattaactacatctctttattagggaaaatatgggccaagttaagggggagcacatatctctgtttcaataaattctgaaaatatactagctatcatttttaatgtatgtattttaaagctaatattgttaaaatcttaacgtgaactagaagcagtagtatgttcaaggatttcagscatactctcagaaaactcacagttcacttggagaaccaaggatcaagggactgacttgataaattgtggaaacgagattgtgcacttcgtagaaagctgtttttatgagtatagtaagatgaattcatcctggagctcaaagagctgtttaaatgtatatcagttactactgcagtttcagagaggaaacaaatgcatatttaagtccatagtggcttattttaataactatttgagattgtgaatatactaatgttacattaaatatgtaatttccgaagatggcygaataggaacagctcaggtctacagctcccagygtgagcgacgcagaagacgggtgatttctgcatttccatctgaggtaccaggttcatctcactagggagtgccagacagtgggcacaggtcagtgggtgcatgtaccatgcacgagccaaagcagggcgagggaatgcctcacttgggaagcacaaggggtcagggagttccctttccgagtcaaagaaaggggtgagggacgtacctggaaaatcgggtcactcccacccaaatactgggcttttccgaccggcttaaaaaatggcgcaccacgagattatatcccgcacctggatcggagggtcctacacccatggagtctcactgattgctagcacagcagtctgagatcaaactgcaaggtggcagtgaggctgggggaggggcgcccgccattgcccaggcttgcttaggtaaacaaagcaacagggaagcttgaactgggtggagcccaccacagctcaaggaggcctgcctgcctctgtaggctccacctctgggggcagggcacagacaaaaagacagcagtaacctctgcagacttaaatgtccctgtctgacagctttgaagagagcagtggttctcccagcatgcagctggagatctgagaacgggcagactgcctcctcaagtggktccctgacccctgacccccaagcagcctaactgagaggcaccccccagcaggggcacactgacacctcacacggtagggtattccaacagacctgcagctgagggtcctgtctgttagaaggaaaactaacaaacagaaaggacatccacaccaaaaacccatctgtacatcaccatcatcaaagaccaaaagtagataaaaccacaaagatggggaaaaaacagaacagaaaaactggaaactctaaaaagcagagcgcctctcctcctccaaaggaacatagttcctcaccagcaacggaacaaagctggatggagaatgactttgacgagctgagagaagaaggcttcagacgatcaaattactctgaggtacgggaggacattcaaaccaaaggcaaataagttgaaaactttgaaaaaaatttagaagaatgtataactagaataaccaacacagagaagtgcttaaaggagctgatggagctgaaaaccaaggctcgagaactacgtgaagaatgcagaagcctcaggagccgatgcgatcaactggaagaaagggtatcagcaatggaagatgaaatgaatgaaatgaagcgagaagggaagtttagagaaaaaagaataaaaagaaatgagcaaagcctccaagaaatatgggactatgtgaaaagaccaaatctacgtctgattggtgtacctgaaagtgatggggagaatggaaccaagttggaaaacactctgcagggtattatccaggagaacttccccaatctagcaaggcaggccaacattcagattcaggaaatacaaagaacgccacaaagatactcctcgagaagagcaactccaagacacataattgtcagattcaccaaagttgaaatgaagaaaaaaatgttaagggcagacagagagaagggtgggcttaccctcaaagggaagcccatcagactaacagtggatctctcggcagaaaccctacaagccagaagagagtgggggccaatactcaacattcttaaagaaaagaattttcaacccagaatttcatatccagccaaactaagtttcataagtgaaggagaaataaaatactttacagacaagcaaatgctgaaagattttgtcaccaccagtcctgccctaaaagagctcctgaaggaaatgctaaacatggaaaggaacaaccggtaccagctgctgcaaaatcatgccaaaatgtaaagaccattgagactaggaagaaactgcatcaactaactagcaaaataaccagctaacatcataatgacaggatcaaattcacacataacaatattaactttaaatgtaaatggactaaatgctccaattaaaagacacagactggcaaattggataaaaagtcaagacccatcagtgtgctgtattcaggaaacccatcccacgtgcagagacacacataggctcaaaataaaaggatggaggaagatctaccaagcaaatggaaaacaaaaaaaggcaggggttgcaatcctagtctctgataaaacagactttaaaccaacaaagatcaaaagagacaaagaaggtcattacataatggtaaagggatcaattcaacaagaagagctaactatcctaaatatacatgcacccaatacaggagcacccagattcataaagcaagtcctaagtgacctacaaagagacttagactcccacacattaataatgggagactttaacaccccactgtcaacattagacagatcaacgagagagaaagtcaacaaggatacccaggaattgaactcagctctgcaccaagcggacctaatagacatctacaaaactctccaccccaaatcaacagaatatacatttttttcagcaccacaccacacctattccaaaattgaccacgtacttggaagtaaagctctcctcagcaaatgtaaaagaacagaaattacaacaaactatctctcagaccacagtacaatcaaagtagaactcaggattaagaatctcactcaaaaccgctcaactacatggaaactgaacaacctgctcctgaatgactactgggtacataacaaaatgaaggcagaaataaagatgttctttgaaaccaatgagaacaaagacacaacataccagaatctctgggacgcatttaaagcagtgtgtagagggaaatttatagcactaaatgcccacaagagaaagcaggaaagatccaaaattgacaccctaacatcacaattaaaataactagaaaagcaagagcaaacacattcaaaagctagcagaaggcaagaaataactaaaatcagagcagaactgaaggaaatagagacacaaaaaacccttcaaaaaattaatgaatccaggagctggttttttgaaaggatcaacaaaattgatagaccgctagcaagactaataaagaaaaaaagagagaagaatcaaatagacgcaataaaaaatgataaaggggatatcaccactgatcccacagaaatacaaactaccatcagagaatactacaaacacctctacgcaaataaactagaaaatctagaagaaatggataaattcctcgacacatacactctcccaagactaaaccaggaagaaggtgaatctctgaatagaccaataacaggatctgaaattatggcaataatcaatagcttaccaacaaaaaagagtccaggaccagatggattcacagccgaattctaccagaggtacaaggaggaactggtaccattccttctgaaactattccaatcaatagaaaaagagggaatcctccctaactcattttatgaggccagcatcattctaataccaaagccaggcagagacacaaccaaaaaagagaattttagaccaatatccttgatgaacattgatgcaaaaatcctcaataaaatactgccaaatcgaatccagcagcacatcaaaaagcgtatccaccatgatcaagtgggcttcatccctgggatgcaaggctggttcaatatacacaaatcaataaatgtaatccagcatataaacagagccaaagacaaaaaccacatgattatctcaatagatgcagaaaaagcctttgacaaaattcaacaacccttcatgctaaaaactctcaataaattaggtattgatgggacgtatttcaaaataataagagctatctatgacaaacccacagccaatatcatactgaatgggcaaaaactggaagcattccctttgaaaactggcacaagacagggatgccctctctcaccactcctattcaacatagtgttggaagttctggccagggcaatgaggcaggagaaggaaataaagggtattcaattaggaaaagaggaagtcaaattgtccctgtttgcagaagacatgattgtatatctagaaaaccccattgtctcagcccaaaatctccttaagctgataagcaactttagcaaagtctcaggatacaaaatcaatgtaccaaaatcacaagcattcttatacaccaacaacagacaaacagagagccaaatcatgagtgaactcccattcacaattgcttcaaagagaattaaatacctaggaatccaaattacaagggatatgaaggacctcttcaaggagaactgcaaaccactgctcaaggaaataaaagaggatacaaacaaatggaagaacattccctgctcatgggtaggaagaatcgatatcgtgaaaatggccatactgcccaaggtaatttacagatgcaatgccatccccatcaagctaccaatgcctttcttcacagaattggaaaaaactactttaaagttcatatggaaccaaaaaagagcccgcatcaccaagtcaatcctaagccaaaagaacaaagctggaggcatcacgctacctgacttcaaactatactacaaggctacagtaaccaaaacagcatggtactggtaccaaaacagagatatagatcaatggaacacaacagagccctcagaaataacgccgcatatctacaactatctgatctttgacaaacctgagaaaaacaagcaatggggaaaggattccctatttaataaatggtgctgggaaaactggctagccatatgtagaaagctgaaactggatcccttccttacaccttatacaaaaatcaattcaagatggattaaagacttaaacgttagacctaaaaccataaaaaccctagaagaaaatctaggcattaccattcaggacataggcatgggcaaggacttcatgtctaaaacaccaaaagcaatggcaagaaaagccaaaattgacaaatgggatctaattaaactaaagagcttctgcacagcaaaagaaactaccatcagagtgaacaggcaacctacagaatgggagaaaatttttgcaacctactcaactgacaaagggctaatatccagaatctacaatgaactcaaacaaatttacaagaaaaaaacaaacaaccccatcaaaaagtgggcaaaggacatgaacagacacttctcaaaagaagacatttatgcagccaaaaaagacatgaaaaaatgctcatcatcactggccatcagagaaatgcaaatcaaaaccacaatgagataccatctcacmccagttagaatggcaatcattaaaaagtcaggaaaaaacaggtgctggagaggatgtggagaaataggaacacttttacactgttggtgggactgtaaactagttcaaccattgtggaagtcagtgtggcaattcctcagggatctagaactagaaataccatttgacccagccatcccattactgggtatatacccaaaggactaaaaatcatactgctataaagacacatgcacacatatgtttattgtgacattattcacaatagcaaagacttggaaccaacccaaatgtccaacaatgatagactggattaagaaaatgtggcacatatacaccatggaatactatgcagccataaaaaatgatgagttcatgtcctttgtagggacatggatgaaattggaaatcatcattctcagtaaactatcgcaagaacaaaaaaccaaacaccacatattctcactcataggtgggaattgaacaaagagatcacatggacacaggaaggggaatatcacactctggggactgtggtggggtaggggcagggggcagggatagcattgggagatatacctaatgctagatgatgagttagtgggtgcagtgcaccagcatggcacatgtatacatatgtaactaacctgcacaatgtgcacatgtaccctaaaacttaaagtataataaaaaaaagaaaaagaaaaaaatatatgtaatttcctcttaattctctgaacattttgctttccttatatataagtaatatgcaatatataaaattgttatgcttatatataaaaatatatgtatatatttattttattaatgtacattatttgagacaatggggaaagctgaagtgtggctcattcaaacgtactgggattttgaatttcttcacccacccttaccaaatgtcgattttgtgggggaactccactgtaaaccagccaaaaccctgcctaaggtaaatgtattcatgtttgatttatttgctttgcatttcagaaggaatggccagatatgttttcattcagagtgtttgactcacagtgagagaaatacgggaggtcaaagaaagtgacctaccattagaaactcatatgttgctatatcatcacaactgtgtaaactttagtgtcattaaatatcaaagagggatactaaagagactctgaaaacagggttgattcaatgaaagccttcattgtgcaatgtaaaaaaaaaaataagtcattccttcaaggaatatttatgaattgatcagcacaaaccacggataagtgctggattttcagagaagaaatgtaggcactttctgctccctcatgccttacgttgtactttgaaagatagactataagcaagtaaaaaggaaaagtctaaaagtgttataaggtcacaatgctaaggaaacatgtagaagagatctcaaagtcattgataaagtgagtcctcaataatgtctaggagtagatgaaaagatgagggggagaggaaaacacaaaaagaaaagcaggtagtgaagtaaaggcagtgcctaaggtttcaaattagtatgcaggaaaaagctgagtaaagtagcagatgatgctagagaggtaagttgaagcaatataactataaggagatctaagtatctattaagggcaaaggggagctactgcacagagttcagaaatggagagatattatcagattccctttctttaaaaagctctcaatgttgtcaatggattacatcgcaaaaaggccagattgtgaaaagtgtagatcatttagaagattttgcatgagtttatgcaacagataatgatggaaaagtggactagaatgttgatagagataattatgcctacttctataataatggcaattacctcctattgtgtcgtgttggaaatatacttaacatagataaaacacttataatgtctctcatacatagtcagtgattcaaatagtagtaatattgtaatgattttttatttttgttattactattaatagtatccattagttaacatatgccagccactcgagatataattcctctattaataggaacagttttccgacacatcaaggttctccagcaaagtcctagagaacagatcccctgtggatttgtttaaatatagatgtttgggcagtcagatgaacaagatgaaatgctaacggcgtaagggttaaggcttttcaaggtacactattcatcaacgacataaatgtgtgccaccagaatattcacagccaaagccaatgtttacttgctttcactctagcatttaaaacattagtcagtgagatgacagaggtttatatcttagagcataaaagggtcagcctaccctttcaatgttttctgccttataccaagcctataggacacctcagtaaaaatctctgggaaacttgggactcatcatcacagctgcctgacagagaagcaccaaaaaaaaatgaacaatgcatgtataataagatccaaataatgtctaccacttgcatctgaaaactacactgagatttacaaaagaattctgtcaggatataggatgatcttccttacgaagaaacaaaagaacctcatatattttactttaatgttattcttttgagacataagcagaaagcaagcattcctcactactttattatataagccttaagagatctttttgtctaccttcttataagcagcaacagaaaactgaaatcttacttgagttaaaactcaatgtctatgttgaatgaaaattgcataggctctatgtggtaatttcccaaaggacaaaggcagaggtaagaccaatgaaaattctatgcactctaaccttattctcaaaaaattttcccattcacattagaggaaagtgatggtgccattagaagggggaagagagtaggtggagaaggaagacaagggcaagaatgactattagaacaatagtgataaatactaatactagctgttgttattcatttgcagaaggtaggttcgaatccaggtcaatagttgtgcagcctgtcctctacttctttcttacataaaataatttttgtcacaaattttcttgcttttccattatgtattagattctcagataatgattgcatattttaaaagaatcagacacttggggaaaagtattaagtattataaaaatgcatatagacattggcttcataatatactcatatgaaactatacagagaacacctaaatcacgatggtcagattcaatatttgtggcagacattcataaaataaacactggagacaattcaaatattttacattgagaaatgatttaaaatgtatacaatgtgtgtaccatgtcattacaattgttttatcaaaaaatgttaaattacactgtcagccatagtacaggtattgttgaatactacggaacaaaatgatgaacagaaaaatatcacaatttttgtgtcagaagaaaagatacatgcaatgagataaaaaatttttatgtaaacataatatatgtactttgagttatataaatagaataaaaccataatgaaagcacacagattttataaatgaaatttattttttcctaaattttcataatttcaccaaatttcttacattgattttatattattctgataaagatgtcgcagaatgagatcagtgatgaatctattaacagccatttcattacttcaatattgggtggatgaagaagactctaagcagtgagcttgtgagaccaaacattgaacatgtcatattaaatgtggctacagataacttcaattacacagagtactcaggtgtcccagaatcacctggaataatagtgtaatgactgctattaaaactgatgtcataaggttaaaattatgttgttgaaaaatacttgtcaatatatgatctgcatggacaaagtcagatttttacttttgtaaacaatagttttaaaaagaatgtttaccccgatgattaggatctgaaagtatgtttgcattagaaagggaacaccattattttacagagagataaaaaaagcatttttaaaaaaggaacagcagcaaaatgataagcacataattttgacataatattcacaaaacgtttgactttatgtttctttcttaagattttttttaaaaaaaaacttatagtttaggttcaggggtaaaagtgcaggcttctaatataggtgatctcctgtcatgggagtttgttgtgcagactatttcatcacccaggtacaaagcctaggacccaatagttattttttctgatcctattcttctccccaaccctccaccstcaagtagaccccagtgtctgttgtctctttgcatccatgtgttctcatcagttagctccccctcataagtgagtacatgcagcatttggttttctgttcctgtgttagtttgctaaggatgatggtctccagttccatccatgttcctgcaaaggacatgatctcattcttttttatggctgcatagcatcccatggtgtatatgtaccacatattctttatccagtctaccattgatgggcatttaggttgattccatgtctttgctattgtgaacagtgctgcaatgaacataaatgtacatgtgtctttatggtagaatgatatatattccttt

SEQ ID NO: 93344 - DNA, 13744 bp, Homo sapiens
gaaattttttatttgtgtgttcacccatatctaagaagaacaattgcttcttagtttaattacattctggattcttcctttggctttcttttgtacctggaaagttctcatatgtttctttatattctactcaggattttaaaggttcttgtaactttctcagaattttagcatgtaaattatttttatatttaaagatttccaaatatataatatctttccaaaatgcacaaatatcaacagcatatacctgaggaaaatattttacaattttcttgtgtggcagacaataacatcttatgagaaatctcaagttacatcagttagaacatattctttcctcaatataccaaaaaaaatttttttttttttgagatggagtctcactctgtcacccaggctggagtgcagtggagcgatctcggctcactgcaagctctggctcccgggttcacgccattctcctgcctcagtttcccaagtagctgggactacaggcgcccgccaccacacccggctaattttttttttttttttttttagtagagatggggtttcaccatgttagccaggatggtcttgatctcctgacctcatgatcctcccgcctcgcctcgcaaagtgctgggattacaggcagagccaccacgcctggccagtataccttaatttttaatactaaaaaatcgattttatatttttacaaatatctgaagtaaatgtacttaactgtagagactaatacctacatatggccagaatactgtttttctgtatcagtaagacaatggcaaaattactgatctaaattcaagtttttggctttgatcaccatgcttctccattagcacatttcttttgtttcttcttcctcttctttttttttgagacagagtttcgctcttgttgcccaggctggagagcaatgatgtgatctcagctcaccacaacccctgcctcccaagttcaagcgattctcctgcctctgcctcccgagtagctgagattacaggcatgcgccaccacgccctgctaattttgtatttttagtagagatgggatttctctatgttggtcaggctggtctggaactccttacctcaggtgatccacccacctcggcctcccaaagtgctgggattataggcatgacccactgcacccagccagcactgttctgaatcaataaaaatgatctcagcttaaatcttccatttgattaagaacttaatttaaaatttttatttttgaggcaccgtctaaacttctgggctcaagtaatttttctgcattggcctcccacagtgcaggaattacaagcatgagctgctgcatccagtacttttaaattttttaatgagatttttatttggctacatattacttgaattcactttagtcaataattttcattgttacttacaatgctcagaaaatactaccctcctgggtttgtgctttcataaattcagtgacatatattaggcccaaaacctttccatttaaaataattgtctggtgtttgaaaataatgggtatttttagtttactagccaaaagtgctgcccatttatttatatgcctaattagtcaaactttctaataaagttatttaacattatttatgttcataccattattgcataccaaaagatttaatttctttaattacattaatggccctaatgtaacttagtgtaagtaaaaacgtaacagaggctggggaagaagtggttgaagaaagaaaaaatgttgatggaagtgtaccacgtttcacttaggagaaataagatttagtgattaattgcacagaatattgactataataaataataatgcagtgtatatttcaaaattggtataaaaatattttaaatgtttttgccacaaaagtataataagtatgtgaggtgctgaatttgttacttagcttgatttaaacattttacagcataaacataaaaatatgacagtgtacccaacaaatacatacttaggatgttataattgtataattatattatattgagacagagtcttgctctgtcaccaggctgaagtgcagtggaatgattttggctcactgcaacctccgcctcccgagttcaagcaattcccctgtctcagcttcctgagtagctgggatcataggtgcgtgccaccatgcctggctaatttttgtatttttagtagagatggggtttcaccatgttggtcaggctggtctcaaactcttgacctcgtaatccacccaccttggcctgccaaagtgctgggattacaggcgtgagccaccgtgcacagccaataatcactatttttatacagaaaatacagagttttttaaagagagaagagattaattatagaagacagagacaagtataatttattgtgattggaactaaatgctatcagaagatttactatgtatgtgaaattctttgacaaacttcatgaacttcaactggccacaggaaatctcattgtgctcctctttctttttaaagacagaatcaactttactacactgcaataatttttcttagggtaaaagttgggattcacaattatctctggattaatggtgaatgtatttgaaaaattctctgatagtcctgactaatcttagtaggtctagtttggttcttattgaattggatcacctcatagtcccttaataagccaactttaagagaaatatactttctgttttttgagaattgtttgagtcactgcctgatgcaagtaacagacatagacatgaacaggttacaaaagataaataatgtccttaatgtacctaaaaaaacttttttaaactgaatctcttaggactcatcccatgtagatgagtccaaaaaacacaataataactaataaaatacaattttctgcaatggaacatatctgaggatcactaaaaatgacaaagttgtccaggcgtcgtggctcatgcctgtaatcccagcactttgggaggctgaggtgggtggttcacaaggtcaggaattcaagaccagcctggccaacatggtgaaacaccatctctactaaaaatacaaaaattagccaggtgtggtggtgtgtgcctgtaatccaggctacttgggaggctgagacagaagaatcatttgaacccaggaggtggaggtggcagtgaactgagatcacatcactgcactagaaataaaaaagaagatataaaaaaatgaaagagaaagaagaaagccacaatagccaagatatggaatcaacctaaatgttcatcaacagttgaatgaataaagaaaatgtggtatatttacacaatggaatgctattcagcccttaaaaagaagaaagccttgttatttgcaaaaagcttattgaacctgaaggacattatgctaagtaaaataagccagcattgaaaaaaatttttaaaaagatctcatttctatgcagagtgtaaaagaaaattcaaactaatagaagcagagagtagaataatgattgcctgcgacagggggtgaaaaagattttggccaaacataatgggtcttccctacatctattaccttaacaaatgttattctccttgtagttttgattcactggggaactgaatcatatcctgaagactcaaaactgaaggaataatatatttgttaaagcaatgcagattgtatactgacatttcagaggcttagcaaaataatatattttcttctcacattatcccttatggttttttccttgataaaaagacttccccatgattttttagtaatcatgtcttctttcatcttctatctgcatcctcctctttcttctgtgaataaattaacaaagagatgtagaaaagacacatttgctttttatccacacatcacttccactcactattagtcaatgtaagtagagctgagaatagcagttttctggcaggacacttctcagcaataaataaaaccctgaaagaaaagtgtagatttttcatgaaaagctaatgtattttaagcaaaacaagcatattcatcagaaataaaatgcttgtggcaaaatatagattcatttcattgatttctatggagctcaggtaatatttgaccaaaagctaggcaatatgcacagaaaaaggaatattttttgaaataagaatattgtgaagttgttctgtcaaaagaagtaaaaatattatgatctcatactaatagtctcatctatagttctacaatatcaaacgctttttattaaaatttgtattttatataggtatccaatttatatcaccctcctttgctatttcaatgctgtctccactttatatcagtgggaaacaggccacctggtcccaggaaagcatgtggtgctattgcgactttaacgatgatgatgaaaagcacttgtttgggtggtactgatgtgccactgttattttgcccaaagcactgtttttttttaattcttctctaaatttactgataaaataaaattcttaactaagaagactttatctcattcatgtatgtattatgaaattttgttgacatttaagcgtctctgacttaccaggaatattgaaattttccatgaattcaattgagcactgtaaataaacaattgtttactaatagcctttgggaggcagagtaagatttacagaatttctttataatatgttcctagtaatccctctgaacacagcattctcaattcttagtattcaccctgagtcactcaggggaaattggtatctctgtaaacaggcaaatgaaggtgctgggtggaggtgcatgacattgtacagaaatgatgtccacacgcacctataagggccttaatttaatggactgttagttacatggctacatacttactgaatctagtcatactatcttttgtcagctaatgacatttgttacctattaattcaatataattatttgcttggctgaaaaataaatcctttaatttattctaaattgagagattagatttgcaatcttcaatcttttaatgttaaatcagagaaaagcaatgtatgtatatagtatgcattttcctacccatgaaaattatttgtattgccttgaaaaccctaggaagccacctaaagaatactctcttcaaatcctttagccaggattttagatttcaaaaataaaaaccttaacgatagaccgaagtctaaatcttctctttgcttcttgtcagtaatctggccatttcaaaaagcatgtcaattatgccaagccattgaaaagatgtggttttgactagttttatcccatttcaaatgtttttttctaattgttacttttgtcatgttaatctaagagcaaatatctacataaatgttcatgcattcaagcaatatttatattatgactaggtgtgatggctcacgcctataatcccagcacttttggaggccgaggtgggccgatcacttgaggtcaggagttcaagactagcctggcaaagttggtgaaacctcatctctactaaaaatacaaaagttagccaggtgtggtagtgtgtgcctgtagtttcagctgcttcgcaggctgaggcaggacaatcagtcgaacctgggagatggaggttgcagtgagctgagatcacgtcactgcacttcagccagagcaatgaagtgagactctgtctccaaaaaaaagaagtacatatgtatgtgtgtgtgtgtttaaagttcaatattttattacagtatagtagaatcctctaaaaatattaagttttctggcttatttattccttgtgtaccattttatacattcacaaaaacattaaacaatgaaaatgtaaccaattattcaatttttgttaatttttattaaaagtgagtgtgaaaataattattttttttttctggttaaagaggtttttgttttgttttgtttttttgagacagagccttgctgttacccaggctggagtgcagtgactcgatctcggctcactgcaacctccacctcctgggttcaaacgattaaagatggtttttattgttatactaaggagtgttatctctggagacacatttgcctgtgttttaatattggctgtgtttctttctctgcaaactgaggataawaacacctatgttattcagttactgtgagaattaaatttattaacacattaaagtattatggttaatkctcagtacaaattaacgattaatatgatatgtatatgctgaattacactagtatgtgctttaagacgggaatgcccttttataacacatgagtttttcaatcaatatatttaattttttaaaataaatgttgtatagatacacaatggaatactattcagccttcaaaggtggtaagtttcatcatttgaatcaatatagataaatttagaagacagcatactagatggaataatcctgacatagaaagacaaatactacatgatctcatatatatagaaaaaagtttaactcggggcgcaaagcgagccggtggatccataaagaacccagccaacycgcagagggaagggaggggctgagctgtgaggagagtggggcccaacaaccatatctacatgggagtcctttaacccggaaagttacgaattggacaaaagcttccggctaaccagattcactgaactgaagggcacaggctacaaagtgccccaagatgtcctgcaaaaattgctggaatctttacagaaccacttccaagaagatgagcagtttctgggagcctttatgccaaggcttggcattggaatggatacttgtcattcctttgagacacggtgggctttccttggttcaaactacagattacatttacccaattgtagacgactcttacgtgacaggcaggatagcatgtgccaatgtcctcagtgacctctacgcaatgggggtcacagaatgtgacaatatgctgatgctccttggagtcagtaataaaatgaccaacagggaaatggataaagtgatgcctctgattatccaaggttttaaagacgcagctgaggaggcagaaacgtctgtaatgggcggccaaacagtactaaacccctggattgtcctgggaagagtcactaccactgtctgtcagcccagtgaatttatcatgccagacaatgcagtaccaggggatgtgctggtgttgacaaaacccctggggacacagggggcagtggctgtgcatcagtggctggatattcctaagaaatggaataatattaaactagtggtcacccaagaagatgtagagctggcctacgaggaggtgatgatgaacatggcgaggctcaacaggacaggcgggcttctgatctgtttaccatgtgagcaaacagctcggttctgtgcagagataaagtcccccaaatatggtgaagaccaccaagcatggattattgggattgtagagaagggcaaccacacagccagaatcatagacaaacccctgatcatcgagattgcaccacaagtggccactcaaaatgtgaatcccacacccggggccacctcttaatctaagcagaaatagctgtttggttttgtttttaaatagatctatttcctttatcatcgcttcarttaaagactataagcaacaaaaatctcactgtatctacatatcaggtgaccttaggtcagtttgtaagtggatacaattaataaaataaaayccatgcctttttttcctgtcacattaactgaagatgcacctaatcttgaggcagcttctgagttgagaattatattgttatccaatactgttgatacattttgaatctttagacacttaccttttgccgaataggctctttttaaaggtgcttccacatagcacagacattatcgtagtcatgtcaaagagcagttggtgtcttcattttatgtatatttattataagtctgattttttaagagtcttgaatggttttctggagagatagcattggtcagtggcacatgacggcatcccagtcataagagggttgcatgattcctttgagtgtttgatttgaaaagcctagtcttctctcaagagcatcttggacccagaacattctccagtagtgcattcagttcaacacggcaagtgcttcactgcttggaaaacactttgaagacaaaaaagaaatcttatttctttttttggaggcttcctgacatttacagtaataccattaactgttttctttatcgatagcaaaaaaaggatactttttgcaatgtaattaggtattttatagtgctacaaggaattgccttccaaatggaggttcatgtataatactcatttacaattcaatatataattacgcaaataatttttaaatataatcaataataaagactgttctgtggatggtagtgtttaatacattttatattttgtatagtgatttcaggccttttgttttcttaaaatcagcagctatttagcgtaattcttagcattattttgtcctttgcgctcgtacatttttgtgcacgctttttgtgatctgtgttaaaaacctgcattgccaacattgcagcccaaacttaaacttgttattcaaataaatacttaattttttaaattgctgttgtataaaaaaaagaataaagtttaactcaaaaaagtacaaagtggaataatctttaccagaggctgggtgtggtgggaaggaaacagagaggggttgatcaaaaaatacaaagtttcaaatagacaggataaataggttttgagttttattgcacagcagggtgactatagtaaacaataatgtattgtatatttcagaataactaagagtaaatttcaagtgtctcaccacaaaaaaatgataggtaagcaagttgttatttaactcgacaaaatcatttcatactatatacatatattcaaatatctcattgtaccccataatgtacagaactctggtgaatgaaaaatactattaatatatatttttttaaaaggatagtatttaaaacattcaactactattatacccccagactgactagaagaaacatgggttacaaaccactgatgtggccaccttgtttttaggtttaacattaatcatgatctaaaagaatcaataaataagagtgaataaatttcctgtacacttgctatgtgctggggacttattgggcacatttatttgtattaactgctttaattttaccaaaaccctatgatttaggcagtaaagagctgaagagtcaagcacagagagatcaagaaactgtattcatgtcatatagtccataaatggcaaaactggaatgaaacaaggaaccacctgatacggcgtttcaatcttaaccattatgcccaacaccctctcatccaatgctactttttatttttgacccaacatttttggctttgaattttctaaattagtagaaataaagagaaatttaaaaaccccttttctgggggaaaaaatagcgaacaggaggcaagggctagattgcagctcccactcagagcagtatgtggagactcgcatcattaacttttctccagaagtactgcaggaataaaccaggagagctgagagaatccaaagaccctctgacggaagcaaactgctccaacaggacctggcagacagccaaaatattgatagtgttcaagatgtgaaagtgggaaaaagggatagtctgcccttgaacacataccctcactggggaacctgaaagtctagaacatggaataagaaatctgactttacctggagctgagtcaatttagagagctgagctaaatacagaggtagaagaagtgggaaaagcccggtgggctctgagtcttctgggaagccattttagacttgcgtcaaaggggcccttggggagggctgccaggggaacttggaaaggaccacagggagaaggaaacctccagctgaactttctaacaattctaaccaaacgtgaagtctcctgaccagaaattcggaaagggtgtgaattgggtgagcagactccacaggcagcaaggcacaaaagccctgcttgcttttgcagctgggaggctggtagccaggggcaagttcttagctctgttccctcactgcctggcagaacactcggtgctcttgggggtggggagcatggtgggaatgagtcttgcttttggggttgcatgagagatgggtgagtcatgtaactgctggctttccccctttcccccacacccctgacaacctgcatgacacagcagaggcagccataatcctttgggaacataactctattgaccggagaaccacacccccacttcccactgcagctgcagcaaaccccgcccaagcagaggctaagctcagacacgcctacccatgtccccacatgatcttccctccctacccaccctggtagctgaaaacaaatatcatatattcttgggagtcctaggaccccactcaccacctgattctccctatacyaccacagctgatgctccctttaaagcgccacctcctggcaagtagccaacgagtacaaaaatagtgcattaaacaaccaaaactaaggaccttaacagagtccaattcatcacctgctacctccaccaaagcaggtgctaatatccacagctgagagacctgcagacaattcacatcacaggactctgtgcagacaacccccagtaccagcctggagacctgcctagtgactagatccagaaaaaagataacaatcattacagcttggctctcaagaagccacattgataggaaaatgagaagagtactacatcaagagaataccccatgggacaaaataatctgaacagtagtgttgacacttagacactccctcggacatagcctacccaaatgagaaggaaccagaaaaacaattctggtagtatgacaaaacaaagttctttaacattccccccagccaggtgtggtggctcatgcctgtaatcccagcactttgggaggccgagctgggcagatcacgaggtcaggagattgagaccatcctggctaacatagggaaacgctgtctctattaaaaatacaaaaaattagcctggcgtggtggcaggcacctgtagtcccagctactcaggaggctgaggcaggagaatggcgtgaacccgggaggtggagcctgcagtgcgcagagatcatgccacagcactccagcctgggcgacagagcgagactgtctcaaaaaaaaaaaaaaaaaaaaaaatccaccaaaatcacactcaccagcaatggatctaaaccaagaagaaatccctgatttacctgaaaaaataattcagaaggtcagttattaaactaatcaaggaggcactagagaaaggtgaagtccaacttaggaaaataaaaaaaatacaagaaataaggggagaaatcttcagtgaaatagatagcataaacgaaaaacaattacaacttcagaaaatgaagtacacacttagagaaatgcaaaatgttctggaaagtctcagcaatagaatcaagcaagcagaagaaagaagttcagagctcgaagacaaggtttttggattaacccaacccaacaacaacaaagaaacaaagaatgagaaaaaatgaacaaagcttccaagaagtttggaatgattttaagtgagcaaacctaagaataattggtgtttctgacgagaaagagaagtctaaaactttggaaagaaaaacctatcagattaagagcagatttctcagcagaaaccctacaagctagaaaagattgggacattagtctctttaaattaaacaattattagccaagaattttttatccagtgaaactaagcttcataaatgaagaaaagatactgtctctttcagacaaacaaatgctgagagcatttgccactaccaagccagcactaaaacaactactaaaaagagctcaaaatattgatacacatctttgaaacacgtcaaaacagaacttctttaaagcataatctcacaggacctataaaacaaaaatacaatttaaaaaaaaacagtatacaggccacaaataacacaatgaataaaatagtaccttacatctcaatactaacattgaaagtaaatggcctgaatgctccacttaaaagatacagaattgaagaactgataagaattcaccagccaattatctgctgtcttcaagagactcatctaacataaggattcacataaacttaaggtaatggagtggaaaaaaaacattccatgcaaatagacaccaaaagcaaataggagtagctatttttatatcagacaaagcaaactttaaagcaatagcagttaaagaagacaaagagggacattatatcataataaaaggccttgttcaacagaaaaatgtcacaatcttaaatatatatgcacctaacactggtgctaccaaatttataaaacaattactgctagacctaggaaatgagatagacagcaacacaatagtggaaaactttaatactccactgacagcaagtcaacaaagaaacaatggacttaaactataccctagaacaaacgggcttaacagttacttacagaacattctaaccaagaactgcagaaaaaaaaaaaaatatatatatatatatatatatatatatgtattagaagagatggggtttcaccatgtaagccatgctgatctcaaactcctaacctcaagtgatctgcccacctcagcctcccaaagtgcaggaattacaggtgtgagccacaaagcccagcctacagatgcaaaagttcttaagaaaatactagctaaccaaatcaaacaacatattaaaaaataatccaccataatcaagtaggttttataccaaagattcatggatggtttaacatgtggagtcaataaatgtgatacaccacgtaaacagaattaaaacaaaaaatcacgattatctcaatagatgcagataaagcatttgacaaaattccaggatccctttatgattaaaaccctcagcaaaactggcataccagagatatattttaatgaaataaaagccatctatgacaaatctactgccagcataatagtgaatggggaaaagttgaaagcatttttctctgagaactggaacaagacaaaaatgtccactctcaccattttcattcaacatagtactgaaagtcctactcaaagcaatcaaacaagagaaagaaataaagggcatccaaactggtaaagagagctcaaactgtattttttttcctgatgatataattgtatacctagaaagcactaaagactcctccaaaaagctcctaaaactgataaattcagcaaagcttcacaatacaaaatcaatgtgcacaaatcagtagctctgctatataccaacagcaaccaagctgaaaatcaaattaagaactcaaccccttttataacagctgcataaaaatacaaaatacttgggaatatacctaaccacagaggtgaaagacctctacaaggaaaactacaaaacactactgaaagaaatcatacacgacacaagcaaatgaaaacacatcccatgctcatggatgggtagaatcaatatagtgaaaatgaccataatgccaaaagcaatctacaaattaaacacaattcccatcaaaatactatcattattcttcacagaactataaaaaacaatcctacgattcatatggaaccaaaaaagagcttacatagccaaagcaagaccaaccaaaaccaacaaatctgaaggcatcatattacttaacttcaaac

SEQ ID NO: 93345 - DNA, 12739 bp, Homo sapiens
caggcaagagagaatgagagccaagcaaaaggagaaaccccttataaaaccatcagatcccatgagacttattcactaccatgagaacagtatgggggaaactgccccatgattcaattatttcccactgtgtccctcccacaacacatgagaattatgggagctacaattcaagatgagatttgggtgggaacacagccaaaccatatcaaatggtgtccttataagaagaggaaatctgggcacagagacagagagaccagacacatctgtgcaatgaagctcatccatgtgaggtcacagcaagagggctgtcatctgcaagcaagaagagagggcttagaagaaacaaaacctgccatcattttggtcttggacttctatagcctgtggtattttgttgttgtcatcttagcaactaatatagcatttttagccaagaaatcctgctttgttccctgctgccctctccagggatggaggagggaggcattccctgggtggagcctgggcaaggagccctcatcactggatcctaaaacctgtgtctctgattttccatagacactggggctatcaaggaaagatttttgactcatcttgccaagttctaaactatttggatatcaaacttgggtaaagacctagtgaggaaatcagggaggctgtagttaggagaatttcacaggcatgcagaagtaatgtcatgtaggatgctagctgagatgtgtggataagcatcagttgccacattgatggggcgatggcaataagagtctggaaactctgttttcccaaagaaactgacatcctcataatctcttacgatcagagatcaaaatttgaggtgccttggtttggttgtacaaagcttcatacatggaaatccttctttctgttggatgtgttttatttccaacagaaataaaatgccatggcattgtctccaatgccattgcattatcattgccatttctagcagcagaattctttaatttgaaaaagttgttgaattgtaatggacccagttctaacctaagtttcaggtcagtgactttgtataattcattggctctctgtgtctcagttttccttatctgaaaagggggataattattgctgctccccagtgcacagatacattattttgatgttgtgggagtggggtttgaatttgtagaaagagaatggatttcaaaaaggccttctttcccccatttaatttggtcttgagaaaatgatgtagcctctctgagcctcagttctctcctctataaaatggggatagtaatggttactccagtggggggtgtgagtattaaatgagaacatatggagagcaccttatgttgattcctgcatgttttaagggctctataaatgttagcacttgatgatgatattttaaaattattgaaattactaacaaaaggtgagttagttgctttagatacttaagtattatgctgtcccttaaaggggcatctgcttaacagatggttagttgaccatttagctaatggaaagcagtgtaagatttaggataatgtatggagatgtaactagagaatgaggtcttgttcctttgacctacatgctaaactctcagtacataccatcaagcaggcttcctctaactgtaacatgcacataaattccccggaaatcttgttgaaatgcgaattctgattcagtacctggagagtccgggttgggtgctgacattctgcatttctaagaagttcccaggtgagggcgctgctgcggctcaatgtccgggttttgagcggcgaggtcccagagaagatggtagagctagctatgatcccaatctgtaagttccactttttatcaaccaattattattgtctatcaacttacattaagcttcagaaacatttcattttgacttttcatgtcaaattccccagctcttgctactttcctgcccctggcctctctatttagtacttaatgtctttttttttcttgtttaaagaataataacaataatgactaatatttgtcaggaatcaggaactgtttccttaaattttcacaacatcccatgaggtaggtatcataattatccccatcttacaggtgagaatatggagatacgtatagataaaataacttgctaaatcacccaactagtgagtggtaaaccaggactattttaagagtttatttaaaggagcccttttgtaaatgagaatccccagggatagctggcatagtgcaccccccttaccagtttttgttatgcccctttaggtttttgtcacattttagaaaatgtagagcctcccttccaggagccagcaactgtggcattcatccagaatgcaaccccaagtgactgcagagtctaggaagtccgtgatgttttctcagagtggcacccgggccagaacccacacagctcagctgtggtttgctaccttatgagtgaaggctgtaagaatgaaggtcacagccagcagacagatcctgtagggtgtgttcacatcctttccacctgcttctttcacaatttgagtataaattcaatttttatcaaccgaatattattttctattgatttacttctggagtactgacttctgaaaacttcagaatatttttatttttcatcttacataggcagggcttttgctactattctgcctgtggcctctgtgtctagtactttaaaagtgattaaaatagactgggcatggtggctgatgcctgtaatcccagcactttgggagggcaaggcgggaggatggcttgaggccaggagctcgagaccagcctgagcaacacagcaataacccaatctctacaaaaaaaaaaaaaaagtttttttaaaatcagccaggcatggtagcatgtgcctgtgtcctagctgtttgggaggctgaggtgggaggatcacttgagcctgggagttcaaggttacagtgagctatgatcatgcaactgcactccagcctgagtgacagagcaagaccctgtttctgaaagaaaaaaaaaaagaaataaaaagaaagaaagaaaaaacgcttaaaattatatcagcaacaacaccctacctgcaagcctgcgcttatatggctgtgcgctgtgcgaggaagagctgcaggggatagacctgaaccctatgatggatgacagggacacgtcctgtaggggcaatgtacttggcgatctggagagagtgcacgcatgagagcatgttgctcagagcctgtggctggtccactcctgccttggctactcattctctcacttgctgtagtcacttacactcacaggccttcattttcctcctttttaaaatgaaaggattgggtaggttggggatttttcaacatgtgtgtttatttttagctatggaaccctttcttcagatgaaggctcacctggaagcccagaaaataaagcataagagctgaattttctttggtggaagtcggacccagaaccaactctctgccttccccgcgctgcatccctcaccgatcccaacacagcctccttcttctgttagctagaaaacagctggcctagataataggaagcctccctttagcctccacactgtgcctgtgcactcaaaggaataaaacatggggtttcagaaagccagtgttagggaggagtatttgctaaaggcagttttgtttctaactccagtggctggttattataaaccctaaaatgattcagcaaggtgtccttggtgttgacttatttattttgcaaggtttaaatgcattttttttgtgtgtgtgtgagatggagtcttgctctgttgcccaggcaggaatgcagtggcaccacctcagctcactgcaatctctgtctcccgggttcaagcaattctcctgcctcagcctcctgaatagctgggactacaggtacccgccaccacgcccggctaatttttttatttttagtagagacgaggtttcaccatattggccaggctggtctcaaactcttgaccttgtgatctgcccgccttggcctcccaaagtgctgggattacagccatgagccaccactcctgacccgtttttttactctattattaaaaatactttatccttttgaatttagacttttgtgactggaagtttcttgttttggagatgatggggggaaaggttttttggggaaatatggaagatcattgcaaggaacagagtagaaaggttttgtttgtttgtttgtttttgacaagctctataatgttgtgatgtgtattgagcagactagcctatcttcctttgctgacgcaataatcttggaagagacaaaagttgaaaggaggcagacacaagacatgaagagtttcagaaatctttgaaatctttgaaagtctttttgaaagtctttggaataattagttcacttgagaccatcaataaaatgcttgctttcattggtgactgggtatgaatgtcttactgtcagcagaattgttaactagagagggtaatacagaatgttaaataaatttgaagtctcccaaattaaactggagagctgaattgaagtcaatgatctggagtagcattcttattcttagtagaatatggcatattttctcttcccactgactttgaatgaagcttccatggagaaggtggtggaacagcttagaagtaatacacactgagtgaacagtgcaggagagagacaatgatgtagtaacatttcttgggcaggtatgtgtcttctaggtgtttattctgttttcctaccctttcacaacagcaaaaatctgtattaaatgtagccttctgggtatagcacagttgataaatatcctctttcattctctgggggtgaagctatgtgtggaatattttgcaattgctgtggtcatgtatcactcatgtgccaaatgaaaatggtaatgaatgtggaagttataaaaaatccacactaaagtaagtcattatgatttaacccaatgcttcatctgtttacaatgaaagaacatagaatctccttgttctgcagtaatttgtttccttttagactttatcattacaactttttcaaaggcaccaagagtggaatcccctgattcctgcaacttatttgcatcaaatgagtcaccaaagagaaatgcctgttgtttttgcagggaatacagcatgcattttaatcctctctaacatagcagactgggagggagtgagaggcagaacgaaatggataaaagggagaggagagagacatagaaagtccatcactgcaacttcttagctgtgtatgcaaatgtaaaaactgttttatggataccactaagtgcattccgcttctagttattcgtttatatgaaaaaaattcatgcaaataacagcattgatattaattaattggcatccacgtgtattctttcagcagagctacaagaagaagctgtgagaatgttgaggtggagccattgatcacgtctcataatagcacagagatcaagacatagagatccgagttcaaatctgtgctcttctgcatacaagatgtgactctgaaaaaaattactgtctttaggcttagttttctcatcttttaaagagggattcataattgtccttatctcctaaggttgttagaaggaacaattgaaagatgcatgtcagaaatgtttactatagtcagaataactatttgaaaaatattagccagggcctggcgaggtggctcgcacctgtaattgcagtactttgagagaccaaggcaggaggatcagttgaggtcaggagttcgagaccagcctggccaacatggcgaaacccagtctctattaaaaatacaaaaattagctgagtgtagtgttgcatgtctgtagtctcagctccttgggaggctgaggtgggagaatcacttgaacctgggaggcagaggttgcagggagctgagatcgcaccactgcactccagcttgggcaacaaagcaagactccatctcaaaaaaaaaaataggcttttgcagacgctgccgccaccaggagccctgtagtatcagccatagtcaatcccacggtgttcttcaacattgccatcaatggtgagcccttgggctgcatctcctttgagctgtttgcagacaagtttccaaagacagcagaaaaccttcgtgttctgggcatgggagagaaaggatttggttgtaagggctcccgctttcacagaattattccagggtttatgtgtcagggtggtgacttcacacgccataatggcactggtggcaagtccatctatggggagaaatttgatgatgagaacttcatcctaaagcatacaggtcctggcatcttgtccatggcaaatgctggacccaacacaaacggttcccagtttttcatctgcactgccaagagtgagtggttggatggcaagcatgtggtctttggcaagatgaaagaaggcataaatattgtggaggccacggggcrctttgggtccaggaatggaaagaccagcaagaaaatcaccattgctgactgtggacaacttgaataagtttgacttgtgttttatcttaaccaccagaccmttccttttgtagctcaggagagcaccctccaccccatttgcttgcagtatcctagaatctttgtgctcttgctgcagttccctttgggttccatgttttccttgttccctatgcctagctgaattgaagagttgagttaagtttatgattatgaaattaaaactaaataactataaaaagttagccccattttggggtggtggtggcagatgctaaggggcagcatcaagcagtgattaggataagcatcaagtcaggaaatggattcccatgtactcactactcttccctgtccagcttattgttgaatgtagagagtccagttttctgtgtgctagaaatttcatctcgaatctttttttgaaagatactgatcataaagagaaaaaaaaaaggaaaggaaggaggcaaggaaaggaaaagaaaaagaattaacagaaaaagtgcggccaggtgcggtggctcatacctataatcccagcactttgggaggccacgataggtggatcacttgagaccaggagttcaagaccagcctggctaacatgtcgaaaccccgtcgctaataaaaatacaaaaattagctgggagtggtggtgcacacctgtaatcccagctactcgggaggctgaggcatgagaatggcttgaacccgggaggtggaggttgcagtgagccgagatcgagccactgcactccagcctgggcaacagagtaagactctgtcaaaaaaaaaaaaaaaaaccaatatacaaaaaacaaaaatggtgggtgaactctgtcatcttcatttattctaaggtagataggatgggtattattggcccattttacagatttggaagacaggtgatttgcctaggatcattggtgagctgatgataggaccaggacacgaagctgggtcttctgcctcttcctggtctggcacatgctggatggcaatttctgcctgaacttgataaactgccctgtacagtagccatgaggtgagagaagcagcctgctacgatggcctccctctctgcagcctccgtagagacagggactacccatcagccgtctttgtgaaagagattaattcaggaaaatctcttgaaagcagaatgtgactcagaaaaatgattcttctgacgtcaataataagaacccctccctgcacacatacagtctttgagtattcagactttttggaaaaagcataaacagcctttgggtatacgctaaatttttggactgctgaacttgtcttttatatcaccctaccattacttcaggcatgaaaatggctttggcatcttctctgattactgattcatccagagctgttttaatattcttgagaatagttttagcatcctgggcacagtctctgattctagctgcttatgtccaaatcccaactgtactccttgttagcggagtgactttgggcaatttctttaacttctcaacttttctttaattgcctcatctttaaaatggagacgatgatggtccctgtcctagagggttataagaaatcaatgagggaatctttgttcaatgcctacagagagtgagccctcggtcaatgtgagctatgaacaataatgaggccattgtctttgcagtttatgaagctttgcagtttatgaagtttataggaccaatgatttgggcttataattgaatatcattggcgtacaagttcaggaaaatgacaaacattacttttttcctgtgcctttctagataaagtctagacgtttcttgattacatgagttttttcatataaaaagaataattagaagcggaatgcacttagggaccgtatgtaataggggttgataacagaaaagctcatgaagtttcatttccagtcacaaaaataatttcatgggacccacctggaaattataagcagaaattggaatgaatattagcacggaggacgtagttgtgtgctataaggaccatttctaggttaagctttctgtttaagtgtgtggtgaactgcacactccttttattaggttgggacaaaagtcactgcattttttgccattactttcaacggcaaaaaccacaatgacttttgccccaacctaatagttctggaaactgctctccaacaaagttgtatagctgagcttgggatgggaccaatgatttgggcttataattgaatataattggaagacaagttcagggaaaatgccaaatcattacttttttcctgtgcctttctagataaagtctagaagtttcttcttccttattgaatctgaccttttaagaaatttagtttttatctttcccaaaggaatcatttttcatgtggaattcaatttgcttcaagtttctgtctcttctgcttagtttaaaagatgaggccaaggccctctgaatgttttgttactgatatctgctatttttcactctcagccctgtcataaattacatggtggtaagctttgtctcctattctgtaattgcaaagcaggcctaggcgaggtcttttaacataatctgttgtaaggtatcctgtttgcctaagaacacagcagcatctgtgttaccagggtacgacagcatcactatcggtcataccttaattgcaaacagagccaaacatgttggcctattgtagccattcaaaatgttgcaaggcagaagagaattgttctccttatatatcctctgctggccttgggcaagtccctaaatttttggctttgaaacttcttatctttgaaactgtgatggaaattatctctaaaaccctttctagccctctccttcctcagagaaatgttttccaagctctgttttgtgaaaagttcatagttgtactgggttgggggttctctggttgaataaattcaggaaatgcttcttatcttatttatctcttagttacaggcacacttgcatattaatacatagtaagtccatggttaagaaaactgtttaacaatatttaattaagcatttctcaaatacaggtgaagatgcaattttaagcatttgtatttgttttgctaagtgacggtcactttcctgtgaagggttctagaagcgtggttgggaaagatttctgctctgtgtttttaagataaggaacacacaaccgtgtctctgatttcaaaatgacatggtataagctccattgctatttaattagaaagtggttgtttgaggccgggcactgtggctcatgcctgtaatcgcagcactttgggaggctgaggcgagaggattatttgagtctgggagtttgagaccagcctgggcaatatagggagactctgtctctattaaaaaaaaaaaatagccgggcatggtggcacatgcctgtagtcccagctactcgggaggctgaagcaggagaatcacttgaacctaggaggtcaaagctgcagtgagctgtgattgtgccaatgcaatccagcctaggtgacagagtgagactctatctcagaaagaaagagagataaagagagaagaaggaagggagaaaggaaaagaggaaggaagagagaaagaaaattgtgcattttaaacaagtttctaggcagttggtttcacctcttttgtttttgtttttttttttgagacggggtctcaccctgtcacccaggatggcatgcagtggtgtgatcatggctcactgcagccccaatcttctgggctcaagcaatcctcctgcctcagcctcctgagtagctaggactataggtgcaggccgccatgcctgcctaattttttttttaatttttagtagagacaaggtcctgcaatactttccaggctggtctgaaattccagagctcaaactatcctcccatctcggcctcccaaactgctgggattacaggcatgagtcaccacacctggccagtttcttgactataataaatcatcaaccaaattgtggttcaactaacacaagtcaaatttggaggactatgattaggaaagaatcactttattgcttaacattcaaaaaaatcaaagtttcaatattggattgcctgctcccccactttgcccctgtcctgccttgtaaaaggcaaggaaccaatgcaatgcaggttatttttaaactagcaccctattttagcccctgaaaatagctgtagctctgtacttggtttcttctctcatttaatatcaagtaggaataatacttcgagatttaaaggagtaggaaaaactagcctccattacattttaaatgcaggctaacaagaataaagaatgcaacgatgaaagacttccatccttatggtaaaaatcccaagacactaacaaaaaacacattaggctaaaatatggaatcactatcatgagaatgcaaggcattaggtgtaatcagaagatttcagttgatgcgactggcctttggcagcagctgacacatgacagctctgcaaatggcaagcattttatcaacgagcaatccagttgtgattctttgtctggcgcctggtgctacagccaagtcaggaggacgttatcagaggcaccaagttccaggcagtagcctggaccaggggaagggcacatagggtgacccatgaggatggctgtctacccgagtcatttcaaaacaaaataaaaaagccacttagctggggaagagagtaagccaggactcttcaattaatcaaactttgcatttggccaatgtgtttcaaatagtcttgttttccagtggattgattataggccttacattaaattaatatctcacaacgggtgctgctggttacatctttattggaggaattaaatgttttaccctcacatttaaagcaattatgccagtttcctcctatttcttagccaatgtgtgtatctgatgccaaggatatttgtcctaagggtctttttccatttaaactgtcttcataacttttccaatatgcaaaattcccggtgttcaaaaataactgtgagaaaagttggattgtgggtggtggataatccagcccaacatcagggcattactgacgaaaggaaaaaaatgcctctttcctgagtctttccggatgaggtcattgttttcagacagcttgtatacctaatataaaaaggctcaaagtccacggctcgtctcataccaggagtttgtcagggaactgtttccaaagccataatgaataatcaggctgttagtaaaagaagcctctccaagttatagcattttttaaaaattctagtagtgaagaaaataattaaaagcccatctggttgagatagtaattcattaaggaaaaagaggaggcagaaggctggggaataatcgatccttttctttctttatttcatgtgtttcagttattgtgaaatgatagtgatcaaaatctggattctggattgtgcagaatgcaggaaaatcctaggaacattcttggcgtgttctaatagtggcttcccagaaacgagtgttttcagtgggtgtggcgtcattgagctgatgtgcttttgcaaggggtctctttagaagtggtaggggcagggtcgagagaagaaggggatgcagaatctgtacatgaggaaggagccagagtcactcaggaaactcctcattcttcctgcgctggctgtggcacacccaccggtggcacacccctccctcgggtccagttcagcccacagactcctgggaggagagccagggccccagcctctcctttgaggagtgttgcagcctttctgtgtgccagatgcctagtgaagaaaagctgaaaccctggagctttgtgcatgttaatgaccttggaaatgactgagctcacggaccctcatcacaccatgggagactacaaaggttagaccgtccattttgtaaagtcagcatatattctgtctggggtcgaccgtgtctttaaagatgaggaaagatgcagggcttttccatttgataaaattgttttacacttatgataataagtaaaagattgttttacaatctatttctgtgatagtacatatctgtataaaatgcacatcttatttgtcaacatatttacatatattcttaatataacaggatgttaaaatcgacatgactcttttgtagcagtagcccagctcaactcaaccaacagtaggttggtcctttgggcacattaaaaggcatcttcagtgactgtgggcaaacacctgtgatcctatttctgggca

SEQ ID NO: 93346 - DNA, 13223 bp, Homo sapiens
ggttttatgtactactgagaatgccagtgttgcagtgagctaacttgcaggtgtctggtgataagttgggtgcagtacggctacatgtcctggaccatgaagaaaggcagactcataatttatctgcttttccctgctcccaccagcctgactccctttccctaattaggactccacagttagtgttttgaagacaaacaggccgggcgaggtggcgcacgcctataatcacagcactttgggaggccaaggtaggcggatcacctgaggtcaggagttcaagaccagcctgaccaacatggtgaaaccctgtctctactaaaaatacaaaattagccaggtatggtggcacatgcctgcaatcccagctacttgggaggctgaggcaggagaattgcttgaacctgggaaggagatgttgcagtgagccgagatcgcaccattgcactccagcctgggcatcaagagcgaaactccgtctcaaaaaaaaaaaaagaagacaaaacagtttcaaatacctgtaagtgatctgccaaagtgttcccacagacaataaaacaaagccatgcgaacatgtgtgaaaaaccattttttagcgtgtgtgcgcgtgcgtgcgtgcacacacgcacacacacacttggtgaaaagtgtctttaatcactttattagtccattcccacaatgctataaagaaatacctgtgactgggtaatttttaaagaaaagaagcttaactggctcatggttccgtaggctgtatagatagattagtggcatttgcttctggagaagcttcaggaaatgtataatcacggcagaaggtgaaggggaagagggacgttttacacggccagggcaggatgaagaaaggggggaggtgccacacacttttaaacaaccagattccatgagaactcactgtcacaagaacagcaccgagaggatggtgctaaccctttcatgggaacttcacccccctggaccaacacctcccaccaagccctacctccaacactggggattacaatttgacatgagatttggtggggacacagattcaaaccatatcaattattattaaggctactatgtatattataattgttcctattgcatttatttataggatttttttctcctagaaatgatcagctctttgagcataaaaaggattctcattagaagaaaacattttcgaatgttctaactgctagagatatgtatgaatttttagtttttaaggtgattctgcctgatatttgataattccttttgttaaacagttcaacaagcagcatgatgttagacatctgaacttacctttggaaatctaatgtgcagactcatgggataatcagtcctacaattccaaggactcatatcagtattgctggacccaaagaaattgccaaaagatatccatctttttcctgtttataaaagcaatgacagcatctcctcaagattctagaactagacaaaagtttcaaggactatatgtatgtccttcctaaacaaaaattagtcaaactctggcctttaccactaaacttcaaacaagaggttgcacctatgtggccacatctagtacagtaaaaggttaatagaaactactagtaaactttctgaacaaccaaactgtaccaaagaaaaagaaggaaaaacacatcatttctgttagtatattgaccctggtcaataattatgaatttatttgatattataaccctgtattggcctatagttaataaatgttgagttcaattttattaaaccatagtcatcatggtcataaattattattattattttttttaacatggtagttctttgactgtggcaatgagcaagtgaacttacgttttacttaataaaaatttcagccaggcacggtggctcacatatataatcccagcactttgggaggccaaggcgagcaaatcacctgaggtcaggagttcaagaccagcctgggcagcatggtgaaatcctatctctactaaaaatacaaaaatcagccgggcatggtggcgcacacctgtaatcccagccactcggggaggctgaggcaggagaattgcttgagcttgggagctgagattgtgccactgcactccagcctggacaacagagtgagactccatctcaaaaacaaacaatcaaaacaaaagaaaacaaaaattttcataagtctttttgtttgttttgagacatgatcacagcataatcctcccacctcagcctcccaagtagctgggaccacaggcatgcaccaccatccaccatacccagctaattttttaaattttatgtagaaacaggatctacctgtgttgtccagcctggtcttgacctcctgggctcaagcagtcctcccacgtcagcctcccaaactgctgggattagccaccatgtgaagcccttcttttttttattttttattttcttgagatagggtctcactttgtcacccaggctggaatgcagtggcatgatcttggctgaatgcaacctctgcctcccgggctcgagcaatcctcccacttcagcctgctgagatgggagcacaggcctatgccaccacgcctggctaatttttgtacttttagtagagacaaggttttgccatgttgcccaggccggtctagagttcctggcctcaaatgatctgcctgcctcggcctcccaaagttctgagattacaggcgtgagccaccttgcccagcccctcttgttttaaggttacttttaagtcaagaaaagtgacactccatcgaaccaggcctatagcttagttctggttcttaagttcggtaggcaataaatgtaagtcaggtgtgacagaaacccacatgagggacagttttaagtagaattatatgtttagacttttaacacatattttgtagaactctggctatttctgaaagtaccagtgaacacttgatcgtttaataaacagagcttacctgggcttaaagattatccccttccccacccattgaagttgctttgaatactatgactaaaaaggctttccattaaaataattatataatgcaaaatccaatataaatacacacttgcaaatatcattgtagttatttatttagattgtttttaaatgagatagtgcctttaaatatgacttcatagcccattatccattaccattcattcatccactcatttgttcattcatgaattcatttagttcaaataatatagaggtggagatggggagaaatcactggggtgggggtggatgtcaggaagtaagcaaatgtaagactgcagctctagtatagaagagatgatgaacataaacaagtcttaggagaggacaggaagaaaaccttccctgtaggcccgtaaaatgtgcttgaatgaagggaggttgggcgctaccagtggaacgtaacaccacagcaaatgtgcgcccacaggtagagggttacatgttcgcctttgtagttaaaaaagaaaggtatagtccttttccatgtacaaagcattctatcattcattaccaaatgtaatcctcacagcaacagtgtgaattaggagtgttcccatttaacaatgaaaatgccgaggccttggggagaatggctggtccaatgttgtacaaccggtaaggcggcgatagaggagaaaagactaaaacccagatctttctctaaattaggagctttgtgcacaatcctgctaccaccaaatgttagaatcggaagggagcttaaagaccaagtctagtcctttcattttaaaggagttgggaatgggccctgatttgccccagctggtacataacagagtggagatccaagccttggtttcctgacagctcccagtctttccactctaccacctggcctcaaaatgaaaagaaacacaaatgttctacctataaatcagagctcgccaaaaggtcactagaaatcaaacagcaaacacctattctctttgaaattcaccagcaaagctggtggcagcaacatttcctctattcccaggaatcttaaggctttggagaaatgagaataagcacctccacaaaaacagaaccgctgaataatccatttagaatcttggccagtatgtgcatactataggcctattaagtcaaacttattaatagcttttcttcacagagaaaaaagttcatatatacctactgactgcatttgatcagtaagatatcatgtcagtgtccttcttacctgaagtacatttatggctgggtcatatcgtgacataaataatcacattttgtagcttgctttagacggaatgcgattttttttttttttgagacggagtctcgctctgtcacccaggctagagtgcaatggcgcaatctcggctcattgcaaccaccacctccagggttcaagtgattctcctgcctcagcctcccgagtagctgggattacaggcacgtgccaccacacccggctaatttttgtatttttaatagagatgggttttgccatgttggtaaggctggtttcgaaytcctgacctcaggtgatctgcccgcctcagcctcccaaagtgctaggattacaggcgtgagccaccgcgcccggctggaatgagatttttaaaaacaccaggactgagaatccatccacccaaccaagagccaacaaagtagtagttactttaaacattcacttatccatgagactactgaagaaatccaagaggcttggtgatactgacctcactctcagttctatccacaagtagtaaagtactgccaaatacacttagcaatttcaggaaaagacacttgtctccacaacctgttactgaatgcagcatatagaatccattcgattctggaggacaacacactccaaaggatgtttcgttttggaaggagagctgtaggggaaggtacagggggatgcttagcaatgcttcctgagtgactaaatgaacgaagtggatctccctggcccttagtaataatcctatgagattccaggaagaaaattagcttatcttcatagagcaacaacaaaatgattcaatatgaatattgtggttctgaagtttgcttccttcattcttgacttttgccagttgcagaactccaccagtggacaccgaggtagtgggcggccaagagtctgtgaagccagttattcatgcatcaagatttcaaacggtccaaatggaactctggcaatgtaagaactcaggaggggaaaaatatcttgcaagaatctactcttacaaaagaagagtttttgagatttaggaagaatgactgcaggaagtggtgatcagcgctgtgcagttggggttaagctcctctccttcagccttggagcggcaggaaaaggccccaaacactctgaggctgaggcttctctgcccaggaacccaggatcatacaaccgccaggcacagtggccacagagcagcctccaccttaagggaacaattccagacacgacctcattgaatacaccatggaagatgttatcttctttaaaagtaccctcatggcagggcgcagtggctcacgcctacaatcccagcactttgggaggccaaggcgggtggatcacgaggtcaggagatcgagaccatcctggctaacacggtgaaaccccgtctctactaaaaatacaaaaaaattagccaggcatggtggcaggcgcctgtagtcccagctacttgggaggctgaggcaggagaatggcgtgaacctgggaggcagaggttgcagtgagccgagatcgcgccactgcactccagcctgggcgacagagcaagactccatctcaaaaaaaaaaaaaacccttacaaggaaaaaggcaggcaactgccatctcccagtcacgcatccccaggaacttggctgtattatatcctgcctcagagacaaactcatctattgtaggcctggcctggattgctgcctttgaaaacaaggaaaggtcagcagaatatcaaccaaggcatggaatttccagggaggtctcatttcaaaatgtcatcaacaagaaccacatggacctctgtgagagggatgattaaactagcctgagtttgaatgaaaggattatgtgtacccaacctgtaacwaacaccaaggaggtaaagtggcagagggtcttgtatgagcaacagccctttcctgataactttgtggaccggcggttcctggaagagctctggaaaaacatccatgctyggaaataccaatattgggctatggtatttgagtccagtgtggtgatccygcagctgtgcagtgtttttgtttttctggttatctggtggtatatggatgagggtcttctggccccccaatggctttttgggactggcctggcttcttcactgattgggtatgttttgtttgatctcactgatggargtgaagggcagaagagtgggtggacccggtgggctgacytgaagagtgccctagtcttcattactttcacttatggcttttcaccagtgctaagaccctgacagagtctgtcagcactgacaccatctatgccatgtcagtcttcatgctggtaggccacctcatcttttttaactatggtgccaatgatgcctttgtatccactgtatccagcacactatccttgaacatggccatctttgcttctggatgcttggcttccaccttccccagtccctgcatgtcttcatcatgggaacacttgccatccagatttttgtcctgtggctcatgctacagaagaaactaaaggcacggactcccaagggctatgtggtggtcacactgctttttgccttttcggtcttggaaggcctactgcctattagtgctgtgggagccgtactctttgcccttctgttgatttctatctcatgtctctgtccattttacctcattcgcctgcagctttttaaagaaaatattcagaggccttgggatgaagctgaaatcaaggaagacttgtctaggttcctcagctaaattagggacattctgatagactagcctcctaactagtataaaacttaaagacaggccgggtgtggtggctcacgactgtaatcacagcactctgggaggcccgaggcggatggatcacgaggtcaagagttcgagaccagcctggccaacatggtgaaaccccgtctctactaagaatccaaaaattagccgggcatggtggcgcgtgcctgtaatcccagctattcaggaggctgaggcaggagaatcgcttgaaaccgggagatggaggttgcagtaagctgagatcgcgccaccacactccagcctgggtgacagagcaagactccgtcttgaaaaaataaaaaatgaaccaaaggcttgggtggtgagggtgcttatcctttctgtaattctgtggatgaaaaagctttctgggaccctcttgaattattcgctgtaacaaatgaagtgatgtggtttctattaaaaaaataataatacattcaaacaaacaaaaataaataaatatgaataaaagtaccctcacaaaatgcagccagtctgccagattacagtgacccagattctccagtctcctgcctgggacccaaaaagatacatctggctctacttttttttgttaaggagagacagggtctggctctgtcacccaggctggagtacagtggcatgatcatagttcactgcagcctcaaactcctgggcacaagtgatccttttgcctcagcctcagcttgtagctgggagtacaactgtgtgccaccacaacaggctaattttttttgtattttttgtagagacatgatctcactatgttgcctaggctggacttgaaatcctgggttcagatgatgctcctgccttggcattccaaagtactgggattatagtgtaagccaccatgcccagccctgttttttgttttgtttttttaatttatcacatcattatagattagaaccaacatcagtgctgatctgcatacatgtaatttctacctgagtttctatagccagatccaagtccttgtataaaccctgggaccatcagcaatctcaaaaatcctgaaagcagaatgtattctgactctaccaggtctgaaatccttctcatggagtatctgatttcctccccatcagtcctattggaatacctacccaactgcttcttcaagtcttccttcaaaacacaaaatcactgcacttccttacaaagaaggatcagagaaaacagctgcttgcagtaaaatgtagcccttcctcctggttgtgcaggagtggctgctggccttcctggagtctttctgaaatggcttccaagtttcttttcttttttctttttttgagacagagtctcactctgttgcccaggctggaatgtagtggtgctatctcagctcactgcagcctctgcctcccgggttcaagcgattctcctgcctcagcctcccaagtagctgggattacaggcgcgtgccaccacacccagctaatttttgtatttttagtagagatggggtttcaccatgttgcccaggctggtctcaaactcctgacctcaggtgatctgcctgcctcggcctcccaaagtgctgggattataggcgtgagccaccacgcccggctaacttgtaagtttctcttagcttcctgtacagaaggcttcaggtgccgatattactgcattactcatacagtaatatagtcttaccccttgctgttgtggcagttggtcattccaacttcatggctctgcttctaatataacatccctgtctaaaatgcagacatacatgtgtacactttaaaaaaaaaaaaaaaaaaaaaaagaacagatcgtctatgagacccaaatcactcacgctcagaggacatgtcaggaattctggtcactgaagttccttgaaaaataatgctcaaacaccagggatttcctatgacttcctcatctaggagattcgtgaactcaagctattttatctgaaaacagttaaatctaattccagaatttaattcaatcatcacatctgtgtattgtctcagggtcaatttttcagtaagaattccagacatttctcttcgttcacattacagtaaactatttttcaatacatttcctccttgactttcaaggcttgaaagtcaaagactttcctttcactagatctcataagtcataactgctctcaaccagatgcaggagtaattttgtataaaagaacaagctttttaaagtccaataactgtatctttgggggaaggttaaaagaatgtttaaatacaaaaaagaaagtaaaaaaaaaaagagagagagacaaataactctcctctagaaaaaagggcttgggagccctggctaggccaggcagggaggaagcaataaatagggggagaaaatggcaataagacgttatatagcccttctaacaaaaataccagaagggaggggtgagggacaaggctgtctgagggagggcaggaggtgaggccatggcttggtctcttttgcgcttggatggccgtcagctcagcatgaggcatctgaaagaactacccagattgcagaagagagaggtcccagcctccttggaaggacatgatgggggaggagtggagacaacagctgagtgttacctgtaaaactcgagaacaaaatgcttctttgatttgtaaacttgcactcataaatacaatctctcaaaatagaattcagtggatttctcaacaagtcttttcaacagtgatacacaatattcttccctttggaatcggtgctgttaaatagacatgtactatatagccattttccaatgcaacattagagtacagaacaggtattctgtggctagtgagtaatactgctgctgtagggtgcatacacgttaggatyggacgaggatcttactcaggattgcatcgtagtagggacagaagaccatcttgttatagttgaccaggcgagcaaatttaatagcaacttcctccagctctctctgaactggactgagtcccccagggactgtgggcaatggcttctgatgacccgaggcaaggtaggtttctaagaaggtcaggattcgagattctgtgacaaaaaagaaagtggtcagttgtttcttgtccttcaccttacaaaccttactgtgcttcagttcttagcttaaccatcacctcttaggggaagttgtccccgatcaatactcccagaccagatacccacagcaccttgcacttctgcatattcatcccatttataatgttttctctcccctctagatggttagtttcatgaaggtaggagccatgctcatcttgttcatcatgtctcctcagcactcagcacagtgactggcatgagacccagctcccaggagaagctcaaacacacttggaatgcaagaatgaatgcatgagtggccaggcgcggtggctcacgcctgtaatcccagcactttgggaggctaaggtgggcgggtcacctgaggtcaagagttcgaccagcctggccattgtggtgaagccccgtctctactaaaaatacaaaaagtagccaggtgtggtggcgcacacctgttgtcccagctactcgggagcctgaggcacaagaatcacttgaacccaggaggtggaggttacagtgagctgagatcatgccattgcactccagcctgggcgacagagccagactctgtccccaaacaaaacaaaacaaaaaaaatgaatgaatgcatgagtgagtaaaggaagactggagacatgctctgctctccgaggagcaacacatcctgagaccattgttagccatcgctgacgatcacataaaaaggtggaagattaaagcaggaattacaggttcaaaaaagacttttttcctactaagcctccatgaaagcagctcgtgcttccttctctgatgcctgcatggaagtcatgggcatttgtaaacttgtcctacttggaggaataatttaggttgatgcttttctagtccattccccttcacaatgcttttgtactcttgtgtatcctcatgaaaaaagatttgatcaagccacacttcttgcagattttatcacaaaaacaacagagacatttatatggaatagactttttcaaactacatgccttgcctcctgcctggggaatcctctcaggtgcaaataacttataccctcctgagcctcacaacacagacagaaactgctgacaggacagggcctaacacccttactctttttttttctcgagacacagtttcactctgtcgcccaggctgcagtgcagtggcacaatctcagctcactacacctccgcctcccgagttcaagcgattctccccactctgcctcccgagtagctgggattacaggcacatgccaccatgcccagctaatttttgtattattagtagaggcggggtttcaccatgttgcccgggctggtcttgaactcctgacctcaagtgatccgtctgcccccgcctcccaaagtgctggaactacaggagtgagccactgcacccagccctatcacccttcttcttttttttttcttttttgagatggagtttccctcgtctcccaggctggagtgcagtggcgcgatctcggctcactgcaacccccgcctcctgggttcaagtgactctcctgcctcagccttccgagtacctgggattacaggcacacgccaccatgcccaggaaatttttgtattttttgtagagacggggtttcaccatgttggccaggctggtctcaaactcctgacctcaggtaatctgcccaccttggcctcccaaatgctgggattacaggcatgagtcatcacacctggccctatcacccttattcttttttttttttttttttttgagacagactttcgctcttattgcccaggctggagtgcaatggcacaatctcggctcaccacaatctccacctttcaggttcaagcgattctcctgcctcagcctcccaagtagctagcatcacaggcatgcaccaccatgcctggctaatttcgcatttttagtaaaggcggagtttctacatgttggtcagcctggtctcgaacttccaatctcaggtgaactgcctggctcggcctcccaaaatgttgggattataggcatgagccactgtgctcagcacccttattcttaagttagtttggttctctaaggttcccagggctggcagcctcactgaagtagaaatctttgtattgttcctacccaaagactggtttttcttttctttctttctttcttttagaaacagggtcttgctctgtcacccaggctggagtgcagtggtgaaattgtagctcactgcagcctcaaactcctgggctcaagtgatcctcctgcctcagcctcccgagtagcaaggactacagatgcatgtcactaacctggctaattttttttttttaattttttgtagagatggggtctcactatgctgcccagatagtctcgaactcctggttttaagtgatcctccccttaagggctggttttcaatctgtcgataactggctattacaaaacaacccaggcagcaggatgagtagcaacttgctggccacaggtctacttacaggcactttcctgcctccctatgaaggttgtgagtataaatcttggctggatgcagtggttcgtgcctgttaaccccagcactttgggaggctgaggcaggcggatcacttgagtccaggaatttgagaccagcctggccaacaaggcaaaaccccatctttagaagatatacaaaaaattagctgggtgtggtggtgcatgcctgtagtcccagctacttgggagtctgaagtgggaggactgcttgagcctgggaggtggagcacagaggtggagtgcagtgagccgagatcgcatcactgcactccagtctggaagacagagtgagaccctgtctcaaaaacaaacaaacaaaactatgtattcacagcatacagcatgatgttttaaatgtatgtatatactacaaaatgattaagtcgagctaattaacagaatttttcataaagccattgctgtgataactaatagctaatattatagaatattttaaatattttatagaatatgcattaaaatattttaatacttcaagtttattataaattttaaatagcaatatcttaatattaccattttaagttattatatttgatatgttaatagtattacatactaatatttaataata

SEQ ID NO: 93347 - DNA, 23116 bp, Homo sapiens
tgtgggggaaaaaaaggggggaatttagaagaatgtaaataacttgcccaagctggtaggtagagaagccggaattccaccccaggtctgtctgagtccagagtttaaccaccaacccttagctggtttgaatatttaagggcagggtccaagtctcattcatctttgtttaactcatagcacctggcctaaggtcacacctgccacgtggaaacagcaaatattagttgattcaaaagtagagctagtcaaaggccctgggatagggttactttactggaaaacagggcatgcatgaaaggaaatgtaaaagccaaccaagaaaaagcagagtggcataagtggtcttatatcacaccaaagacagaggttaaccttaaatgtgtttggaattcatagcatgaagttaaaaaagtattttgaagcggctacactgtaagaatgataaatcatgggaaacagctggaaggatcctgaagttctttcttctgacttgttctttttccaaggactgtagattccttagcttargccagctggggtgagttcttgttggtgtgtgagtatatggttttcacatgtaaagcaaatttaagactcggttatgatagatttgtgctgtgtttgtgccccaatcttcaggccacatttctactgtgctgtcttagccagcttctcgtgggcagggctgtcaagtcaactcccagacttggtgggttgtccgctctatcagcctccttcagaatgttcgtggtggcacctctagatccttctcagaatgctgtctcatttatttcctgacagttaaagaaaacttaagaaagtgaaagcttacatgagaaaatgagtaagcacttttaaaacagaactattaagctcactttcaatgttgctaaagttcgccctttttagacacctttaaatccctagtgcccagacaaatcaaatgcctaatagggcttgcttccagtgcggtctacaaggacactttaaaaaaggttgtccaggccgggcgtggtggctcacgcctgtaatcccagcactttgggaggccgaggcgggcggatcacgaggtcaggagatcgagaccatctcggctaaaacggtgaaaccccgtctgtactaaaaatacaaaaaattagccgggcgtagtggcgggcgcctgtagtcccagctacttgggaggctgaggcaggagaatggcgtgaacccgggaggcggagcttacagtgagccgagatcccgccactgcactccagcctgggcgacagagcgagactccgtctcaaaaaaaaaaaaaaaaaaagaaaaaaaaaaaggttgtccagatagaaataagccgccccctcttccatgccctttatgtcaagggaatcactggaaggcccactgccccaggggacaaaggtcttctgagtcagaagccactaaccagatgatccagcagcaggactgagggttccccggggcaaacgccagcccatcaccctcacagtgtcccagatatgcttgaccattgagggccaggaggttaactgtctcctggacgctggcacagccttctcagtcttactctcctatcccagacaactgtcctccagatctgtcactatctgaggggtcctaggacaggcagtcactagatacttctcccagccactaagttgtgactggggaactttactcttttcacatgcttttctaattatgcctgaaagccccactcccttgttagggagagacattctagcaaaagcaggggccattatacccctgaacataggagaaggaacacacatttgctgtcccctgcttgaggaaggaattaatcctgaagtctgggcaacagaaggacaatatggacgagcaaagaatgcccatcctgttcaagttaaactaaaggattccgcctcctttccctaacaaaagcagtacccccttagacccgagccccaacaatgactccaaaagatttttaaggacctaaaagcccaaggcctagtaaaascatgcaatagcccctgcaatactccaaatttaggagtacagaaacccatcagacagtggaggttagtgcaagatctcaggattatcagtgaggccgttgtcactccatacccagctgtacctaacccttatactctgctttcccaaataccagaggaaatagagtggtttacagtcctggactttaaggctgcctttttctgcatcgctgtgcatcctgactctcagttcttgtttgcctttgaagatccttcaaatccaatgtctcaactcacctggactgttttaccccaagggttcaaggatagcccccatctatttggccaggcattagcccaagacttgagccaattctcatacctggacactcttgtccttcagtacgtggataatttacttctagctgcccgttcagaaatcttgtgccatcaagccacccaagcgcttttaaacttccttgccacttgtggctataaggtttccaaaccaaaggctcagctctgcttacagcaggttaaatacttatggctaaaattatccaaaggcaccagggccctcagtgaggaatgtatccagactatactggcttatcctcattccaaaaccctaaaagcaattacgagggttccttggcataacaggcttctgcyaaatatggattcccaggtacggcaaaatagccaggccattatatacactaattaaggaaactcagaaagccaatacccatttagtaagatggatacctgaagcaaaagcagctttccaggccctgacaaaggccctaacccaagccccagtgttaagtttgccaacggggcaagacttttctttatatgtcacagaaaaaacaggaatagctctaagagtccttacacaggtccaagggaccagcttgcaacccgtggcatacctgagtaaggaaattgatgtagtggcaaaatgttggcctcattgtttacgggtagtggcagcagtagcagtcttagtttctgaagtagttaaaacgatacagggaagagatcttactgtgtggacatctcatgatgtgaacggcatactcactgctaaaggagacttgtggctgtcagacaaccgttcgcttaaatatcaggctctattaattgaagggccagtgctgtgactgcacacttgtgcaactcttaacccagccacatttcttccagacaatgaagaaaagatagaacataactgtcaataggtgattgctcaaacctacacttctcaaaatgaccttctagaggttcccttgactgattctgacctcaacttgtatactgatggaagttcctttgtagaaaaaggacttcaaaaagcggggtatgcagtgctcagtgataatggagtacttgaaagtaatcccctcactccaggagctagtgctcagctggcagaactaatagccctcactcgggcactagaattaggagaaggaaaaagggtaaatatatatatagactctaagtatgcttacctagtcctccatgcccacgcagcaatatggagagaaaggaaattcctaacttccaagagaacacctatcaaacatcaggaagccattaggagattattattggctgtacagaaacctaaagaggtggcagtcttacactgctgggggcatcagaaaggaaaggaaagggaaatagaagtgaaccgccaagtggatattgaaaccaaaagagccacaaggcaggaccctccattagaaatgcttatagaatgacccctagtatggagtaatcccccctgggaaaccaagccccagtactcagaaaaagaaatagaatgcggaacctcacgaggacatagtttcctctcctcaggatggctaaccactgaagaaggaaaaatattttacttgcagctaaccaatggaaattacttaaaacccttcaccaaacctttcacttaggcattgatagcacccatcagatggccaaattattatttactggaccaggccttttcaaaactgtcaagaaaagaaataatctgccaaagaaataatttttcaaaactgccaaagaaataatcccctgcactgcaggccatacatttcaatccctgtgtctttaacccctttgttaagtttgtctcttccagaatcaaagctgtaaaactacaaatcattcttcaaatggagccccagatgcagtccatgactaagatctaccatggacccctggaccggcctgctagcccatgctccgaagttgatgacatcgaaggcacccctcccaaggaaatttcaactgcacgacccttactatgccccaattcagcaggaagcagttagagctgtcgtcagccaacctccgcaagagcacttgggttttcctgttgagaggggctactaagagacaggactagctggatttcctaggccaactaagaatccctaagcctagctgggaagttgaccacatccacctttaaacacgaggcttgcaacttagcttacacacaaccaatcaggtagtaaagagagctcactaaaatgctaactaggcaaaaacaggaagtaaagaaatagccaatcatctattgcctgagagcacagggggagggacaatgatcgggatataaacccaggcatcggagccggcaatggctgtcccctttgggtcccctccctttgtatgggagctctgtttttactctattaaatcttgcaattgcaaaaaaaaaaaaaaatccctagtgcccagaactatatatttactatatatttattgcttgaatgcatgtgtgaatgaatctccactaactatttctttagagtatcctatgtgtaacatgtcatggtgataaattcatccccactcatcagaataagagaagttggctaaaatcctagtatgtagggatggggataggtaatgaagaacctgacattcattcttacatgtaattacatgggtctcaagggaagggtgcaatgacttttgaaaaaaattcaatattcataacttcttgataaaaggtgtgttaggtagtatttacttcagggaagaatttatagtcctccaaatacacctggataacctcacctcagactaaatagatcccaaaccactacatttgcccaaagactttcttgtttcccacgtcttcatttttctgttaattgtgactccattccctactcactaggctttaaacacagctgtcagacacaatcactctttgtttgaattcatttagttaccaagacctactgattttttttttaacagtctctgtcttgtcacccattccttcctttccattcttagagcccaattttctagatcagggcttgtattctcagtctctaatacttcatgtgtaggtccaacttgtctccttgcatacatttttccctccagcagctgttatgaactgaattatgtccccacacaccccagattcagatgtttaagccctaaccccatgtgactgtgttaggagaccgagcatttttggaggtaattgtggttccatgagattataaggatggggccctaatttgataggactggtgtccttataggaagaggatgagacactactctttctctctgctcatacacagagaaaaggcggccatctacaagtcagcaagagggccttgctaggatgaattttccagcatcttgatctgaacttctagcctccagaactatgataaattaaatttctgtggttgtagccacctggtctgtggtatttcatgtcagtcataacagactaataaataggctatctgcccagtattctcagaattacatgcataaaacactaaactgaccctatgcttttcaaatccccaaggctgccactgcccacccccatgacttttaagtccaaatgctttagcttggaacctgaggccaccctctgtttcgtccccatagttacctgcccagcgtctcagcctttatattgtttaaggcaaacattctgatctcattgtcctcaaaacccacatggcattttctgaagccacagtgaagcatgatgcctttggggaactgcccgtggttgccatggctgcaaggtgagtctacaccaaaggatggcaggatgtgagtgagaggagtcacgttgcagacatggctccctcctccctctcttccttgttaacagagtcctcactgagtttagagaggagaggtgcccagatcagaggcaaataatgatgtctaagctgggggtcagcaaactattttcataaagggccaggtgaaggtaaacattttgggctttgtgggtgatatggtctctgtcacagctccaacattttagtgcgaaagtagccataggcaatacataaacaagggagcagagctgtgttccaataaaactttatttacaaaagcaattgttggactagatttggcctttggggcataatttgctactccctgatctgccaatcccagagcaatgacattgttgatcttctgaatcaagtgtagaacaactttcggatttcttgttatgtgagaggcagaaaactccatcttttaaaggtctttttaagctcttgctattcacaagtttgccttagaccagcagaatcagcatcacctgggagcttgttagaaatgcagaatctcaggcccccactccaacctcctaaatcagaatgtgcattttaataagaagccctggtgattggaaggtttactagagcttaagaagcactgattggagccactgttgattgaatgtcttattacttgcagatgaaagcacccctaaccattgctggcaggaacaagtcttcaagatcttatatgctttgctaaggactgtggttttgtcctgaaagacattaaagggctttacgtggggaatgaaatgatcagttttgggaggcatacaactcatctctttgatgaaataataagctcctaaaaatcagaatgtactaaagaaatatccctgatatttatcctactttccaaggccagccaaataggtagaccccaccactgccacaccattggatggaattcaaaagcagcctcgcctcttctataagacctgctctcctgtccatacctactgcctcaggccccaggaggagtctctgtttctggcatatccatggggcttaaaagtaattggaaggctgtaactccagcattgtaatttggcatttgagactggagaactttaattttagttatacttaacactgccatcccccagcttggttcaatttatcttctgaatatatgttcacctctccgataagactataagctactttggcctaagcaatcatattttaagatttttgcatctcttccataaggcttgccaagggctctgcatatgactgtcatgataaatacaaaattaattcttaaaatataagccatcatttaytgcttttccaagctcttcaaataatacctaaatgggataagcatctcgaatgtgaatatcattcatcagctaagttaaaaatagtacagtcaaaaggatccaaataacatcaaattttttgaaaggtggggcttttcatattgtttatggttaggttctaatacacccaaggaatggtttgaaaaagtattccrcacaagcatttgctcgtatcaagtcaccacatcttcctgtggttggtttatgaagagctaaaacccaaacaaacaccacctcttacacagtcacccagagtgttagtacttacatggagagagcacgtcataaaccctctagacacattgtctcacttaaaccatacaaaaccctagggttgggtagattattatcttcactgatgaagaaaccaaagtgcagactgttgatgtcaacttagtgaagatcatactggtagaaatttggtggtggtaagaggggacagttggaattcaaatccagatagttaagccctgagtctgcgctctgaaccattaagcagtgtctccataaacagagctttgctatgtcaaaggccaaactctcatcaccctattttcatctgcaggcatcatcagctgggattttcatgtgacaaataacctatgttaagccgagatatgttaaaaataaaatgttagaagccacttattctatggtcaggttcagtgagtgacagtttctatgtttaaagccttatcccattatgagttaatggtttggtctatcatgattaacactgggaaatatctttgaaatcaaattagaaggttttagttttgttttggcagttagttatcatagaaagtttttctctgtcatttcatggtctacagtaaagactgttaaaggagtacctgtaattatgatcttattgatctatttaaattagagagtttattacaaagcttatgaccatatccaaacaattaaattaaagcatggaacagtatttcaatgactctggggagcatagacagccaggtgggattattgaaaactgaaagtggatagttttgtctccaggtaattctgatcatctgtcctgattcattcaagaatttcaactcttattttcccctggattccaatattgactctgccattttctgaatcaatatgatctycaaaaatcacagatcatctctaacaaaggctctttattctccaagatgtaaataactatgactttgtgttgagcaaattgacaccaaaggattaccttttatatgccttgaaattatgtattaaataattgttcctagagattttttcccatttctaaagccaagaggcattaactattttaaatggtagtgaattcaccaagataagtttgtagagaaaaactagtggccctactttaagttgttgctacagaaatttcagtttttaataaaaggatatatactgtcttccacgagtcggtctgttaccaacaattattgtgtatgagtcctttttatataggagtgcatttcttttaattgtgtgcacatatattgattggttgtagaaagccgttcattcctgacatcctttttggctctttttccttcatttttctcttgtcacaagtcctttcatccagaaactcttttatccatccatccaattgctcaagcaaggaacccaggaatatcctcctttgaatgcaatcaataaccaagtcttgcagatcagatttccaaaatagaggtcaaatctaattcaatgtatctttaccactcttcccccagtctaagccatgataatttctctctctatgtgaatgtccacccctggagacagacacagggtgacactgtttggaccactgcagcatcctcttaaactcctccatccacttctgcaccatcatccattctccacacaaaagtcaaagtggaatatgtccctccattttttaagtcccccaaggcttcctgttgaccttagaataaaatgcatgcagggagggtctggctgttctctagcctcaccgaggcctttcactgcatctcagccatactgactgaccactttgtagtcttctcctctaccttcaattctgccaagacacccacttacccatcaagggcttgacatgtcctataggttgcaattccaatattttttttttaggagatctctctaaacttatatgctaaattcagttcctatgctcttcatcccagttcacagagtccttcctcatagagagcctttgtgtttgtgtgtttatatatctatctcttgtgtttatatataatctctttctcaatagattataacctccatgaaggcaaggacaatcactttctggttgatcccttagcgttggatcaggcacatggtaagccctcaattattatttgtagaattagtaaatcaatataatctgtaacacatggaatctcatgaaatacaaagtgaaggtccctttggaaaacaaaagtaacaattcttaaagataaatgtcataattcagaggcaaagttttggggatcaactacatgttaatacaggatttgtttctgtgacccgaaccaatagaaatggaaatataatgtgtttgagaagctatgtggcaaaattactcggaaaaaaagtcaaatataaatatcagtgtctaccataaacaacaaacaccacacaaagtggtttttcccaataggcgtgttccagcaatacatgtgcaacctcayccaataatccagcttctttcaggctccctgttgagcagaagcaagtctgagatagctcctttcccagagccaggacatgagatttttccagaatcagaaaattgccctacatgtcggggggaggggctctcacaagcatagtcatcagaatcaggacattggacatctttcaccctgtttacaagcatctataacaaagcagtttgacacttttccaaaatggaagttcaaggttaaagtcaattttatcttatttgcttacgtatgtacaagttagtggctaaaaagcagactgtccacatcctatacatcagtttgatcctctacaaccagcccaataaaccttccrtagcctttgtcaataatgttgttttcaatacaaagcgctttgtatttttacacataaaatctaatctggctttaaggcaggtattattatgcctattttactgctttagtggttgataccctagtgtctgtcagctccagactaagctgttaatactcaattttctgatgctgggctggactctgatatccctattatctccatgtcagctcccagttgggttctgccccaaaggaccgtgaggagagactggaaggcagaaggagggagaagggatttcatcctctctatttgcttcttgtgcrtggcagtgccagcggctcttcaccaggcagaagcctttgcccattccatcttccagcttctttctactgtccctgtaccagcctcattgcatcactctggtgcaatgtccgcagcacctggcagtgcctccttctcaacagaggggcaatgcagaccccatctttgcgcatgcttatatgcataataataaatgcacagtgaaaacattgtattcccacatctagcaataatagagttagctactcactgaatacatattgaaatattgctgcagtatgaccctatgttcacatgaataagacagctttacagaattataaagtgacatttcaaacctctgaattttccctacactattgattgttcagtyctatccatgttcctttctatctggaatacctgcccttctcccagacctggtccagacccctcaaggccaagctgcacattttcttctgtgaaacctttgaaccccatggcagacagaattagctgctccatctactcagctcccattattccctggatactcttctcacggacttgagagacagaaaacacatgcatgagcttggaaatggcctggcttggcttgattcttgacttgaataactcatttcctatgtgagtttggataagttatttaagtttcagttccttcttctgtaaaatgatactaacttctcccaaatttctccctcctgcatttgtggcatctccatctttccagctgctaaagcccaaatccttggatkcatcattgactcctccctttgtttctcccccacatccaatccaatagcaaatcccagtggcttcactttcagaacataaccagagtctcatcactacttaccacctttactgctaccattttgatctgagtcatggtcacctttgcctggctcattgcagtagtctcataattgacctccacaatctttctctattcccttctggtatacagcagccagactgatcacataaaaatataaatttgaccactttcctgtccagtggaaaaccatcttagagtaaaagcccaaagttattccaatgacctatagagcctggaaagacaggtcccgtgtgacttcgaactttagttcctgccaccctgctcactccacgtggtcatactggcctccttcctgttgctggagctggccaggcaaactcatggctgagaacctctgcatttgtggttccctatgtctggaatgatcttcctcaagatagctacatatctttcttccgcacctccttcaagtgtttgctcaaatggaaccttctcaatcagaccttccctgagcatcgtatttaaaatggaaacccatctcccaaactccttatctctcttccatgctttattttggaggctgtaatacttttttttttttatcactgtcaagtggaaaattattttcattgcaatcaatggcagcctctgagtccacaactaggcaaactcttccagaagggatcacagatcaaatgaaggtgatggaatcacatggtttattaaattgactcaaattcctgctggagaagtgggggtgagttaacatgccccacacggcacacaaatgggtaaaaaccctaaccaggacaatgttcagatgtctgtttctttctctaccacaccagcctttcctggcagtcactaggaccagcactgaagttcttttttttttttttttgagacggagtctcacactgtcccccaggctagagagcagtggtgcgatctcagctcactgcaaattcttcctcccgggttcaagcaattctcctgcctcagcctcccaagtagctgggattacaggcacccaccaccatgcccagcttatttttgtatttttagtagagacagggtttcaccatgttggccaggctggtctcgagctcctgacctcaggtgatctgcccacctcggcctcccaaagtgctgggattacaggcgtgagccacggtgcccggcctagcattgaacttttcagcatggagtctcagcaggtggaaacggtatgaggctccagcacatgggcgtggctggtgcttgccaattaacctgctgagcagcaagattctatttggtttttgggggcaaaggtcactcaaggtcagaataaatttcacaaatgagtagccaaataaagaactcatgaatatcgagtgtctcacatatattacagtgttatgaatctcaggtatcctggcgctgcccttccttcctcttcctgtgtgtatacgtatgacccacttgatctttctaacctgtctctcatgctgctaactgatcttcctatacttaaacatgagtttcacttatttcagttgatttcttctttagcagaattgaatattctcaaacaatactaccaatgcatattatggccttctgccatctcacattttctacttactttattatctacctaactaaagtgccatgaacacaagaattttcatttgttttcttcaccaatgtacctagatgtgtacttaaaaaataattattgaaaaaaatgaaagaaattctgaaaaccatgaggcttaaatcaaataatatttgaattgtactagaacaggagagaaaatgacttggagcaggatgagaagrtgaaattgaaagcccatgctatggtccctgccctgctgatgtcaatctcttcccaggcccatgggtgtgggagtgcttagatgctcattctgaaattctggagatcacccattcttctggaattgctcacttttctttctatgctctccaagtagctgttctttggcccacttgactcacagtcaaactagtttcaatcttgtactcctgaaacatttgtttaatgaatgaatatcctgttacaggttgccccaggacttcagagccctgatgaggactgatacttaaatgacatcagatattaaccccaatgagtttgtgcttccttcaatctgcagggcttcattcaacctgaagttgccccctggagggccctgagcacatccaggcctaagccttcgcgttagtctgctcaggctgctgtaacaaaagatcgtagcctgggtggcttaaacaacagaaatytatttctcacagttctggaggctgggaagtcaaaaatcaaggtgctggctaattcggttccctggtgaaggctgtctttctggcttgcacacatttgtcgtcttgcaacatggtcacatgcctttctttggtgcacgttcacacagagagagagagaaagagagggagagagagagagayctcttccttccataataaggtcataaggccaccagtcatacaggattagggccccacccttatgccctcgtttaaccttaactacctcctaaagacctgtctccaaatatagtcacattgggagctaggacttcaatatatgaattttgaagggataaaattcagtccatagaagacctaatttcttcttcccgcacaatgtcactttccttttttaatgttattattaacttttaaaaaatgtatacatctcctgtaaaatccacattttaatcctttgttattcctggcttgcttcactcattgattctacctacccagcccctttagacattaaagtttttatccgatgcccattgatttaaccagggactatattttccaarctgaaactcaggacatacaacattatcactatgaatatgcttatggaagagtagaacaaaaagccagaaattgggattgtcttggaatagtatggatatgcagaaaatgatgataaataaccgaattctccatatttgtatgacagtgattgagaagagtattaatgtagcttgatgcttggtgccactcaaacccaccaaaagttctatttgcccatttagatgttttgatggtgaggagcttgttggtgttgggctgtggaagatacaaaggttgaagacagatgctgttctccatgatagagctttgcaagttttctttggcccatgatgtaaagcaagaaattttactttacaaccctgcagactgtgatgcattctgatctgttctattctattctattctttctacaatgggtgttatrgcctacataattggttttcaaaacatgactctattgctatgtgcattggaaaaaacacagttcttgtgggctgggtccaataggttttggtttcctttctgttaaaaaatattttgattagcatgaaggtctttttgtttgtttatttttgtgttttaatacatgtaggtactagactagtatctagaaataatttcatgctcttagaaacgtatctgctggaacttttctattcacagatcagagatttttggaactggaaggaactgcaggggtcaagtcagaatacatggctcaggagtctttatgttgaagctccagtgtttggatgcagtgatcttaaaaacgcaattcacaaaaattgttctctttgttttttgactcttctaacagaactcatcttcaatttagtttgctaattgcctgtgtgccatgatcttgttctcctttgcagagctcacaggatgggtttttgttttgttttgttttgttttgtttttagtttccttgctgtttttccaggtcacagcaccgcagtcgattggtgattgtggtttgaggtcacctacagaaggcggggcggggaacccaaagattttattgcacacctcaaattgctctctgatgacaccaagagcgtcaaagtcctgaggccgagttgtcagtgaacattcgccaggaaaagcaggggtgaagctgcttatgggcgaagatgaatcccgtgctgccatctattggtaatgtcatgaaacagcaatttttaataccacctgatttttaaaaaatttgttttggggggaactatagttcactgttacctgttctccaaatttatatttcccaagaagtcttgatttcaagtgaaggaatctgtggatgggaatgacccatctttaaccctaatgaactttgtctgtaaagtgaaccaaggggacaggggaattcccacaccgtctcattactgcccaagccgacacacttccctttgaggatggtttgagggaaggagggactgtctgcttgtcagagggatttcaaagaacacactgttctcatccttcagatcttgccgattgcttcatgggctgcccgagattaccatatgttttttgcaaagggtgacttcaaaacaaaacagaatagaccctctctgttttgaagcctgttgattctaaatgctacaccattgcaaatagttctctgggtttatttattagcaagggaagccagacatcaaggaccaaccacttccattttaaaaagatccctgttcattaaaaataaaaataaagtagcctggagtgcagcggggtgatcatgactcattgcagccttgacttcctgggttcaagtgatcctcccgcckcagcctccactcccggttagttttttgtattttttgtagaaacaaagtctcgcttttttgcccaggctggcctcgaactcctggactcaagcgatcctcctgccgcagcctcccaaagtgttgggattacaggcgtgagccactgcacccagcctactatctttatcttatagaaagaaaagaaaggaggaaactgaggcttggagacaatggtttcacccaaatatcagtggtgtggaggcagaaaaacctattgtcgacaagaggagttgatggcagttttttggcaaggcctagtaaaagtacccctggagacttcacatgttccattagaagaaatagagctgtcacccacatcaagattcagaacactggtgattactaggacccrtttggggggaaaagtttgccacttmggctgagttggtccagtattacatggaacatcacaggcaattaaaagagaagaatggagatgttgttgagcttaaatatcctctgaactgtgcggatcctgcctctgaaagatggtttcacggacacctctttgggaaagaagcagagaaattaactgaaaaaggaaaacatggtagctttcttatacgagagagccagagccaccctggagattttgttctctctgtgcgcaccagtgatgacaaaaaagagagcaatgacagcaagtgtaaagtgacccatgtcatgattcgctgtcaggaactgaaatacgacgttggtggaggaaaacggtttgattctttgacggatctygtggaacattacaagaagaatcctatgctggaaacattgggtacagtactacgactcaagcagccccttaacatgactcgtataaatgctgctgaaatagaaagcagagyttgagaactaagcaaattagctgagaccacagacaaagtccaacaaggcttttgggaagaatttgagacactacaaccacaggagtgcaaacttctctacagccgaaaagagggtcaaaggcaagaaaacaaaaacaaaaatagatataaaaacatcctgccctttgatcataccagggttgtcctacacgatgatgatcccaatgagcctatttcagattacatcagtgcaaacaccatcatgcctgaatttgaaaccaagtgcaacaattcaaaacccaaaaagagttgcattgccacacaaggctgcctgcaaaacatggtgaatgacttttgctggatggtgttccaagaaaactcccaagtgattgtcatgacaatgaaagaaatggagagaggaaagagtaaatgtgtcaaatactggtctgaagaggatgctctacaagaatatggggtcatgtgtgttaggaacatcaaaggaagtgctgttcatgactatatgctaagagaacttaagttttcaaaggttggacaagctgtactccaggggaatatggcgagaacggtctggcaataccactttcggacctgaccagaccacggagtgcccagtgaccccgggggcatgctggacttcctggaggaggtgcaccataagcaggagagcatcatggatgcagggctggtcgtggtccactgcagtgctggaattggccatacagggaggttcattgtgattaatagtcttattgacatcatcagagagaaaggtattaactgcaacattgaccttctcaaaaccatccacacagtgcagtctcagaggtcagggatggcccagacagaagcacagtaccgatttatctatatggcagtccagcattatattgaaacactacagcacaagattgaagaagagcagaaaagcaagaggaaagggcacgaatataaaaatattaagtattctctagcagaccagacaagtggagcccagagccccctcccgccttgcactgcagcgccaccctgtgcagaaatgagagaagacaatgctggagtctgtgaaaacgtggacctgatacaacagaaaagtttcacatgagaaaacctggaaaacttcagcacagaaagtccacagatgtggactttcaccctctccctagaaagatgaagaacagacacaagaaagtttatgtgaagacagaatttggatttggaaggcttgcatttttgttgactacattttgataagcaaaatttgaaaccatttaaagaccactgtgttgtctctttcagtggctggctggcagggtagctagacctctcacataccaagagcttgaaagcagaagtggccaggcctcctgaagacttaagtccagaattgtcgcagcatcccttttactgccctctgttgattatgataacgatgaggattttttctaatcagaagagagctggagtatgccctctacttactacacaagttacaagcccggctcagattcaagaaaagggtatgaagtggaggtgcagttaattgggggaccactagtctaaaaaacagtcacaacccgtgccatggaaaaccaaggatattagcaaaagtaggagttgccagtgaccttgggaagccgaagctgcttacagtagctgggacaagctgaaagtcagactgagaaataaaggaggggacttcaagaagcttcctgaacaatttctgccagccctgagcttatttttggaaccagcacttggggaaactgatcttgtgaggatggatgtttttaggaacacagggcttttgagagcagcaccaccccactggggcacccccagacttgggaaatgtgatgctttcttaatgtcactggttttttagtcaggccacagtgagaaggaacagccctaacaggcctccagccaggttgaacgagctcatttttgttttagccaaccggtaagatttgctaatgttctaccttaaatgccttttccaaaaacctccctctttgcctcatatgttgaatcatcattcagtgcagatatttcaatgaaaatatcattggttgacttttgtaacggaaataaaatgctatgacatctttgccatgaaaaaataaaaataaaaacaaaaatgaagacatacttcaatcaaattaatgaaattctatatttaaaatgtctaggctgggcaaagtggctcaagcctgtaatcccaacactttgggaggccaaggtgggagaattgcttgagcccaggagtttgagatatgtgcaacaagataaaacctcccctctacaaaaatcaaaaacatagctgggtgtggtggtgcacacttttagtcccagctactcaggagattgaagcaggaggatggctatagcccaggaggtcaaggctgcagtgaactgtgatcgcaccactacactccagcctgggcagtagagcaagacgttcgttcaaaaaaaaagaaaaaaaagcttatattgaaaaaaatgattatttttatgaactgcaatgcaatctaactgtgttcactattgtacaattgtaagatttatttaaaatattaatttataaatctacatagcaatggaatgaatagccatggttttttcatatctatctattatctatctatctatcatcatctatctattatctatcatctatctatcatctacctattatctatctgtctatctatctatctatcatcatctatcatcatctatctattatctatcatctatctatcatctacctattatctatctgtctatctatctatctatcatcatctatcatcatctatctattatctatcatctatctatcatctacctattatctatctatcatctatctatctatctatctatctatctatctatctatctatctatgctgtgtacatgtatatgccaagcactctactggatgctcaaatatatcagtgaacaaagcagactaaaatctctgcctctaagagcatacaattctaatgggggaagataaacaatgaataaactaaataagtctgttatatagagaggatgggaaatagtaataagtgctatggaaaaacagactgcagggaatggcagtggggaatgtgtgcagaggggtaggttgtaattttgagttggatagtcagggcacacttcatggagaagatggcatctgagcagagacttgtagttcatgaagcagggagccatgtggccatggggaggaggagcactccaggcgaggggagcaagcagcccatgcaaagagcctgaggaaggagagtgtctggaataataaaggagtccagtgtgctggaggcaaggaggtaggtggggcctagaacatgattcagggaaggtggattgtgaattgccttgtgggttttagggaggactttggcttttactcttgagtgcaatggggaatcattagaaggttttgaacaaacaagcaatgtgatctgacattcattttaaaagaattatgctagctgctattttcagaatagactgtagggagcaagaatagactgtagggagcaagaattatgctagctgctattttcagaatagactagggagcaaggacaggagtcaggagatcagttaggaggctgctgaaggcagccagaggaggggtgctggtggcttgcactgagggtatagtggagttgatgagaaatggccagattctgcatacaatcttaacatagaactagcaaaatttaagtagagattcattcattgtgagacgtgagaaagagcagagtaaagggtgacccaagacttttggcctgagtactggaaaatttagttggcctccactgagattgaaaagacagaatatgaggttgtttcggggggacttagcaacttctctcagtcctgtcagagggtcaatgcacctgaacctacaacctcacttggacacactatcaagaatgtaaattcacagtctttttgccagtaaatcccccttagttaaaaggccttcctggccccattttcacggaaaggctgccccgttcccccatgactaacagacgccccatgatactccctcatgccttcagagcatgcatttcagctatgatacttgcgtgatgatttgcttacttactatttctcctgaaagactctaagtgctaggcatgagaggactatgtctgtttctgcttccaattgttttctcacctgctggacagacctggcaagtaataggtattcaataactattgattaaggaaataatgaatcttagtaagactttagggaccaaacaggaccttcaggagcccataattttaaactatgggattcccttgggactacctaattaccctgggattatttagtaactcagagcacttaaggtcagggatttttgtgtgccaaaccccagcaatggtgtggccctgttctaacagggcagctgctctgagctggggaaagtccaggagttaggtttgcacctcttgagggagcagatccactttgctcaccatgctttgctctgggtctgacgacttggccctcacgtcacttgctctcattccttctcattcagtgtggtcttagccatcttcacaccagcagttttccatggtaaatgcactgatgagggagagcagtagtccctctgcttttcatcccaactccctgcttctgctctcaggacaacaggcccggcctggatgctagatcttctgtacttcttaggactgattctagaacctcagtaaaggatgggaggtgtccagattttggtaaggaatgtacctcctcactttcctcttctctgcctcaaagatatccctttccttgtttatcacaccgacgtcaaatgttctcttgctcttagtctcatgatcactctcaagtttactccaatgcaggatttttcaacttcaacaccattgacattttgggctggataattcttcattgtgggggctgccctgtgtttatagggtgactgtgttctctgggatgtttagcagcacctctggcttctactctctagatgtcaatagcactccttcacagatgtgataatcaaagatgtttccagacatgactaaatgtctctgggagccagtcgcagcattgatctaaggtatggctctcttttgtgaaatgtccttgacatctggccccataaagtctcacttctcctgccctccccatagtccaacttcttacgtaatcctgtttttttttttctatgatggttttggactgatgagaaggggggtgctggcttctctttccactgacgacatcagtatgtgaccctcaaagctgccgctccaatcaccatcatccctgtcccaggtccttgatgtggttaagatatgagaaaagtactgctctctaacagactgcctgaacttttacccattctatgattatgtctttattctctgtattcagtattttccttgttaacttaagaaatattttttgttgatgataatactgatgacggaaaagtaaaaaacgttgttaggtgccaaaataacctttggcagataattctgggaaactccccgattagtgggaaaattactgggttttgtatgatactacaagctttcactaatcctaggaagagagttgttatctgggctgcaaatggagaaatcagggaaacaatatttgttataaaatgttagatgaagggtgtggttatgtatgaaatagagctcagttttccacattacaatcagagaaataggagctcaaagaaagtgagagctgcttaagaaatcaactaatacaattctttcctttaggaaataacaaaataaaagtcagagagaataattcctttgcctaggggatgtaaatagcatcagggtctggatttaaacatagacctcctaattctctgttctaatttgtgataaagttttatcaatccatggcaaaataagaaaaataagatcaatttgaaaaacatttttctgaatgtgaattagttaaat

SEQ ID NO: 93348 - DNA, 12701 bp, Homo sapiens
ctgggattgtgtggtgtttccagtactgcactcagacttagcagccgtctcgtgtaggtttcatgagaaaatggtttctccatcacagcacaaagaggtccttggtgcttccttatgattctgttcagaaaacaatacagaaaattagtcaactattaattaatcatgaggttaaggcactggcatcaaactgcctaggttaaaatgccagctgtgtgatccggagccatcaacttgatctctctgtgcctcagtcttcccatgtttgaaatgggaaaaataagtatagtacctacctctatgatccttgcatgaagcaggtgaagtgaccaggtctcacttagcacctgaagagtactcaataaatgtcactgggtattattcctggctgtgccaccatgccccattccaagttaagatcaaattaaacttgaagtttaaggttatatgtctgccttcttaagtttcttttttttcttggactgtcaaactttctccctgaacagtggtttttccagacttaccaatcaaaagactttacactcttcgtgattactttgaaaatttccttagaaaatctctttttatccatccaaagaaattttgacatacaaagagtaacattaatatgtaaattagcatacagaaaaattcattttggtgcctccgaggcagtatttttataaatacagaaacataattatgcatcctctagaggactaaaaataattatacaaatttacaacaaagcccaaggctgtgtttccttttaactgactgtttttaatatcatttaaatcttgttagaacttaattaccaaatctctcttgtaataattcaggtggaagatataaagtctaaacttgccattcagaaaacagaacctcatcagacaaacaaagacatttaggcactgattgcccgaataggacaacggaagaaattctgtcaggatggagccatgttgggcactgagacaaagaggccctctgagaaaaaaacattaatattcatatatgagccatgttaattattttaatctataatttcttggaagcacatgttattatcattgtggattataaaccaaattaaccatttctccctctttcattttccatattttccttgtctttttcaaattaaggtcaatataatttcggggcaacattcttttcataacaatttaattactccttcgaaagtctgtctagaatatgtgtgcgtgtgtgggtgtgtgtgtgcgtgtgtgggtgtgtgtgtgcgtgtgtgtgtgtgtgtttcatatctaaagatcagcttatgttaatgtggaaaagaacaacgaacaaagtcaggagctagcgtccaatgtatactccattttaaagacaataatttattggcacttagaaaaaatgggctccttattatgaaataaaaggcacaagaaacttgaacatttgacatttgaacacattttcttttcttttctgttttgttgttgttgttttgttgttgttgttgttgttgttgaaacagcctctcactctgttgccctggctggagtgcagtggtgcaatcacagttcactgcagccctgacctcctggacccaatcaatcctcctgcctcagcctccccagtagctggaagcaaacacattttcatttaccactagttaataatattatctaagacttttatagctccctggaaaattaattagtcaatgtatgctataaagactaataatttgttcatatgcggtatctctaacgtaggttgttatccattatagcaaaacctgaccaattaatttttcaaggatcagttccatatatgaaatgtctatacaaagtcacaattcattctagtcactacaaaatatccgtcaattcagtgaaaaaaatgttaatcaaaatgattgtttgagttattgaatctcattttcaacatttattttggttttgtgtaggcatataaatgtacatacatttgtgcttataatacatggatttttttcccatttcaatggctttaatcccatgggaagatatataattccacacttatttatatgtaatatacttgatatgtgtgtgggtaaaggccttgctcttgcttcttgtcttcaaggactttttaaaatacctcctttgggctaggctcagtggctcatgcctgtaatcccagcactttgggaggccaagatgggcagatcacctgaggtcaggagttcaagaccaggctggtcaacatggtgaaaccccatctctactaaaaatgcaaaaattagccaggcatggtggcaggtgcctgtaattccagctactcgggaggctgaggcaagagaatctcttgaaccttcaaggcagaggttgcagcgagtcgagatcatgccactgcactccatcatgggcaagagagtgaaactctgtctcaaaaaaataaaataaaatatctcctttgaatgaatccaaaggaagtatcactttgacagagagacccggaatgaagcctccaatggaatgggtagatttttctattttaactcatcttctttcactgatgtgtgattctttcaaaagtcctccctcttatattatattctccttttaacataaaattacatcattacctccattcaagcaatatttaagccatttatgatttgggaaaattccaatcttgcagtgcttaaatttccaagtcatgctcttggctgtcatttgtaactggtccgactgggatccaaaataagtaaatagacctgtacagatttcatatctggaggagggtctaatgagcaataaggggaagcaaaaagattagatcagtccccatggaagctctaagcattgcatagaaataagtgcaggatgataactgaagagattcaagcacatgagtttcctctcatctctttttgttagtgatggcagagtgttactcaaaatcagaagactaaatatattgccttggctgctaaaaatgaaaatacctaaaaattctttctgcagatactacacacaagccttatagcctgtgaccatctttcgtcttggccagtatgagaaatcatccatgatatctgcccattgtacatgtctattgcatttgccagctaatgtttagtaactagggctgtttgttcttctcaaaaatttgaactttctccatttgtgtttaccttcacatccaaactcgaacaactctgctctgagttaattccccaatttcattatggccacactggggaaggggagaggaatctgtgtacaaaccaccagacagaaaacaatgggaacaggcagcaatccaagagctttggcatgatttgcaagagaaaaccagctctgattaatgctatcaaaatgcttgtctttcctgtgattgatattccagccycttgttacaattattgatgctggtgaccactattatgagagtctttttatagtttgctgttttggagggaggttgcatggacttcaccagaacatttgcacacctgcctcaatttaacctaaaacccattattttgcaaacaaagcatataaacccaacatagcaatcattgtttcccatattctgctattaaaacactcctgctcatggtaaggagtagatctcctgctggcctactataggaatagtgtgtaaaaggcagcgtggagggtaggatgcaccatttgaaggttctttggcatatgaaacctggcaaaccaaagacatcatttgaaatggtattgtgtgccctggggtggtgacattacagcaggctgaaatcagcaggtattaagttttatgaattgctgatcttcaggagtaagtgataaaacagtcacaagtatctaaaaacgcccttgccctgaagagcttgccctggataccacaaatgtgcctagaaacactatgcacctctgtgcatggggtttgtttgtttgtttgttttgagacagagtctcactctgtcacccatgctggagtgcaatggcaggatctcaccgcaatctctacctctcaggttcaagtgattctcccaattcagcttcccgagtacatggggtttttttttataagtttgatatgaaatgtaaacaggttcattttcactcttagattatcccattattctggttaaaataattaccagcctaacctttgtgttccttctcatttaaacttgactgaactaacaacttttcctagtttcctgcctctgattcttacaggattggaatttttggtcttcctgtctccccagggcaatattttaagttatagaagccagaaaaccataaagagagaaataaagtacattttataagtgcttttccagtgaaactcaaatcatttttcttgtaatacataggtttactaaggacgtttaaaggaactggtattttaaaaggaagacatttttaaaaataaacctatataccttccaaaagacttactttctctaaagggtatttttgttaaatagtagttaatataagtgcacaggattaagctccctgctatatagccaggacttagaattgtgcacagtatatagtagacgttcaacaatacctgaatgaattaatgaatggaactgacagaaataagcctttgtagaggaatgttctatagaagtttttgccagtttggattgatcactatgggcagtcaaatcttgatgaaaatagataagtgaggtgcacttagtctagatatctatctgtaccaatatcagatgtggttttctctttctactttttagtatgagattttttaacatataaaaagtgagaagaagaattatagttcaaaagacggcaatcatatttgctttgtctctgtgtgtgtacaacttgacagtaatctacaaacatctgacactttgcctctaaatacttcagcatttatctcttaagcgtaagaatacatgatgatagttctttaacgaaaatttaagaaaacaaaattaaagaataggattgttggggaatgactgatacaatatataagaactctaagtcaccaaattttgagcctaagtgaatacagcaaggctgaatggtgggattctgctcactgttcccagtttcctacaaatggaaatcctaagctgctgtgaaataatcttgtctgattcccacccaaggcctctatcatatctgtcatttaggctcacgtgaagtgctcttatgcaccctttactgctctcagccctcaaagcttccttgtaccatggccctcattaggatttgaaggaaattttcagtctctgactgcaatagcttcaagtcctagtaaaggacagtctgcttatcaactgtatttataacataagatttgctctaatgttctctactgtacatcgctgccagttacttatagctaggaaagactttttccccaccgttacaggcttagagctttcccctctctctctaagcattctctctgaatgcgtatattctatattttgcacggaaaaggagctcccagagtgagatctcggctgaaatggatgctctatgatgctgaatagaaatattatctctcacataatgagcacctccatgcccaaactccccattccccatctcattagagcagccaagagccttagactttaaccattgttctccctatgttatttgagctgcatcatatgtatgcgtgttctcaacaacatggatgtcagcacaacaaatatgggctatatttaattcggattactctgtgtagactggagctactgtttgcattttgactcagatgttgaataattacataccaattcattgaagacctgtgtccaaggttattttctactaccaaaggatttggagaaatgtatgtttctccatagcatccctctctaacttgtctgggaatttatctggaaaatgaawgtgggaaacagtagtagcaaggttgagggaacaggactccactttattccataaacattcactgagtgctttgcagatgctgccgtcgggagctctgtattaccagccatggtcaaccccaccgtgttcttccacatctctgtcgacggtgagtccttgggccgcatctcttttgagctgtttgcagacaagtttccaaagacagcagaaaacttttgtgctctgaatactggagagaaargatttggttacaagggttgctgctttcacagaattattccagggtttatgtgtcatggtggtgacttcacacaccataatggcactggtggcaagtcaatctacggggagaaagttgatgatgacaacttcatcctgaagcatacaggycctrgcatattgtccatggcaaatgctggacccaayacaaatggttcccagtttttcatctgcactgccaagtctgagtggttggatagcaagcatgtggtcattggcaaggtgaaagaaggcatgaatattgtggaggccatggagcactttgggtccaggaatggcaagaccagcaagaaggtcaccattcctgactttggacaactcgaataagtttgacttgtgttttatcttaacyactggaccattccttctgcagctcaggagagcagccctccaccccatctgctcgcagtattctagaatctttgtgctytcgctgcagttccctttgggttccatgttttccttgttcccttccatgcctagttagatggcagagttaagtttgtgattatgaaatgaaaactaaataagaaacaaaaaaaaaaaattcacttccaggcactactgtaggcactggagatagaaagatgaatccttgtccccaaaactccatagttagtagaagacactaatttcttaagttggtttactccaagtcattaagctatttagtctacttgaagatgcaagaaattattaaattagtaaattaattacaattttactatctggcagcccttgggttaaatgtttagatgcattatcgccctatcagcattcaagtccacaaagacctcagacgccagaatctaaacagatacactgtactgttttctactttcttgcttgataaaaaagagacaattttgcctgaaataaaccctgcgaatttgaggtcatgaagcccgtatttataccaattgactctttcaagttgggaactctctacaacgcatatttctctttccacaagtgtcagatgaaggtygggcagttggtaatttggccacatgatagtgtgggtttgtgtgtggatacatgtgtgtctgtgtttcagtatgaatcacagtgattctggttctcttaaaaagcaaaaagtaagtgaatgacacaagcacattatttatgtggaatatttatatccacatatcccatataagrgtagatttgggtcagacaaggctttctgtagctgtcctgactttttacttcacgctctaacttccatgttcccacaggctatcagtgagaggaacatgtggaataccactcacccactgagaaaagaccacctgagatgctcattttattgcaggacatgaatgttcactgaagaacccttgtagttggtcatgtcagcttctaattcttatcataaggctctaagactaagccaagaatcaaaataatacagccagttttaattcatgggacaactaacrattggctgaaataagatcccatttccagtgccaaatgctgccaggacaacactaattcctagcacagtgcctgccacttacttaacatacaaatatgagaaggggctgggggttgactagaaagatcatcaaccttggggcagacaaatcaaagttcaaatcctaacttcttagtagtgtatgaccttaaacaagttatctcatttcggtgaccccagctgtgaggtactactatgttattctactttatctatattcccccaacataatcctgtccctcaataaatacactttgatggaaaaaatagatgcttactactgattgattggttgccaattcaatcaacaatcaatgatattatgccagttaatggtacctgtaagaattttggaagcatctttatcatttccatatttgtccctactaataatcttatttatagtatcaaaatctctcttaagaagccaagaaaagtgcaaatatcaacctgttttatacaatttttaaatggattcagagaagtgatgtcacttagtcaagttgctataaaatgattaaccctagagtgaataacgagtttcttattctgaattaaaatcctgtgctctctccttagtttgtaccaagacattgtagattctacttcacttcctgctgactcgagtaacttcaagacataggatgtgagaggtgaaaaggacctcaggtgaaacgactgaggtctacagaggatgagtgacctggctcaggtcacaagggaggtaaggaaaatagtcagaactgggtcctacctcctaactgccaggccaggggtccttctgaaaacccacatgatgaaaacagagaaggacccctttgcccttcatgagcaatagagtcctatagccatagtgaacgagacttgaaaatgaaagtaaatggaaagaaacggaaaagaagcaactcttggccatcccaaccttttgttgtcaaataagcctttagaatctccctgctcagtagacccttgatggggataagacagacgcagaagcccagggcagctctactttactggccaacagttaccatgaaaactaaaggaaagagtggtctggccatttcctgaagtttgtaaaatgctcacctctttctttctccaggtttccctgaatatttcttctttttatcagcaaaagtttggttcatgtttgtcaacacttattaggatagtcagtgggtggggacaaaaagcaattcatccgtctttggcctagttgcagataaacttctctcagtctgtggcctagttgctgataaatttccctcaaccgtgatgactatagcaatattataattagctatcatagagagatttactctactctccaccaccctacccatrgggtgtgaccagcctcaagagggtcttcaatcatcttgtcttcctcctgycatgaygtctccagcctcaggctagatcagctgcccggagatcttgccccttactgctctggactaatctcaaatacctcataccaataccagccatttgtggctgcttcccgctacccaccctcccaacacacactttaacctgggtcaccagcagatcatccctcaacagacaggtattatctaatctaacacaaaccctcctctcttcccaagcttttccatggcacccttaggaactcactgatcagcaaactttcctacacctttttccacttctaaatgtatcttcctatgagatcctgtcatttacaacaacatgatggaactggaggacattatgttaagcaaaataaaccaggcacagaaagacaaacttcacatgtccttactcattcatgggagctaaaacttaaaacaattgaacacagggagacagaatgatggttacagaggctgggaagtatagcggagcaggggagtggggatggttaatgagtacaaaaatgttagatagaatgaataaggtctaggatttgataactacagtcaacaataatttatcgtacattttaaaatagctaaaagagtataattggattgtttataacacaaagaaatgataaatgcttgagggatggataccccatttactctgatgtgattattatgcattacatgcttatatcaaaatatctcatgtaccccataaatatatacacttactaagtacccataaaattttaaaataaaaaaatttaaaataaaaataaatttaaaaataaatgtatcttcctgcccagggaagccaggctgtcctctgaggattctacttccagcagccctctcagctaaagactgcctctcctcttccccaagcacctgaaggctgggagaggggtaaatgctcatctggtgcccccttgtaacttctcaaatgtctgatcttctccttcaaaaaccccagcttttttgaagccaatcaccaaactatgcagcctcacaagcctctcattgctgtgtgctggctgcctcctggttcatggagtcatgggtgatgtcagcttatgacttactgccataagccccatcattgactttggagtcaaccaacatcctgagactcacctccttgtcctcctttgctccagtgaccttttcctccagcccacctcagccattcactcacatggtcgttggtctaggtctagcaaaatatcatcttcaaactagtgttccactatttcgctagacctagaccatgtgaaacctagaccctgccattgccaataactgcagcctttggctcccagacaccatgttctccttgttcatctccctgacctccttgctcatctctctgacctctgaacattggtatgcctcttgtattgttggccttttctctcctctattcacacacattcctgtaaagatctcatgcagtctcatggcttcagatgagtttcaaatttttttaacttcagtataaaatagaactgaactagagctcagaaccctgaattctagtctcatacagccaactgcttattccacacctctgctttcaagtctaaaaggaatctcaaccctgacatgaacaaaaccaaaacctgatttgaaaccaaatctaactacccctcagttttctctacctgagtaaatatttattccaaccttccagttgctcaggacaaagttcttagactctcccttgtctcctctctgcctcatgtcccacttccagcccattggcaaacacttcttcttcttccttcacaacacatccaaattctggccagattctcttctccatcgccagcactactagccaggtgtaggtcactatctgctttcacctggattattgcaagagcttcccagctggcctccctccctcgatcttgtccctcttctgtctcctctcaacacagcaggcatagtgttccttctaagagtatgtctcatctctgttccagaccctccagtggcttcccatcttacacaaggtaaaagccaaatctttgcaatgacctgcaaagccctcctcaagctggcacatgctccatgcaatctgatcccttccccccatcatgtctctgacctcctctcttactactcttcccttgcagagagtatgagccctccgagatacccagggcacctcgctttagccacaggcctaccttgcatctgttgtcattctgcctggactgcacttcctgagatatctgtatgtcaattccagtcccttctttccaacctttgctcaaatatccagcccaggctggagtgcaatggagcgatctcagctcactgcaacctccacatcccgggttcaagcaattctgcctcagcctccctagtagctggggttacaggtgcacgctgccatgcctggctaactttttttgtatttagtagagatgggttttcaccatgttgcctaggctggtctcaaactcctgagctcaggcaatccgcccacctcggccttccaaactgctgtgattacaggcgtgagccacagcacccagccgtctattgtacattttattctatttcctgatttataaagtccatttatccaaatctgctttccagagctttatttttctgaacctttatttgaaggtttatttatatttttactctttagctttttacttttattttttaatatgcatatccagagttagaaattttctctcaggtctgcaaccaaatctaatgttatttgatattatatggaacctgtctttttttatttttttattgtggtaagaacacttaacatgaaatctacgctattaacaaattttaaatatacaatgtaataatgctaaccacaggcacaatgttgtagagcagatctctcagtcttgatcaccttgcataatggcagctatacccattgaatagaaactctccatttctccctctccccactccaactcttcttcaactcaactaatcgcttactgtacccccatacccaagcggctaaatgttgctggagaaaagtcacacaaccaaggctatcaggacccatttcaaatttatgaccaaaaatcttcagtgagcactcaacactatctgacaactaaacttccctagtaaattcattaacctactcccaagatgactattacacactttctcctcagtcctcaaatctccaacatctcctcccactcaacttcagccgaagactttgtcrtatatttcatgcagaaatatagatgcaatcatgtgaaaaccatttcaacttcccaccttcattccacaagcttattcatatctgtagtcacatgctctggtaaacttgtgccctatttcccagcttgctctccttctcatgagctgggctcctgaaacagtttcttcttttctgtatcatctattccttcctaaactaaatctttaagcactagctcctccagcaattttttttataagtctcttctctggctacacttttttctttagtgattccaaaagcccccatgtcttcaaatatcatccaaatgttgatgatgcccaaattcattttactagtccagatctctttcctgaggtttagatttgcatgtataaatacatctttattacatctctgtacgtttaataggtgtcttaaattaacacggctga

SEQ ID NO: 93349 - DNA, 12568 bp, Homo sapiens
tttgtttagaaatttttgaattaaagaagctagttaagaagatgaggaacctgcatttaaccttctaattcatttagaaatgtatagaaagaaatgtatagaaagtatacagaattttttttaataacaagattcagcttttttcttcacacgtagtttacccaaaactgaaaagttaagtcagaggctatcgccctcaatgcctacactgtttttgtttgagtatttaaccgtaaaccttgcctttaggaaaagggaccagggctcaggaggagaggaggatctgtccccagcatacccgacgcggccatcatggccattacaggggccttgtcggcatctcatggccatctccttaagtaagtagccttgcatctaatcagaatgttcatttcacattccgtggttaaaaacactgctgttgctatgactaccattactagataactggcaacccccacctgtttaacaatgccttctgtcttcacagcaaccctatagactgaatcctgacattgagcccatcagaggtaagttggctccgagaggtgaggtgacttctccagattgtctcagttagcaagactgagactcaatcacacatcttagcgaagccaaagtctgtgattttacctgctaaaaaatactgctctacttcaccaaatccatggtcaataatagactgttaccttggaagcactccgtaacaaactttggaaactctgagtttcccccttcgctgaaactcacctccaatcccaggttgcaaacaagcaaacacacctgctccacgttcctgcctgtgcagctttcaccacaagtgtggagctgaatatgtggagcagtggagtttgaaggccagtacagtggtgaaacattacatggttgaaacaaagttccaaaaggtgctcaccgtctgagctttggaaatataacttcatgggaatgatttcctttaagaagctctgtgcataagtgttacagtttatgggaggccgctgttttggatgagcccctgcacaaggccccagcatctcagaacaaaccaggatggcctcactcatgttccacataatccaactgaactttgaaacaggccagttttcaaaaatccccaagaggttctagtttatctgagttaatgtaacaatgaagtcccctgtgttttaacgctatgaggaaagtaactgaaatgaccagtccactctttgctccctgtttctgctttcttcagcccttttgtgcctaggaagccaacctcatcagctcatttcatctgaacacttactctgttttacagaatgaggagcttctcaattctagaattgcaaataaaagccaattaatctttaaactaaattggtggtaattgtattttgacataaccatgaagagaagctgaaattatgtgaagcctctcactagttgtgactagttgtctcttgtcccacaccaggcagttgtacttctcctcctttttgtcactgaggagttttagatgcctcctcccctggtggtccttagtcacatctctaagctaaacatgtaccttcagacatttggcccaaatgcattttcttatgtaatacagcactagagtagactgaagtaaagagagtgtacaactagagaggaattgttaaagtatgaatggccaggagacattggagaggggatggataaacacaatgtggcatgtggtatatctatacagtagaatattattcagccttcaaaaggaagaaccttctgacacatgcaacaacatggatgagccttgaggacatgatgctgagtaaagtaagtcagtcacaaaaggacaaataccataagactccactggtatgagatccctagaatgaccccagaatgatcaaagtcatagagactgaaaggagaacagttgttgccaaggtcagggggagggaaagggagttagtgtttcgtgagtacaaagtttcagtgtgggaagatgaaaaggtcctagagatgggyggtggtgacggttgtacgacaacgtgaatgtgcttcacactagtgaatggtcccatgaaaatggctaagatggtacggtggatgtgtatttcaccacaaaataatgagcatgaggattttctttaaaatctcattctgacagaagaaaatgacatctcaaaaaataatagtgtaaaggatttcctaaaagaaacttaccccataactagggcttcagttaaaaattatttccccaaatactgaatggatatgctgtaaacaaagccaagacttcaactatcatttaagcctactgaaactgaggtgaagaactgaggaagctgggccaaatatcagctacttgatcatttaaatgccttataattgagctgaaacacccggagcgatgccagattcctgagtccctgtcagtagattacatgtatgccactgtttgtccctcagacactactgcttccgtaatcacttgtcttcccctttaggtcctgggaagacaggtgtatacagttacactgatttgttttctctagacttgacatcagcttgaaaacaactgcagtttatataccaattttcctttcatcccttgggtctagccaccatagcctctgctctgtttttcaaaggaaacagagccaacactgaagggatattttaagaaattcttcttcactgtagctgggtcggcctccaggctcttacagatgaccctcgagtgatctgcaacagcaaacaagaactagtttctcaggggctgggcatggtaactcatctagaaataagttagatgtggttccatcctctaggagaatatactcaatgtagtagtttttgcagataaatgacagtaattcatgcaagctcatgaatatatagtaagtcctgcagaaaagcacaaaagcacaattctaggtgggaggatggaactggctccacagagaggtggacttggatgtggataacttttatcacactgcacagaatgcttaggggtggttagcaggctagtctagctagcctcaaaaaagttgtaattctaaattgtactatcaattcagtaaaaggaaaaccattttagcttaagctgttagtcattttgcaatgtatctgtgtatagctgcagagcaatagtcctcaaacttaattcagcatgactataatataaaaggatacatttttaaaaactgtatctgatttagaagtatttaaattcagttactctaaagtgtatttgtttttaggatggggcggctccacgcttcacggattawttgtttcctaagcagtccttctctcttacatcaaacgtcttgttgtcttgttgattccattgtaaatggcttcacagttcctgttgaatgtttcatttctataataatgttttgtaggttattaaataataaatcatggcgctgcttctgtgatctagcaacagagtggataagagcaggaaatctagaggcagatccactcctggagggccttgggtgggatccaggacacactcgtgtgatgaggacattcaagatgctggcctgccaagcagcggtgtttcctcattggttcattcctttccatgtctttttctacctctagctcctacaatgacaaaaatctactcccttacaggctaagacatgctctgataattctgatatttctctaccccctcttttatttctactttctggaaaatagtaaaatagtccttaaggagacaccttaattgtgtatcttctaagaaatttggagagacctatgtagagaggaaatggagaaaatatttcccggaaacaggccttctggtctactctaacaactcttgtcaagcaaaatgctcacacagcgccagcccacttggctcctcccagtggaggctgtgtccccaaaggggcctgctcgaatcttcatggggtgttcttttcagagctgtgggaacaccacacctcccaccctgctaacacttgacttccaaaatggcagtgtttaaacattcaacataaaccatcactgagtgcatgttctgctgtctgcatgcactctgagaatacatactagtctccatttatcaggcacagtagacgtggtgcttgtcagggtgggcaatgctctggaagtgcaattgtgtatcaatttggggttgtcatgtgagcatgcgtgtgtgcatgtgtatgtgtgtgcacgcaggtgcgcgtgtgtgatggaaagagaatgcacacacggcaggcagctcaaagccaggaggacaatagcaggatatgcccttgaaaactacatgagtcaaaaggagaaaatctcccacatgcaggaaaacgtgttcatgattactcatctaaactcacttattttcgcatctgtaagacagagactgtgcatgtggtctgaaatacggagataaaagttccaaaggagttacaggtgttcttggtgctgaggaggaatgggggcccttttctctgaggtggctgcctgtccacattcacccgacccttggaggtcccttcaaaggaaggccacctcctttggaagctttcagcatcctgcttcaacatcccatagttatggtccaaactgtgtccccccaaattcatatgttgaaatcctaacccccaaagtgactgattttggaggtgaagcccttaaaaaggtaacctgggttaaatgaggtcatcagggtgggccctgaccctatataactgatgtccttatgagaaggagatcgggacacacagacggacaccagggatgcacgtgcagaggaaagaccgtgtgaggacacagcaggaaggtggctgtctgcaggccaaggagagaggtctcagaagacaccaacctggctgacatcttgatcttggacttcctgcctccagcactgtgaaacaggagatgtgtgctgtttgagcccccagtctgtggcattctcttacagctgccccagccaccagcaaattccccttcctagggttcctgtggcctcgctctggtggcctccagagacagctgccctgtataagaccagggaggcccacccacctgggcacagcccagcacccaagggaatgggctcatgtgtggtgcccctgctgggtactggggcctttccttgtcttgagggcagccctgacccaggtttctggcctcagagacatcttcctcttacattgcttgcgtagaccaaaactgttaagaagcaccggccgggccgggatagcgccactgcactccagcctgggcaacagaagaagagtccatctcaaaaaaaaaagaaaagaaagaaagaaaagaaaagaaagaaggaaggaaggaaggaaggaaagaaagaaagaaagaaagagcatttcccagtgcttaagaacactgcttcccattgcccagaaaggggccatcatctgcgtgctgctcagaaccactcttcgtttggcctggctggcctgaactccttctttggatgacaggactctccattctgttttggacagcaagtgggtgctgtgactgatggccaatgatcaggacaatgatgcaaatgttccaaaatccctcgcagacacagatctccatttcagccacggtgagctgggtgtgccctgagcagccgtgctggcctctgtctccatttccatgtggggaggaagcatcagcaacaaggtccgccaggctcagggaatcaatggctctgtgaacttgggtgagtttcttgctctcttttttcttcagtttctttgtatacaaatgtgaaattatatgtgtggccagggttgctctgtagtgtcctccaaaaattcagatcagattatattagtttctttgcatagaatccgtatatgacatcccactgacctcaagattaatttctggctctcagcagcactcattcattcattcacttaacaaacattgatctcctatgatgtaccaggcattattttatttggtaggaaaacttcagtgaattaaaaaggacaaaagggcctgccagactcccccttgctggctcctgcacagcatgccgggccccactgctgccatgacaggccctttcaaacgctccatggaagatctcagtgacctgctctcagacagcagtggctgctacagcctcccaagccagccctgcaatgaggtcaccctgaagatttacatgggcaacacatctgtggatcaggatatccccaagcttcagaaactaggcagtattcatgccctgaataccactgagggcaggtctttcatgcacataaacaatgccaacttctccaaggactctggcatcacctacctgggcatcaaggccaatgaagtgcaggagttcaacctcagcacctacttkgaaagggctacagacttcactgaccaggccttggctcaaaatggccaggtgctcgtccagtgctgggaaggttacagccatctccagctctagttatcatgtaccttatgattgtcagaagttggacatcaagtccatcctgagtatcatgaggcagaactgtgagatcagccccaatgatgggttcctggctcagctttgycatctcaatgacaaactagccaaggaggggaaggtgaaaccctggggtgcccctaccacctttgctcgagaggttcagtgggagaggccctggttgaaggtatcctgtgacactgtaccctgatcccagcatcacgagccacttgccctcaagtctgtctcaacaagtcctgggccacttccctacatgaagcttgctaaggagggcatccttgctccctggttgtcctgtttctgtaacttatgatgtcttttccctgaagtggggactcagagagggaagtcctatagcctgcatgattctcagtggccagggcaggaggtctgcagaaatgtaaggcctgggatgtaaggggcccctcatgattgcccttcccaaacccttggatacttcctgagtgaatacctcagcaccttgagcgctagcaaaggagctgtgcaaacacaggctcttctccttaccacatctgtgcccccctggtgtcccccacagtttccacgtgctgtgcagagatattgctgtcgcatcataaggtctgaagcttgtccactgacaatccatcagttgtcagtggacagaactttccactagaggctgtattttaattatttccttaggattaatggtacctacacaaagaagcccttaggtgggcaacaaattttcctgaaggactctcctaaattcatagagctttcaaaatgtgaatctttggaaggcttgagttcggaatccactgctttggagtatttcccttggacctatctcagtcacttcgtttgtgagaaaagctatgtcttggacatggttatatttttcccttttagaaaacaaggtgttgaagtccagcctatttaaaaaccccatcatttgcaaaattacaagggttttgtcctgaattacagtgttggtgagcccaaggcactcgtgctaagtgctttatttcttggttgctagtccaagatcagaaggaggagataaaccactgacactataaagcaactacacaatcaagtctacataaccaccagctaacaacatgatgacaggatcaaatctgcacatactgttattaatcttaaacataaatggactaaacaccccactcaaaaggcacagcgtggcatcttggataaagaagccaaagccaattgtatgctatcttcaagagacctctcacatgcagtgatacccataggctccaagtaaagggatggagaaaaatctatcagacaaacagaaaacaaaaaaaagagcaccggttgctattcttatttcagacaaaacagactaaaccaacaatgatcaaaaggacatagaaggatattacctaataataaagggttccattcaataaaaacacttaactatcctaaatatatatgcacccgacactggagcacccagactcataaaacaagtttgtagagactaataaaatcacttagataaccacacaaaataatagtgaaataattcaacccccaacggacagtattagacctataatcaaggcagaatactaacgaagatctcgggataaaaattcgacacttgatcaaatggacctaaaagacatctacagaatactgcacccaataacaaaatatacagtcttctcatatgcacatgccacatactctaacatttaccatatgctaagcccataaagcaattctcaacaaattccaaaaaacgaaatcataccagccacactttcagaccacagcacaataaaaatagaaataagtaccaagaaagtctctcaaaaccataccattagatggaaattaaataatctgaccccgaatgacttttgggtaaagaaggaaattaagacagaaatcaagaaattctttgaaactaatgaaaacaaaaatacaacatgccagatctctgggacacagctaaagcactgttaagaggaaagtttatagtgctaaatgtgcacatcaaaaagttagaaagatctcaaattaacaatgtaacatcacacctagaggaactagaaaaacaagagtaaataaattccaaagttagcagaagaaaggaaataacgaaaatgagagctgaagtgaacgaaatggcttacaaaagatcaataaaaataaaaggtggttctttgaaagaataagtaacattgacagacaagtagctagactaatttttaaaaagagaagatccaaaaacacacaatcagaaatgacaaaggagacattaccaccaaccataaagaaattcaaaaaaccctaagagtctgttatgaacacctctatgtacacaaactagaaaatctagaagaaattgataaattcctggaaacataaaacctcccaagattgaaccaggaagaaactgaaacctgaattgaccaataacaagttccaaaattgaatcagtaataaaaaaaaaaaaatcctaccaaccgggaaaagccctggcccaaatgaattcagagctgaattctaccaggtatgtaaagaatagtttataccaattctgtggaaattattccaaaaaaatcaaggaggaaggattcctccctaactcattctatgaggtcagcatcattctgataccaaaaccaggcaaagatacagcaacaacaacaaaaagaacactttaggccaatatacctgatgaacatagatgaaaaatcttcaacaaaatactagcaaaccaaatccagtagcacatcaaaaagctaatcctctacaatcaagtatgctttattcctgggatgcaacattgcttcaacatatgcaaatcaataaatgtgattcatcacataaacagaactaaaaacaaaaagcacatgatcatctcaatagagacaaaaaaactttctgtaaaattcaacatcccttcttgttaaaaatcctcaagaaactaggcattgaaggaacatatctcaaaataataacagccatctatgacaaatccacagccaaaatcacatcgaatgggtaaaagctggaagcaatcctcttgaaaaccagaacaagacaaggataccttctctcgccaccgctattcaacatagtactggaagtcctagatagagcaataaggcaagagaaagaaataaaaggcatagaaaaaaaagacacacaaataggaagaaaaaaagttgaactatcattttcacagactatatgattctatacccagaaaatgccatcgtttctgcccaaagactcgtagatccaataaacaacttcatcaaagtttcaggatacaaaaatcaatgtacaaaaaatcagtagcatttctacacaccaataacactcatgctgagagccaaataaagaatgcaatctcactcacaatggccacaaaaagaatgacatatgtagaaatacagctagacaaggaggtgaaagatctctacaatgagaattataaaacactggtgaaagaaatcagagatgacacaaataaatgaaaaaacattctatgctcatggatgggaagaatcaatattgttaaaatggctatactgcccaaagcaatttacagattcaatgccatttctatcaaactaccaataacatttttttcacagaattagaaaaaactattctaaaattcatttggaaccaaaaaagagtctgaatagccaaagcaatcctaagcaaaaagaacaaagctggaagcatcacactatcacttcaaactatactataactctaagtaaagcagcatggtactggtacaaaaacatacagaccaatgcaacaagtcagagaaaccagaaataaagctgcatacctacaaccatctgatcttcaacaaagctgacaataacaagcaatagggaaagcactctctattcaataaatggtgttaggataacttgctagccacatgcagaagattgaaactggacccctttgtttcaccacatacaaaaatcaactcaagatggattaaagacttaaatgtaaaacccaaaactacataaactctagaagaaaacctaagaaatactgtactggacatggactgtggcaaagacttcatgacaaagacttgaaaagcaattccgacaaaaatattgacaagtgagacttaattaaactaaagagtttatgcacagcaaaagaaactgtcaacagagtaaacagacaacctacataatgggagaaaatattcacaaactatacacctgacaaaggcctaactttcagaaacttaacttccttaataaggaacttaatcaaatcaacaagaaaaaaacaaacaactccattaaaaaatgttcaaaggatatgaacagacacctctcaaaagaagacatgcatgcagccaacaagcatatagaaaaatgctcaatatcactactctttagggaaatgcaaatcaaaaccacaatgagataccacctcacacccgtcagattggctgttattaaaaagtcaaaaaagtaacagatgctggtgaggttgcaaagaaaagagaacacatatactactggggaatgtaaattagttcagacactgtagagagctttctggagatttctcaaagaacttaaaacagactataattcgacccaacaatcccattactgggtatagacccaaagacaaaataaatcattctaccataaagatacacgcatgtgcatgttcatcacagcactattcacaatgccaaaaacatggaatcaacctagatgcttaacagtggactggataaagaaaaagtggtacatacatatcatagaatacctgcagctataaaaaagaatgaaatcatatcctttgcagcaacatggatggagctggaggccattatcctaagtgaattaactcaggaacagaaaactaaatactgcgtgttatcacttataagtgggagctaaacatcgagtacacatggacacaaagaagggtacaatatacactggggcttacttgaaggtggagggtggaaggtgagaattgaaaaactacctgttgggtactatgctgattccttggatgacaaaattatttgtacaccaaatccctgtaacatgcaatttacccatgtaaaaaacctgcacatgtatcctttgaacctaaaataaaagttggaaaggtaaaacagttccatatagattaaagacttagtggtaaaaaattagaacaataaatactttagaagataacctagtagaagtactgtgtaaccgttaggagaggtatatcctattagtcaagacaggatatatgaggggaaatgaacatattttaccacataaaaactaaaaattttgtatgatcataaaggaaatgagagactgaggaaataacttcacaaaaatacataacagataaagagtaaatgttcataatagtcaaagagcagttccttgataataaaaccatataaaagagaaaagaggtatatgggtaagaatatgataggcaattcacgaaagatgaattcaaatgaccaattaacgtaagaaataatgctgaaagaagcaaaaaaatgcaatataaagcaataatatgacaccagtttttcactgataaaactggaacatcttaaaataatgccaatttctggtgaagatgtagggaaatggtcacatttatacagtgctggtgggaatgtgaattaccacatctctcctggaaagcaacctgccaatctattaaaatttacaaatgtgcttccagccagcaatgcaaatgccataaataccttctacagagacacataatataatacagacaaagatgttttgtgtagcattacttgtagtggggaaaaccgaaagcgggtagccattacaaataatgaatgatttctgtgtctgttgacctgaaggattgaccaagatgtattgttaagtgaaacagaaaaaaaatgaatgtatagaaaaatatctttaataagaatctaaccttataaaaaggaaacaaaaatatatatgggtatatgtctttgtataggattatatgattatagagaaatgtatgaaagggtatgcattgggttacttccgttggttctcttggagaagacaaaaagttagaagatagaag

SEQ ID NO: 93350 - DNA, 12658 bp, Homo sapiens
ctactaaaaatacaaaattagctgggcatggtggcaggtgcctgtaatcccagctactcgggaggctgaggcaggagaattgcttgaacccgggaggtggaagttgcactgagcccagatggcgccattggactccagcctgggcgacagagcgagactctgtctcaaaaagaaaaaaaaaagaaacaaaatgctatatattatttacaacacaggctaggttactagaataaaacgttggcttaaacaagagagttttatttattttatttctctctcctataacagtccagagcagcagatttggtagcttgatggaattggcggggtcctatcatcttgtggttgtgttatcctaaagagttatctttagccaatggttgaggataagatgacttatcacaccagtataaaatgggaaagaggactgcattggtatgttcatttattttaaggactacttatgtataatttacagcctacccccacccccgccctgccacacacacactcacatcctgttttcaagaccctactcacatgcctcacatcaaaatggaaagcagtctaggaactgggcattgtggtgtttagctaggaggtcatgtgttcagctaaagaatctactactatagaggaagggggaaatagcatgtagtgtatatgaacagtatagattggagggtgggtaattagtcatctctgccacaatttgtttgggagaattgcttatagatggagtaaattttaaccctggaaaggactttaaagtcataaagtctcatccatctatgttcctaaattcctttacaagaacatgggaacttaactgaaatgcaataatccattaccaaacatagttgtcccagctgtgcttttgaggacttttgatatgcagaaaaatgtattatagttacatgttcaacattaagtttttctttattcttttattcagcaaacatttattgatctcctagatgaagatactgtagtaaacaacaggtagaaatctctgccctcataaaacatgcagttctgtgtggggtgatacacaagaaaacaattaacaaaatacatggtgtacattgtgtagaatgtgataaataacttgggaaaaataaaacagagaaaaggatattgcaattatgactagagtggtcaggaaaagcctcattgagaaagtaacacctgagaaaaagactgaagtggtcaggtgaggaagctgtgtgcctgtctgcttggaaggtagagagaagagggagatgaggtcagggtagtcacaaaaggtagaacgtatggggccttctacaccatagtaaaatttgggggtttgagctgagtacagttttgatctgacgtatgttttagaatgatctctgccttgctttgttgaacatagactgcagggaagcactggtaaaatcaggaacaccagtaaggaggctgttgcaataatccaggtgagaggcaggggaatagacttgaacttgatgagcaatgtctgattgttgaatatattttaaaaattgagcattcagcgggcgcggtggctcacacgtgtaatcctagcactttgggaggccgaggcgggtggatcacgaggtcaggggatcgagaccatcccggctaacactgtgaaaccccgtctctactaaaaatacaaaaaactagccgggcgtggtggcgggcgcgtgtagtcccagctactcaggaggctgaggcaggagaatgtcatgaacccgggaggcggagcttgcagtgagcgagatcacgccactgcactccagcctgggcgacagagcgagactctgtctaaaaaaaaaaaaaaaaaaaaaaaattgagcattcagtttttgttgatgaatatcttcaagtgatcatcaataagggagggggtgtgtaggctgtacggcatctgctccccaacagaaatgaatagactgtcagactgacggactataartagactatcaattaattatttccttgcttttcatacatggatgtaatgtcacaccctcaacccactggtttttctagagtctaatttattaaccatattcattgcaagctttgatgctgcttttgaaaatgtcaactcttacttttggaatcagattgtccaggcatggaatccagaaataaaaattgtaaacaacttgtgtgaagattcctattgctgtggtttgtatgtttacatcccctcaaaatgtatatgctgtaatactcacccccaagatgatggtattataaggtagggccactaggaggtgattaggccataggggcagagctctcatgaatgggcttagtacctttatgaaaaaggccagaaagagacctctctcctattttgctatgtgaggacacagaaagaaggcactagctatgagtcagaaagtggccctcagtggacacattcataaataatgctttaccagctatctgggcatccctcagtgcaggcaagttagcacataaaattaaccatcacacttaaatgtactttaaagtttgattaccactgccttagagctcaggggaaaaatacctaattcttcttgcatgcatagcttctcaaatgtttcaatacagctctgcagatattttcctccttatcctacaccagctgaatctttacactccctggacaaatatccacagtccctcctaccttcctaccttaaatgaaatgtttccacatgcattttcccaagaaatgtatacactttaatatcatattaagtagcatgggagtaaatagttttagcccttgtcatcctcctactaataagtttattcataagttatgttcatttttcccttatttttctcatttttatgaatagcttatattttatttataaaaatgtaattaacccaagcagaaagttaatattttatattgcaagttttatatagtttataatatttttaaaaattagtattatatgttttttattgaatatgttcccattaaaatgtagtatgagtaacatactagactcatttataagggagttggggaaaatgttgccctaatttctctcatcttaaaactcatttttctctaagggttcattcacatgccttctctaagttgatagttttacaaatccaagtaatttcaaaagattttgtgcttttggattggtaaaatattaggggttatagctatgtgggaatttttaaataggcatctattacatttttcctatactttgaaataatattgggtttcaaaggtttactttaagtgaaccaataatcaacatatctgcaaatgttattaagccccttaaattctactttacctttttcaggtgcagattatttttcagtaaaatgtatatggctcataataaccatttggtgacataatggaacacaatttcattatgtggaaaaatgggacattacgtatgcttttattttgctttaaaggtggaggttggcatattatatttaaattaaaattgttacaggataacttgaattctactcgaatgtaacattaagctgttattctgtttgtttttatttctctttctttaaatctgcactagccataaatttaacttaacaaaatcatcacattttccacagagcagtctagcccgtctcttccatacctcagtttttcttttctgcacagttcttccccctaggtatttgcttttaaatgtttatgtagtatcttgattgaatttttaatatacactatcgtcttgtctgtttatttgttccttaagctttgtcctgtgttctattcaaatgctaactcatttaaagtggatcaaaaacatgcatacttggcctaggctggtattttcataattccattcctcttagttaaggagcagaatcactgacttataaaaagttaaaagctagaagaaaggatctggagttgtggtaccttattttacaacccagctttgctgtgtttcttgtgaaagtccctgaaattctctgtcttcgatttaaaaaaaaaaaaaaggctatataaaaggatatagctatttcatataattgttgtatgattcataagataatgtacctgaaaaggcctggcttggtcctcaatattactagaaaaaatactataaacttttttccttttattgtcttcaaatataattaaccagtgatgtgtgtgtgtgtgtgtgtgtgtgtgtgtgtgtatctccctcttgcctatctctttctggctctctcactctttatatatttatacacacatatatatatacacacacagaatatatatctctatcgtacacaaataaacatatacatgtacatatgtatgtgtgtgtaatatatatatcgtatatatgaaacagctaattctttgggctggttttagacataggtatttggctttttgttctaatgttaaatttcttcaagagtaaacttcaattctgaaaaatggcaactttatggtccactctgactgagaaatgcttgctattggcaatgaaagctgtgtgaaatctgacagcctcaccccaagataaatttgggcagacttttttatttgacttagccctcatgagtgcacacccattgaaatgggttccaaaataggcagtgctttttatcacattttgcaaacacagcttaattcagcataaactgccttgccttgcatagttttcgtccagattcatatataagatcaatgttgctttaaatttagcccttggttttcctgtaagttcatgaccttgtagaacaaaaattaaattcataaaattggctttggcttcaacttggaagccaagcccgtatttatgaaagttccccattttcctagaaatattctattgtgcttactctctggaagttttcagaaggcaatataatttggctaataaaaactgagaaattattactatagagaaaaaatgatcactgtcttttaataatacattgttctataacctagctttaattgtgggacttttcatttctgatttttaagaacctgtccaatagagaacacagagcagcaacatctaacaacagaaatcaacccgtgagggtctgaaaactgggggcgctgtggctgtgttcatgtatttccattgagggggtatgattgtcatgctaatgtatacgaaataatgtatattaattaaactgtatttccccacattaataaaatttgctgttacaaatttaacactgtaaatacatcagcttataaaatgatatgaaatataacaccattatgtagaggcaagaatagacaattgtaatttatgttactgaaatgttttaataaaatagacacaccttgaagaatgccagttagatattaattggtatgcaattaagcactttctggggggacagactctcaaaaagaataaataacctgtatcatggaacaataattggagttctctctactccattgcttcagcctaatgctggcaagagagactctttggcccactgctggcactcagggctgaagaggtggttgaggcttcyggaaaaggaagattattagaatgattgtgcaagtctcttatggcttttgaatacctcacccatgtttgactcatcaatgcattttggtcacaccaatgataaatttagtggtttagtcatgataaaaagacaggtgcaacgttatcttttggaagaaagarcaatgagacccatataatttcaatcttggatgaaaatcaccagttgctaaaataaacaaaatgttttcagacctggttctcatctccttttatatgcaattcccttaaaaattgtgctttatatttctattatctactgtctctatgagctgacactgatataaaatagtttttgattctgttggtgtctacagaacagttccaattaatttgaaataggaagtcatatagcataaaatattattgctttcatgtttcattaagaataactatcacagcgtcctcttcctgcctggtgttggtggtttgttctcagaggcttgtgtcaggactgctgataggaagatgtcttcaggaaacgctaaaattgggcaccctgcccccaacttcaaagccacagccattatgccagacagtcagtttaaagatatcagcctgtctgactacaaaggaaatatgttgtattcttcttttaccsgcttgacttcacttttgtgtgccccacagagaacattgctttcagtgatacagaagaatttaagaaattcaactgccaagtgattggtgcttctgtggattctcacttctgtcagctggcatggatccacacccctaagaaacaaggaggactgggacccaggaacattcctttggcctcagacccgaagtgcaccattgctcaggattatgggatcttaaaggctgaagaaggcatctcattcaggggcctctttatcgttgatgatatgggtattcttcggcagatcactgtaaatgacctccctgttgactgctctgtggatgagactttgagactagttcaggccttccagttcactgacaaacatagggaagtgtgcccagctggctggaaacctggcagtgatactatcaagactgatgtccaaaagagcaaagaatatttatccaagcaggagtgagtgctgggctgttttagtgccaggctgcagtgggaacccctgagaacaaagtctcttttgtggttttttttttccatgagtaaaatacaagacttcagattcagccgaactgtggtgtgttacaaggcaggcctttcctacagggggtggagagaccagcctttcttcttttggaagggatggcctgagtcgtattgtggggaggccactgatttgtatgatgtgtcagtagagggcatcaacccattgatcttttgtagtttgtattaaacttgaactgagaaaaaaataaaagaatatcataatgtattttcttatattattttatcagatatttaaattacaaatgtaatacatgctgttgtcaaaagcaaaacaaaataagtatactcgaaaaatggtaaatggactgtactcttactccctccaatcagatttctccagtatactcaatgcttgcaacttgttttaaactcttctgtctttattccaacaaataaatacataactttaaaaacatgtagagattttttattttctttttacaaaaatatggttatgcagtatgctttatgttggaacttgcttttctaaaaccaaagtatcatgtatatacctcagtctttctgtaaacaaatgttttataatttattcagcctgcttctattagtggacatgtatgttttatctctttttttctattattttccttttcttttcctactataatgatgtgtgcataaacattcttttacaaatatcctaacataaaactctatattattagactagagttccctagatgggatttctgggtcaaaggatgagcacattttaaattgtagtatattcttacatgttcctttcatataatacattgcattttaatttttgttttattttacataactgcttcctcactaggttgaattgccagagggtaagcactcttctatttatctatgtagttagcaacaaacattttttacttttttaaattctgaaaataaaaggtttgattagtcagccatattaacatgaccgtattgttccttttctactcccttgtactccatcttaattgaaaacaccttccttaggactgaagctgtcatttgttcttaccttttcttaacatccacaacccctatagtgtgtcacagatcaatgatttgttcaatgctgccctataatcttagctgattatttgtgcacttttttgctgttgtgaatccatattgaccacattttctaaatgatcattctgttcactgtgtattggggatacagttaaaggtacgaggcagtagctttcaactcggccacacattggaatcaaatgcttgggctccacctatgtctgattgaatcaatctgggaggacaggatgggagcccaggcaattgtgttcttaagaatttcactaggtaattctgatcctaagtaaggattaagacccattggtaggccaggtgctgtggctcacacctgtaatcccagcactttgggaggccaaagtgggtggttcacctgagttcgagaccagcctggccaacatggtgaaacccctactaaaattcaaaaattaaaaatactaaaaatacaaaaattaactgggcatggtggcacacacctgtaatcccagctacttgggatgctgaggcaggagaatcgcttgaacctgggaggcagaggttgcggtgagctgagattgtgacactatactctagcctggacaacagagcaagactctgtcaaacgagaaaaacaaaacaaaacaaaacaagaacaacccactggtaaaagaatgagagtggtcttctctttcttaaagttgcatttttccagcctggtaaatatgggacttccattcagacatggagtcacagcccatgccattgtaaatagtacaaacacagttggccatattgagagttgagattagatggaaactgggggcaaaatgcaaaaagcaagagatttgatatatgtgtaaacagatggaattgaagcaaggtggggatattttttgtatcaagttgaatagtgttccaccaaaattcatatccacccacaacctgtgtatgtgaccatatttggaaatagggtctttgcagatgtaattaagttgaagtcatactagactggggtcagtcctaaatccagtgacttgtgtccttataaagagagacaccaagatacacacacacagagaagaaagccatgtgaagacaaaagcagcaattggagtgatgcagcacttagccaaggaggcccaagaatggctggaaactaccagaaggtagaagaggcaaggaaggattcttccctagagacttcagagaaagcatggagctgctgataccttgatttccaacttctagacttcaaaattgtgagacaacaaatgcctggagttttaagttatcaagtttgtggtaatctgttacagcatcgctaggaaactactacagtttcctaatttttgtgtgggttgccaagcagcaacttattgtagtctccccataccttgagatcatccttaaaggagaaaatgaaaagtagtcatatatcgaagatttttaaaatttggaaagctctgttgtgctatcttgctaaattattttttaagttctaatagatttttgttaatttgtttggttttctagctatgtaatcacatgcaaatgtttacatataattatatttcttcctttcaataattcgtgcttttttatagaccaaaaaattacattgtaccccataaacacacaaaattgtgatttgtcaatcaaaaattaataaattagaaatatagaacaattataaaaatgcatgattttcaattttgcttcatgccttgttaatcagattgtcaaagcaatattgcctacaaaagatatagggaacacatcttatttcttattttattaggaataacattagtactaaatcatatttataatgttagtcattttcctctgaatatacattttttgatgttgagaaaatgtctttctattccatattttagtagtatcattattaggaatgcaaattaaatcttaagaatagatttttccatttatgttagtataattattttttctcattaaacctgtaaattattttcctattttacattaaataaatttttgtatcttttattattatcttttaaatattttctcaggtcaaccttttgttcttttcctaaatctttaaagtcttttggtctaaactggagaattaagtaatttcttttatcatttttctaatgaaagcatctgagtatataaatttgtttctgattatagtcaacagtacgtaggtttgctatgtaatatttcttttgattattttctaaataatccttctgcattatttcctagagattacttaggatagtgttaagtgattttagaaaaatttttctcatttgtttgttcatttattatatacattactaaccatttgtatttgtgatatgagaatatgtcatgaccaaatttttagtaggatatatactgttaatctatttttatggtattttctaaaatcagatgatccatggctattttaaaataagggatattctctgtgagtcaaataatttgggatcactccattattacattttctgatattttatgtattttaaccacatgatttatcatgggccaatagagtttaaattctgccatttcgcttgtatttctattaatttctccatgcttaaaagttcaatactgctgtatctacactattaattctggctttttcaatataaaacagcatttctgtcgtggtttacggttttttattttaattttaccttgataataatacgtccatgcttagttgaacatatttattcatttgttaatggaaagccttcctgtatcattttgttagttctgtttgcaacaaatattaaatgctgcttttaaatcagtctgacttattaagacagtatctaattttttcaattttttatcttccaatttattttattgccaccatataaaaatcacttaatccttacttgctggacaagaaggaaaatctgtctaaaatatgtgctttcatgaaactgtgtagtaataaacaataatcagcccaaatttatggttaattcagttgacagttcatacacatacgcgcgcgmacacacacacacacacacacacacacacacacattgtgtaagcctttttagttttctaaacatcccaaatttcctattttcttagatgtcttggtagttctttgtttcccttccttttgttgttaaattaagatcctatctatagaaaagtttaaatgtcatatttaggtggtggctttaaaatatgtttgcaaatgctttgccatgcttccatcaggagacggggttgtttattctcactttgaaaatatgttggtttttgtgactctgactcctgaggcttagcataacaaggcaatacggcatctgcctgactgtgtgtcttcagacttttgctcttggaatccatccttcatgctgtgaggaagtccaggccacgtcgtgggatcatgtgtaggaggtgtccaggcatatagccctagctgacgtcacagccagcagacagcagcaatcaccagacttgtgagtgagaaagtctccaagctaacttcatcttcaacactatacgacagcaactgcatgagagaccctgatgaaaaactgtatagctgagcccagtcctcattacaactgttagaggtaatgataaaaaatgattattgttatacaccactaagtttttgctgacttatacaggtagagataactagaatagtatggtatttaaatttttattttttgtttttatttatttatttttttgagataaattctcactctgtcaccaggctggagtgcagtagcacgatctcggctcactgcaacctccgcctcccaggttcaagtgattctcctgcctcagcctcccgagtatctgggacaacatgcgcacgccaccacacccggctaatttttgtatttttagtagagacggggtttcaccatgttggccaggatggtcttgatctcctgacctcgtgatccacctgccttggcctcccaaagttctgggattacaggcatgagctaccgtgcctggccagaatttttattaaattcaatcagcacttactgaattccacttagcaaatattcaaaatttcactgtgctagtttcctgaagattggaataatttatgtacagaaaataattttccaattttctgccatatttgactattttaatacataaatctgcttaatttatgtactaaaatagtcaaatatggcagaaaattgggaagggcagaagagacagagactaactgccttgcatctgaatacatttgacttttgcctcaggcaccttacaagcttgaagggatctaaacagacgtccaggcatccctgaagaaaggaatcataggaaattctgtcatagtatttccattctctccggtagtttacaagtgccacacactgcagacagttaggtatatagtttaatttcctgttcagccaaaatagctgcttggggcatgtggtaacatcccaagtctacatcaattcctaccagatgtaaaatggagaatcaaattcaataaatcacttcacattttgttgtaatttcttctatgtaaatacttttaaatttggggaaatatctaggtcattttatattggcttatgacaaagatctgaaaacaaaccaagtactaacaaatctaaaggagaaatcttgaagtacatgtgcacagtatacattatggaaaaaaatataccttcttactataatgagaggcattttagaaatctattgtaattcaaattctgatcatcaaggtaaaatacatctcagataaagacttttaaaagttgagatctcatatgtagaagagctaaaaacagaactaccattccacccagtaatcccattactggctgtatactcaaaggaatataaattgttctaccataaaggcacatgcaagtgtatattcatt

SEQ ID NO: 93351 - DNA, 53109 bp, Homo sapiens
agttagcggacagctgtcaagatctgcctcagctttcaagctgaggctacatgcttcccagacagcctctaagcaaaggccaggcactgccatggtacaagggctcaccatttctggccagtatgggactcttcgggagggcaatctttgcaccagcactccctgttttgcaggcctaggctttctcagagctgcactgcagtccaaggctcctcctacccaaatatctttcctggcccctctcctttctcaggttttagtcctacatcacgaactaaaggtgttccttgtctggtcctgttccctctcccttttatgttttataggcgttgcccctaataaaccttttgtatatctgactctgtacccctatattattgaaagagacagatttattgaaggtgataccctgaaatgaagatgtcctgttcttacagatgccctctgatcctatgttaataatagtattatatgttttaaatgtttgccttcttctttctttcttttttttggagatggagttttgcttcatcccccaggttggagtgcagtggtgcgatctcagcttactgcaacctctgcctcccagattcaaccaattctcctgcctcagccgcccgagcaggtgggactacaggcatgagccaccacacccggctaatttttgtatttttagcagacacggggtttcaccacgttgaccaggctggtcttgaactccggacctcaggtgatctgccctccttggcctcccaaagtgctggaatgacaggcgtgagccaccgtgcctggccatgtttgccatttttaagcaagagaaaattgttagagggaaaagcatttcttttgtttgtttgttttttgagactgagttttgctctggttgcctgggctggagtgcaaatggcgtggtctcggctcactgcaaactctgccacccgggttcaagcaattctcctgcctcagcctcctgagtagctgggattacagttgtgcaccaccgtgcccggctaatttttggatttttggtagagacagggtttcaccatgttggtcaggctggtcttgaactcctgacctcaagtgatccacctgctgcagcctcccaaagtgttaggattaaaggtgtgagccaccgtgcccggcctggaaaagcatttctaaagacacgaacctttctctcgctctctcttttttttttttttttttgagatgaagtctctgttgcccaggctggagtgcaatggcgcgatctcacctcactgcaacctctgcctccttgggttcaagtgattctcccgcctcagcctcgtggacgagaacctttcaacacttggatttgaagagcagtcataaaagtggagctgggggccacaaaattacaaaaattagccaggcatggtggcaggcacctgtagtccccgctactcaggaggctgaggcagtagaatagcttgaactcaggaggtggaggttgcagtgagccgagattgggccactgcactccagcctgggcaacaagagcgagactctgtctcaaaaaaaaacaaaaaacaaaaacaaacaaaaaactaagcacattcacgtaacagcccactagtctttctgtttttttctttaacgttagggtgaaaaatacttttttttattattttttttttgggacggatctcactctgtcacccaggctggagtgcagtgacacgatctcggctcgctgcaatctccgcttcctgggttcgagcgattctcctgcctcagcctcccgagcagctggtactgcatgtgtgcgccaccacggccagctaattttgaattttttatagagacagggtttcaccatattggccaggctggtctcgaactcctgacctcgtgatccatccgcctcggcctcccaaagtgctgggattacaggcgtaagccactgtgcccagctggaaaatacttttacattgtttccttctcccttcctgactttattattactattattatttatattctgagatggagtctccctctgtcgctcaggctttgagtgcagtggcaccatctcggctcactgcaacctccgcctcccaggttcaagcaattctcctgactcagcctcccaagtagcagggagtacagacgcgcgacagcatgccctgctcattttttttacctttagtagagatgggggttttgccatgttggccaggctggtcttgaactcctgacctcaggtgatctgcctgcctcgagcttcaaagtgccaggattacaggcgtgagccaccgtgcctggccctcccctcctaactttattgtggatccttttgtataatctgaataattgaggaaataagatatatttttaaaaagtttctgtgtcctaatgaaatcgtagttcgaatcactttgtttgaaagttgatgacagttttccaggaacattttctacctaaatcagatatccaaaagtatatattattcagcagcccaaggaaagatggtaactggatatttttcactcataatactagattgaactaacaatgcctttggccgggcgcggtggctcacgcctgtaatcccagcactttggaaggccaaggtgggaggatcacgaggtcaggagttcaagaccagcctggctaacatggtgaaaccccatctctactaaaaatacaaaaattagccgggtgtggtggcacgtgcctgtaatcccagctacttgggaggctgaggcaggagaatcgcttgaacccaggaggcggaggttgcagtgagctgagaccgcaccaccgcactccagcctggtaacagagcgagactctgtctcaaaaaaaaaaaaaaaaaaaaaaagaagaagacctgacaatgccttgttaggttttgttgtttgatttaaacaattttttttttttttgtagagatggggtcttgctctgttgaccaggctggtcttgagctcctgttcttaagcaatccacccacctcagcctcccaaagtgctgggatactgctttccagccttgttatttgattttattgttttacttgtaataacgacattaatatcttatgtatctgtcagtgcatgattaagtaacttttaattacacaattgataccatctctgttatcctgagaccatattaaaatagaactaatagaacataacaggaaacaaaaaggttgggtagagaacctgttacttaaggacggtgattctcaccactatacaattgttgtatgtttcctgttttgattttgtgaccatttccccttccttctctgctatccaaaatgtggtatagcatatatgcttgacaataatgacgacaacaacaacacacacagaaatcagagttgctaagctgttttaagaattttatgcatgctgccaattgaggtagttagagactcgtggatgaatgctgggcaggctaggtctagcaggggttccctgaagttacaactaaggtaggtgggctaagtgatgtgatcatttttttccctctttaaccttctagtggacatctatgtggttggctgctccatactcctcttcttttctttctttcttttttttttttttttttgagatggagtctctgttgcccaggctggagtgcagtggcgcgatctcagctcagtgcaaccttcgcctcccaggttcaagcgattctcctgcctcagcctcccgagtagctgggattacaggcgcccaccaccacagccagctaatttttgtatctttagtagaggcaggggtctcaccatgttggccagcccagtattgaactcctgacatcagttgatccactcgcctcagcctcccaaagttctgggattacagacgtgagccaccgcacccggcctcggtactccttttctaagaaggtgctccgtatccccatctgtacagttacttacagaaataaccatgttagtagattgtgacccagtacctggccatgagtctgggtgagggggttcctggtaagtcagggcaagggttccttaccctgatgccacagttggctagtccaggagtgtgtacctgatccaaattggaccaatgaatctcttctcagaacttttttgtatttgggccgtagaaatttcagtcagtctgtatgtgtgtggctgtggttgtaagatgtaaagttcaggagcttctattgccatatggagaatgtcaatacatagagagaaaaaagaatgaagccagtatgcaaaggaaagcaaagataagcaatagagagaaggcatctgcatggcattaagtccctggtttcagctgttccagccaaaatcgatggtgtttattatattgatgagaatgtgtctttataatttggaaattgacggaaggcgacttgattgcgggaaaaactataaactgtacctacctattataccatttacaaaaaattctctcttgtacttattttttctccctgagcctcctattgcttcaaagaaaagttcaagtaaaaagaagaacaaaaatagcataattcaatacaatatttattgccctctgtgttaggtgtggtagagtataaagaaatatggctgacccaaaaccaacaagacaatcactgaaaagtgacttgtgaacaatgtgaacaatgtgacaaaaatgaaaagacaatgtgaacaaaaatgaaggagagatccttgtaggctaaaaggggagtcttccagatgtgagattgataaaagcagggaaaattcagtagaaagagaaagccgaagaccatgctccatgtgtaactcatgaagtgattcaaaacagaaagctagcttaattcaaatcaatacatttttactaagtatggggtattgcgaaaaagcatatggcccttgccttttaggaaattgccgtatttagaggcaaagcaagacttgcttatattctcaaaagatccccactcgttaccttatttcccctttaaaccgctttaccatatttgagatcatgttatttgctaacttgtttgttgatttgttttccttccttatcaagaggcaagccccttaagggcggggatttttgtccttttttctttttgcaaccccaacctctgcaatagtgcctggcacaatgcaaacagctcaataataattcgttgaaagaaatggagaattagatcgtagggtgaaataatcttaaactctctggccttgaatctctctagctcgcccaagatatcaaacattgggggtcaggccgagaagaggagaggaacaattttttcctgttaggtcagtggtttttagcctttggttacattagcatcacctgggggcatctttagacatcatcccgaagcccagaccgcacccaggactaaactagaatctccagccagtgggtctcaagcatcagttttttttttttttttttttttgagacgttgtctccttctgtcgcccaagctgaagtgtagtggtgcgatctcggctcaccgcaacctccgcctcccaggttcaagcgatactcgtgcctgtcccccgagtagctgggattacaggcgtctgccaccacgcctggctaatttttgaatttttagtagagacagggtttcgccatgttggccaggctggtcttgaactcctgacctcaggtgatctgcccgcctaggccttccaaagtgctggaattacaggcgtgagccaccgcgcccggccaagtatcagtattttggaaagttgcccaggagattccaatgtgcagccaaggggaagaacagacggagccaaggcgcggggatcaaggataaaggagacaagctccactaggcagagccgggcctcttctckacgtcacgccctggcgttgctgcgtggttcgtttactcaaccgagaataggccggtcctcgctgtagcaacacgacccgcacaactgattgagtgggaagctccgcagaggcggactccagcctcccgccaatgaacgggtagggtcctcccggcacagcgcggccacgccccctggacgccgcggtcccgcccccggacrccgctgtccsgctcccgggctgtcctcagcargggcgcggtctggtactcgtgcgtcttttatcgcctcagtttccctccgccgactagcgcgcggggcccggttctccatcgcgcgcacggcagcctagcgcaatgaggcgggcagcactgcggtaggtggcggggcgtggaaggggctggcagggcggtagcctggggtgccatcgtcttcccctagagcttcgggctggccccggcggaagaagtgggccacgcatgggcatttgggctckatgataaggggcgctcgcccactgtacctccgaccggacataagcccgccggcctttggttgggagaacctcgcccccactttggcgacttctagcactgagtttgatattaaaagcaaagcagcacttttaagggaggaagttgggtgttccctaaaattcctttggccttgctcatccggggtgtggttggtagccgcgtcggggtagccccttgtcagaaagataatatttggagttctatgttacctctagcccttcatcttcctttggagaacatttttaggattaaatgcttgacctacttcggctcttacttaagtttgttgtaacattggcagagattacagggtaccttttggctcccaggaccctaggactgtgcgtctaggaccctggtgccaatttgaacttaactttaatgagccgcaaagcccttataagaggctgggtgctttgattgggccacgtgggtaagggaggatgcctttttgtatatgtaatcttcccagctggcacagttaaggcctgagggccttagactccagagcgtgtctagctctccctaatccctttcacccgagcatgccaccctttccaagttttctgcctggctgcatcccagggggctcacacctgctccagtttctgaagttatctcgctgccagtgggcctgtccccctgatgtgactcatagtgcttttgactcacattaaccccatcaattctcttgggggtcctggatatctctctctctctctctctccctctctctctctctctctctctcactcactcactgttcctggggactttgttatcagttgtaagggttctgtcttgtttatagtacttaaaaacaaacaaaaaacctttgttaaactatttgaaggcagactgaaagtcattatgagaggggccacagttgactttagcttgcaatgtgaaaggtcttctacaaaagctccatggtcttgttcaggtgctttctcttataaccctgtgttcctttcttgaaaattctattgaggccgggtgtggtggtgcacgactgcagtcccagcgttttgggatgctgaggtggatggatcacttgaggccaggagttcgagaccagcctggccaacatggtgaaaccccgtctctattaaaaatacaaaaattagccgggagtggtggtgcatgtctgtagtcacagctacttttggaggctgaggcaggagaatcgcctgaaccggaaggcagaggttgcagtgagctgagatcgcgcccctgcactccagcctgggcaacacagtgagattctgtctcaaacaaaaaactattgaaccttaagcggataatctcttagtgtctagtgagaggaggagttcacaaatgaatatagactgagatgattaggttctttgactggtgggcaacctttgtagcttcttttcttttttagacttgcaagaggcacctttgtttagtctctaaatagaggttatttcctcagagtggagggcatatgagtgatattgcctgttattgcactgaacactcttccttgccaactgctgtaagcttgggacccagggctgagccagggtgagttatgtgactccccaggtaggccatggaggccttgagtttttttttttttttttctctttgaaatactttttttatttctttgggatatatgtccagaagagaaattgctggatcatatggtagttatatttttaatttttggaggaactgcctcattatttttcaaaatggctgtaccagtttacattttcaccaatagtgtacgagggttcccttttctctacatcctcaccaacacttgttatcttttgtctttttgtaatagtcatctttttattattattattattatactttaagtttagggtacatgtgcacaatgtgcaggttagttacatatgtatacatgtgccatgctggtgtgctgcacccattaactcgtcatttagcattaggtatatctcctaatgctgtccctccccactccccccgccttgagtttcttgatctcctttgattggaaaggttcagttacaaggtcctgggatttgagtgttgcaaaggcctctccacagtaaaggcctagaggttttgctataagtaagactcctgagggcttatcaggagataagccagtaaccctgaggtactgaagtgttgagtattgattaaaaccattctcccacctcctccacctcagtgcggtgtgtgtgtgtgtgtgtgtgtgtgtgtgtgtgtgtgtgtgtgtgtgtgtatgtattgggggagatcggaagaactgggctctatctggactctgctggtgtgcctgttgactggcactgggggaaagtcgtctgaaactggggcctcagtttcttaaggaggttggtttgaatcagaatcttcaaatatagggggatctgagggtacaaaaagggtctgtgcacctcctgaaatagtatataccattgtgtgtgtgagcaaaaatgtattccaacccttcccacgcccgctcgaggtccacagtttccatcagattatcagtaaataggataccaaatgtagtgaaaagttaccattacatgccaggcgcggtggctcacgcctataatcccagcacttcgggatactgaggcgggcagatcacttgaggtcaggagttcaaaaccagcctggtcaacatggtgaagccctgtctgtactaaaaacacaaaaactagctgggcatggtggtgcacagctgtaatcccagctgctcgggaggctgaggctggagaatcgcttgaactcgggaggtggaggttgcagtgagccaagatgttgccactgcactccagcctgggtgacagtgagactgtctcaaaaaaaaaaaaagttaccattacccgaatactcttgaatgctatgttgacagtatgatatagatttattattaccaatatgctattggtataagcaacatttttttaaaaagtgttccaattatgcctttgttgtgccacaggaatgtatttccaaattttttaaggcagcatgcaaagcaatggggctctaggactacaattttccaaataaattggcccaagtgtttctctatattcattaactcccttcttttctctcctcatttgattctatgtttggcagtggtccgtgatagtgcctggcttaggctatctttcctttttttttggagacagagtcttgctcttttacccaggctggagtgcagtggtgcgatcacggctcactgcagcctcgacctccccggggctcaagtgatcctcccacctcagcctcctgagtagctgtgaccacaagtgtgcaccactacgcctgactaatattttaaaatttttttgtagaaacgggatctccctatgttgcccacactggtctcaagtgatcctcccgcgttggcctctcaaagtgctgggattacaggcgtgagccattgtgcccagcctggttctttttgatctttaggggagactttggagaagcatgactttctggaataatgatagctagagatttttgaggacttgtcagtatattagacatgctcttctagacgtgcccttcagggtttaatatgtgttaattcctttatccttttgacaatcctatgggataggtagtattattatccccattttacagatgaggaaactgaggatcagggaggttaggtaacttgtctaaggtaactcagctaacaagcagcatgatygggctcttttttttttgagacagagtctcgctgtgcagtggcacgatctcggctcaccgcagcttcckcctcctgggttgaagcaatactcctgcctcagactcccgagtagctgggactgcaggtgcccgccascatgcccagctaattttcatatttttagtagagacggggtttcaccatattggccaggctggtctcaaactcctaacctcaagtgatacgcctgcctcggcctcccaaagtgttggcattacaggcatgagccactgcgcccagcctttgggttaacccctatactgtattgcctctcacacaaacaggatggaatgattttcatccctcttcagaaaatgctgcttcttagtgtaataaaacaatttctgtgtatatgtgtatttattcaggtatgtgagactggttatatagctcctgttagtgatgcgtattcagggtatttagccattcagaatcagatcccatttcttatgttggatacatttaacgtgtctattatagttcctattaatgtgttgggggtcatgatttttttgctctttcagctaatggtagcaatagaaaggattagctttttccagtgtgttctttaaaaccagatatattcagttgtagaatgctagtttcttttttgagatggagtcttgctctgttgctcaggctggaatgcaatggggccatttcagctcactgcaacctctgcctcctgggttcaagtgattctgcctcagcctccagagtagctgggactacaggtgtgcgccaccatgcctggttaatttttatgtttttaatagagatagggtttcaccatgttggccaggctggtctcggactcctgacctcaggtgatctacccacctcagcctcccaaagtgttaggattacaggcatgagccaccatgcctggctgcttgtttctgagatggaagaatgaaggaatacttactctgtttccttcagtaaggcatatgaacctatagaagatacataaaacaaaataatgaaaaaaatggaaaattcaaatcacgttctgagaaaatgcagattagatggtcaaaaacaaaaagacggccaggtccggtggctcatgcctgtaatcccagcactttgggaggccaaggtgggcagatcacagggtcaggagtttgagaccatcctggctaacatgatgaaaccccgtctctactaaaaatacaaaaaattagccgggcgcggtggcggcgcctgtagtcccagctactcgggaggttgaggcaggagaatggcgtgaacccgggaggcagagcttgcagtgagccgagatcgcaccactgcactccagcctgggcgacagagcgagactctgtcttaaaaaaaaaaaaaaaaagacaaatattaatctgtatacaaaagtacaggaattgaatatttatcgtgaaaaagtgaagctaaaatatttaagagagaggcttgttagctgtgtgattgaagaataaacagatccaaaaccccaaaccctccagcaagaattttggtcttagtggaccagcagggattgtattgcaaccaaataagatgactggtgactaagaagttcaattagccaatgagtatgtgctcatatttctgtgttctgtgcaattagatgatttgacttggtgaaaggataaggatttgttctaacagcacagtgtcaaaactgcatgtagattttacagaatactgtaaatactgagaggctttctctgaatgctgtcattcagaagagaaacctatagtagcttggtctgtaaagaaaactaaaaatatctcttttttttgttgttagtcattgcttattcccacattaggtggtgagaatttactagtaaattgaactggaatgagtgacagtatctggggttctgggttttttttgtttgtttgttttatttttgtttttgttttgagacagagtcttgctctgttgcccaggctggagtatagtggtgtgttctcggctcactgcaacctccatctcctgggttcaagcgattctcctgcctcagcctcacaagtagctgggattacaggtgcctgccaccacacccggctaatttttggatttttagtacagacagtgtttcaccatgttggccaggctggtctcgaactcctgacctcaagtgatccacctgccttggcttcycaaagtgctgggattacaggcatgagccaccacgcctggcctgcggggttcttaacctattcagtgccttgccttcttcaactgtgctctcacagatcagtttattaatctgtgatattgcctgtgtgctacccctgacataatattgtgtgattaggagtcaatgcttaagcaataatgaaccaaaatcaacttattttgggagagtaggttaggcacatttaggtagacagcttttattttttatttttttgaagcagggtctcactctgttgcctaggctggagtgcagtggtacaatcttggctcactgcagcctcgacctcctgggttcaagtgatcctcccatctgagcctcttgagtagctgggaccacaggtgcatgccaccacgcccgkctaatttttgtattttttgtagagatggggttttgccatgttgcccaggctggtcttgaactcctgggctcaacctgtctacctgcctcagcctcccaaagtgctgggattacaggcctgtgccaccgtggccagtagatagcttttattttattgtgttgggactctagaaaatttctgcgtaagttaaataaatactttctttgcatctggaaagggctaattcaattttcaaagtttactttataattgggtttatcttatttattgaggaaatatggtgygataataaagaacagaataaattgttcataatgagtttgctcagttgtttactaaatcgattatggacttctgaaactaataaaatagaaagaccaataataaatgcattaaacctagttgccgtcttttatttattttgtagataattacctaattggtctctgctctcaagaaatgtttactctagtgggagagatgatttatggaatagcctcatgaaaacatacatatacttgtgaaacagctacagactcctacaagacaatatatactaagggtgatatggccagatactctgggaggagggtaggtctttagggttgccagggaagaagctgtgggatctgctctgtgttttatcttgttttataggctttgtgccttgggcaaagggcagcttactcctggaagaggactgactcaaggaccccagaaccccaagaaacagggaatcttccacattcatgaaggcaagcatggtgtctctgtttgatgcctatgtggtgaaaaaccttgttttacttttatttgaaaggtatatagagtgatagtttagagcaaatgaggcatattaaaggtagatctttcataaacatttcattgacaaaatgaccaggatagctgcataatattaatagcttcagatagaagtcacattcagattttgaactattgttcctgggagccttgaggactgagctcttttagttaggtgatttccacttcctgtgtgtaggttctgaaggcatggaaaaaaagagatgggcccattagttgtatcaagtaaacactcctagtccatagttatgttcgagggatcctgttagtccatgcttaattaaagttaatttcaattaccaatatgatacgtaaactatggattgtctttattaaactaggagtattcgttataattaaaattgcggcttctttaaagggtccaaataaatttatattatgtgtgtatataaatatatatgtaagtaaaattaaaaagtttttccttcttggccctcaatacttgcctctcttcttacactgattaagctagtagtaattattttatgtcagtgagcatcagtagtccatgtactatttgaggtactttctgtccattcttttttttttttttttttttttttttttgggatggagtcttgctctgtcacccaggctggagtgcagtggcaggatctcggctcactgcaacctctgcctccctagtagctaggattacaggcatgctccaccacgcccaactaatttttgtatttttaggagmgatggagtttcgccacgttggccaggctggtcttgaactcctggcctcaagtaatctgcctgtcttggcctcccaaagtgctgggattacaggtgtgagcctttttttttttttttttttttgagatgaagtctcactctgtcgcataggctggagtgcagtggtgggatcttggctcactgcaacctccgcctcccaggttcaagtgattctctgcctcagcctcctgagtagctgggattacaggtgcccaccatgccaggctaatctttgtatttttagtagagacggggtttcaccatcttggccaggctggtcttgaactcctgacctcatgattcacccacctcggccccatccattcttttattcaaggaacttaggaggaaaaaatcagaaataagactaagttactaatggttgttgtttgcagttctctaacatttagttgtaattatacatcaaatttatggtgtatccaaaattgtttgatagaaaaatcaaccatttttcatgaaagttaaaatgcatgttcatataaattatatttggttttgatcagttagttattgaaggactgaggattgctatagttaatttcctataactggaatgtatattttgaagtgctaggaaaaacacataaactcaacacagtatttgaaatactacagatttatcttttagttttgaattattgctggttctctaattgattttccctttattcatatagcatgttcatctatacatgtgaatcatggtgtgtgtggtaattagtatcagcttttcttttaagagcttaaattttgtaagcactaatatacgcttgcacttttgggcagtggcattaactaaaattgcattctttgccttagcttgatgtaagtctttgcttcatttttctggcttaaacttttctaacaaccaggagactataaatatatgagaaattaattataatgagactcagatttggatattagtattagtctctgaactaagtaatttgatctattactgcgtataagaagataggtgggggccaggcgcagtggctcacacctgtaatcccagcactttgggaggccgaggcaggcggatcacctgaggtcaggagttcaagaccagcctgaccaacatagtgaaaccccatctctactaaaaatacaaaattagcagggcatggtgatgcctgcctgcaatcccagctactcgggaggctgaggcaggagaatcacttgaacccgggaggcggaggttgcagtgagctgagatcgtgctattgcactccaggctgggcaacaagagcgaaactctgtctcaaacaaaacaaaacaaaacaaaactacaaaaattagccgggtgtggtggcacagcgcctgtaatcccagctacttgggagactgaggcaggagaatcgcctgaacccgggaggtgraggatgcagtgagccgagattgtgccaccgaactctagcctgggtgacagagtgagaccatctcaaaaaaaacaacaaaaaagaagataggtgggaatcctgttcatatctccatcataatggctcttactggctaacactgatacagccccattaagtgaataattgaagttatccttttttgtttgtttatataaaccctagtgattggcacaaaggtattcatttgtgcacctttaaagagacagtatagttctttcaggtttttagggagcagaggcttgatcctgtccctgagctgtttgttgtggcattaaatggaaatctatggatctttaaatcttttgagtgcatgaattgctttttgtagttcttgagctcattgccataatccgtttctcatatttctttgtttcatggaatgacctctttatttttgtttcagttcgagataagttgcgggagatagtaggagcatccacaaactggaggtatgcatctttgttttcattcattcttytcatccccaaggtattatactacactgtatttaggctcagttgatggtctcacagtggggatggggagccctatgttcagagataggttgagaagtattttgcttgggggagaaggtcaacatttcaacatactcatcagatgacacctcattgtcatgaaagaagatgatttacgtatattctgcattttcaaagtgcatttaggtgtatattacttcactgattctcataacaaaacttgtgacgtgcttacgacatatgttcctgttcctttttttacacatgaaactgaaactcagagattgaatgattaaatgtcagggtttgggacttgaacccaagtcgctaagtttctctgtttcatgcaacttgactcctttattgcttcttgtcagttcaaaattagtcaggcctcccatattgtctttctctttctcgcagtatttccttgttgtaaagtaggatcatatccctcttggtgtacataattttgaggctaaaatgagatagaaaaaacacgagtgatcactagatatataataatctattgttggtatagaaattatctaatgacttatttttaaattctttatatgaaaaatttcactttactaaaaggtagaaagaatgaatacctgtgtacccaccacctggattccatacttattaatattttgccaaattttccaatatacacatattgcctgaaccatttctaagtaaattatagacaccatgacacttcagcgtgcatcttcagtaaacattttataaaaccagccttcgcttatctccaacaaataagacattctctcatgtaatcaaattgacagcaattccttgctagtatattactcatccatagtcacatttcctcaactgttaccattttgtgtaatagattactccttttaacaaaaatgtttttatagctgtttaaaaaacatcaagatccaataaaggattgcatgttgcatctggtggttatgactctttagtcttccctaatctagagtaatggacagtcgtccttcccctattcttcccccatgagcttgactttaaggaggccaagccatttgtcttgagaatgttccacattctggatttactggtgtcatttaactcattcctctatctcctgtagtttttgtagggtaaacatttctggaaataatactttataagttaagcttagaaagacatcttagctaatgttcttatcaacattgtcgttccgtatccccttgtctttcttttctctttcaccttaatcttctcttctttttcttccctttctgtctccttttcatgttatgttcttctttaccttttgttctgccttccatacttcctttggatatagtccattttccctcctctgtctctctttcctgaaattgaaggcagagagagagagagaactggggctcaaagaatccgagaactgtcaggtgagaaatgggaatataaagtagagtggccaagccattctttagcatatatatttatatgtatatatatatactattttgtccatctctctaaatttttaatttaatttcaaatattctggtctttgagtaaactttttgataagggtgaatatatggctcatttgggtatatctatatcagttttaagttttcttttttttttttttttttgagacagtcttgctctgttgcccaggctggagtgcagtggtgtgatcttggctcattgcaacctccgcctcccacgttcaagcaattctcctgcctcagcctaccaagtagctgggattacaggtgcccaccaccacacctggctaattttttgtatttttagtagagacggagttttgccatgttggccaggctggtcttgaacccctgacctcgtgtgatccacccgccttggcctcccaaaatgctgggattacaggcgtgagacactgcacctggccttaagaatgtttttaagcttgagaaatgataccggaaatgatcaatttcaccaagtggcaggtgggaagggagggaaggaagagaaggtgaaagtaggcccagaccttctttttcctcctttgatggtatcttacyggcctgtgtaccactggaattgtgggctagaactgctcttgttttatgaatcctgcatcctttcttctcagagaccatgtgaaggcaatggaagraaggaaattacttcatagtttcttggctaaatcacaggatggactgcctcctaggagaatgaaggacagttatattgaagttctcttgcctttgggcagtgagcctgrattacgagagaaatatttgactgttcaaaacaccgtaaggtaacacagtgctatttttatgtatttgtttttatttccttgttttataacaattttgaaatataattcacacaccatacaattcgcctgtttaaagtgtacagttccatggttttgatatatttagagagttgtgcatccatcaccacagtcaattttagaacattttcatcaccctgaagtgtgttatttatttttaaagggagaccaacrtgatttgcatttaattcactgtttgctttatttcacagatttggcaggattcttgaggatcttgacagcttgggaggtactggtattattttagtctttctaatagatacctacagatatacattgaattctgtgactggaaagggctcttttattctttaacctgcacagatgatgatattctaaagtgcacaaaaaaagaaggacatcggccgggcgtggtggctcatgcctgtaatcccagcactttgggaggctgaggcgggcggatcacttgaggttgggagtttgagaccagcctgaccaacatggagaaaccccgtctctactaaaaatacaaaattagccagttgtgttggtgggcgccgtaatcccagctacttgggaggctgaggcaagagaatcacttgaacctgggaggcagaggttgcggtgagctgagatcgtgccattgcactacagcctgggtaacaagagtgaaactccatctccaaaaaaaaaaaaaaaaaatggcatctactacttctgaattgtcataatttttttcttataaatgtagattcctatttaatggaggtatagtctgaataatctttcttactagtaactttaaaaaaagaaagtcttaaacttacagaaaagttgcaaatacagtataaagaatttttctgtggccaggcgcggtggctcacgcctataatcccagcactttgggaggctgaggcaggcagatcacaaggtcaggagatcgagaccatcctggctaacatggtgaaaccccatctctactaaaaatacaaaaaattagccaggcgtggtggcatacgcctgtagtcccagctattcaggaggctgaggcaggagaatcacttgaacctgggaggtggaggttgcattgagccgagatcgcgccactgcactccagcctgggcgacagagtgagactccgtctcaaaaataaaaaagaaaaaaattttttgtccctgaattatgtgagaataagtggctgacatgatgccacatcacccccaaatatttgaatatgtctttcctacaaacaaggacattcttctacataactacaaaacaaccataaaaaatcaggaaattaacactgatgtgtcatactgtctaatcctcaggtcccattcaacttttgccagtggtccttcatagcagaaggatccagttctgaatcatatgttgatttaattgtcatgtcaggactagttccttaatctttctttgactttcgtgactttgacatggttcttttgtgtattgtccctcaatttgggtctgtgtggtgcttcctcatgattagctttgggttatgcatctctggcaggaatgtcacagaagggatgctctgttcttattgtatcctatcaagtggtgcatggttttgatttgtctcattactgatgatatcagctttgcttactggatgacgatgatgtctgccactgttcttcactgtaaagttactcttttcccctttgtaattaataagtaccttatgtgggggggggtggcaggtaactttgagaccttcatcagactttcaattcattatttttaaatcagtatggactcaggaattcctatgttactgaatggactataatatgttactatcatctatttgatgttcacatgrtcccaggagtgtcccagtcccttcaggctagcttctgtgtggttttctttgatgtgtccccattattctttgagcactttctcactttctggcacaataaaatattctaggctcatcttatgcttttccctgccccagtcctagaatcacccacatctccaaggagcccttttttgaaatggagaatgatattttgaagtggaggatgatattttgaaatggagatatgtgcgttgggagtggtcattattcctgggtatcactgctcccataccctcttagtggaggagctgggaaatatatgtgcatatacgtacatatatgttatttctaaatctttgtacagatgtatgtatgaaaaccatgggatcgcactgatagctccaattccagttcagccaccacggggttcattctcatttccttcctttccatatttgtaattcccttctccaactggctccattctccttaatatattgacttatttaatcagttccgctgtatgtgaccartttcctatggctgccacccctcatgcatcatggatgctcccctcaccttacctgggctctggtaccccacaccaggtccccctctgcaggctcaccctcttcattgtgctcaagctgtgacatgctctgccatcactcttgcagcctctctgcaaggatgtcctcctcaccgtgcttggaygccagcaccctactctaggttaccttacttgctcccacctaatgatatttgggctgaatggttgggaaagggtctgaaaaarggttctaatatattgtttaaaaaactatttttttatagagatggggtctccctgtgttgcccaggtttttcgtgaactcctgggctcaaaggatcttcctgcctcagcctcctaaagttctgattacaggtgtgagcccgccgtgcctggcctttttttttttttttgagacagagtctcactcttgttgcccggcctggagtagagtggtccgatcttggctcattgcatcttctgcctctgggttcaggcgattctcctgcctcagcctcctgaacagctgggattacaggcacccgccatcacatctggctaatttttgtatttttagtagagacggggtttcaccatgttggccagtctggtctcaaactcctgacctcaggtgatctgcctgcctcggcctcccaaagtgctgggattacaggtgtgagccaccatgccaggccctaacttttaaaatatagatacaagcttgttgttaagcttacrcctagcaactacttttctctagattaaataaacccagttaaaaattcttggctgggcacagtggctcacacctgtaatccttgcactttgggagatcgaggcaggaggatcgcttgaggccaagactttgagaccagcctgggaaacatagtgagtccccatctctacaaaacccaaaaaattagctgggcatggtggcatgcactagtagttccagctactcagaagactgmggtgggaggattgcttcagcccaggaagtcgaggctgcagtgagctgtggtgacaccactgcactacagcctgattgactttggtttgcttaggtgtccttatatatacaaactcccctgccactaccctctttcttgctcattaacttctgttgatggccagtccctttaacctgttcacttgattctattccttctatttcttcaaggaactgccttatcacttggctttctccctcatttcctgagccttttctcaacttcacttttccctcaagttataaacatattcaaggttcttccatcttaaaatgaaaaataggccgggcagggtggcttacgcctgtaatcccagtagtttgggaggccgaggcgggtggatcacttgaggccaggagttcgagaccagcctgggcaatatggtgaaaccccgtctctactaaaactacaaaaagtagccgggcgtggtggtgcgtgcctgtaatcccagctactcgggaggctgaggcacgagaatcgcttgagcctgggaggcagaggttgcagtgagctgagatagactccagcctggacaacagagcgagactctgtctcaaaaacacaaaaattagccgggtgtagtggcatgtgcctgtagtcccaactactcaggaggttgaggcaggagaatggcttgaacccgggaggtggaggctgcagtgagctgagatcgcaccactgcattccagcctgggtgacagagtgaggctctgagtcaaaaaaaaaaaaaaagataagtaaaaaatcctctttccttataacacctcacactttcttccttacttcatagctcactttctgaaaagaacctagaaaatcacctgctctcattgcctctttatgctaacttcctgttaattaaayatttcccggtcrgctgtgttccggcttctgctcctccacgccattgaatctgctcttgccaagctcgccattggcccctttactgcacagttgaatggatacttttcagggctgacctgacccctttgtggcttcttatatcgtccagcccatccttgggctttggtgacatttccttctgcttctctggctgctcttttgtagtcccctttgtaggttcctctttttctgttgatcccttaaatgtaggttatccccagggttttgtcttctgccctttcaaaaactgattatttttttaatttattttattttattttgtttatttattttttttgagctgtagtttcgctcttgttgcccaggctggagtgcaatggcgctatctcagctcactgcatcctccatctcccgggttcaagggattctcctgcctcagcctcccatgtagctgggataacaggcacacaccaccacgcccggctaattttttgtatctttagtagagacggggtttcaccatgttggccgggctggtctcgaacttctgacctcaggtgatccactcgcctcrgcctcccaaagtgctgggattacagacgtgagccactgcgcccggccttttgaattttataatttgttcatattaattaaattttaaggcattttaaaatttaacaataaaattgttaaatcttttaaaattatttatttagtttttgagacagggtctcactctgtcacccaggctggagtgcagtggcgtgatcacagctcactgtagycttgacctcctggctcaagcagtcctcctgccttagcctcctgagtagctgggactacgggtgcacaccaccatgcccagctaatttttttgatttttagtagagacaaggtctgccatgttgcccaggctggtcccaaactgctggactcaagggatccccccacctcggcctcccaaagtgttgggattacaggtgtgagccactgcgcccagccctattttttcagttgaggttaaaatataaaatttaccatctttatctttttttttttttttttttgagacagagtctcactctgtcacctagactggagtgcagtggcaccatctcggctcactgtaacctctgcctctcgagttcgagcagttctcctgcctcagctttcgacgtagctgggattacaggcatctaccacaacrccyrgctaatttttgtatctttagtagagatggggttttgccatgttggtcaggctggtctcaaactcgtgacttcaggtgatccccccacctcggcctcccaaagtgctgggattacaggtgtgagccaccrcgcctggctcatctttaycatttttaagtgtactgatcagtggtaaaaactacatttatattacattttcctccgtctcttctctacccttcccttctgcccttttttgggttgacgttgcagattctctataaactcatctactcccagtgtttcagttgctatcagtatgctgaatacttacaaagctacattttctggcctgcttttctgagtttcaatcaatttttcctcttagctactagatttatttttcttttttagagacagtctcactctgttgcccgggctgtagtgcagtggtaaaatcatagcctactgcaaccttaaacttgygggctcaagtgttccttctgcctcagcctcctgagtagctgggactataggcacactgcaccatgcctggctaatttgttttgtttttttggaatagggtcttgctctgtcacccagggtggagtccagtggtgcgatcaccactcactgtatcctcgacatctcgggctcaagcatcctcccatcttagcctctcaagtagctgggaccacaggcacacgccaccatgcctggctaatttttgtattttactgtagagacgggatctcaccatgttgcctgggctggtctggaactcctgggctcaagtgatccatctgcctctgtcttccaaagtgctgggattacaggcttgatccaccatgcctggcctaatttttaaagttttttgtagagacaggggtctcactctgttgcccaggctagtctcaagctctgggctcacgtgatcctcctgctatggccttgcaaagccctaggattacaggtgtgaacaactgtgccctccccaataccttcatttggatgtgccrtaggctcttcaaattcaacgcattgaaaatggcccattcttttcttcctatattctctttttattttgagacagagtcttactctgttgttcaggctggagtgtagcggcatgatcatggctaactacagtcttgacctcctgggytcaagcaatcctcctacctatctcccgagtagctgggactacaggcatgtgccaccacacctggctaacttttgtgtttttggtagagatggagtctctgctgtgttgcctgggctggtcttgaactcctaggctcaagtgatcttcctgccttcgcctctaaaagtgttgggattacaggcatgagccactgtgcccagtctctcttctctttttcagtgactagtacaccacgcttacctatgcaagctagaaaactgaatttattcaagtcttctcaggtttaccttcttcttaactcatagtcttttcatttctactcctgttgccataggttggagccatctgatttctttgctggacaaagacttttaaatggagtttattgcctttagcctatcattcccccagtgygtcctttagcaggtgcatagatggaaggatttacacttactcaacaagtatttattgagccacataycttgtctgagagtttgtgatacaaatttgaatggatcatgggggaagcagggagccaatcaacatataatcatacaacttttttttttttttttttttttttgagacagtcttgctctgttgccaggctggagtgcagtggtacgatctcggctcactgcaacctctgcctcctgggttcaattgattctcctgcctcagcctcctgagtaactgggacgccaccacrcccggctaatttttgtatttttagtagacatggggtttcaccatgtcagccaggatggtctcgatctctcgacctcgtgatccgcctgccttggcctcccaaagtgctgggattacaggctgagccgccgcgcccggcccaacgtataattatacgactttaaatgagttgatatctgtaaggtgcatgaaccatgcatggcacatataaatgcttgttaaaatatggaaagtatacagataaccacagggtggtataggagtcaagggtgttatggggaaggagggataactgagtgaaataattgtttcatgattaattaggacaaagccaggaggaaaacaggtagccaagtccttgtgctttgtttctctttcctgaagatgtttgatactgtcagactcatgtgctgagttcttactctgatttgggcactgagtctctgtggagtggtaacaagctgtctggtgggtctgggcttgcttcgggctttgatttcttcaccaaatcttaaaattgagggggcagtcagattggaggatctcccaaatccttcaatttataaaagtgtttgatcctaggataagatgatcaatggaatattaggggctggatcttccaagcgagacaaggcttttcatggatctcagggaggaaattttaaatgttgggaaataattctgcctttttaaaatttggtacactcctgtttccctgcagttcttatttgttacatgcacaacaaaatccactccgccaagatgtctcctttatcgatagttacagccctggtggataagattggtaagtgatatcattttctatgcatacttagaattcttagtaatttcaagatattattgagattacaggacgtactctccttttatgggaattttttttttttttgagacggagttttgctcttgtcacccaggccggagtgtaatggcacgatcttggctcactgcaaccttcgcctcccaggttcaagcaattctcctgcctcagcctcccgagtagctgagattacaggcatgtgccaccacgcccggctaatttttgtatttttagtagagatgggattacaccatgtcggccaggctggtctcaaactcctgacctcaggtgatccacctgcctcggcctcccaaagtgctgggattacaggcatgagccaccgtgcctagccctttatggggaattttaatgtatatatgcatatgaaaatgtctagaatgctgtataccaagatatttattataattaggtgggttttgcatgattccagttttattttttatattctttgcwttttctacatttttcaaaaacacatgtagatttcttctgcgtgtcaaaaaagttattttagttttgaagacaaaaaagaaatgtagtggaatttgccataatttcctaattgttcatatttacagaacagaaaatttttggtatgacttggaccctgattgacttctgttttgcagatatgtgtaagaagagcttgagcccagaacaggacattaagttcagtggccatgttagctgggtcgggaagacatccatggaagtgaagatgcaaatgttccaggtaaatatgcgcctgaagattgtccactgtttaagtaaaaccagctagtctccatgcaagaaaagcttatttacctatgtatctgtagacaggtatgttgctcactgcttctagaaaaacagttgaaagctcatgtcatayggatggtgggttattaatatcctccttgtggacaaagcctgacgtactatttggtgtttatatttaatatttatttctaatcatatacaagtccatgttaaggtgtttgtttctggttctgcctaggagaatttcacagaagtctgtgttatggtaggagtgaatggaattgattactgtattcatttcccaggactgctgtacagttggccctctgtgtctgtagatttcacatccacagattcaaccaaccatggattgaaaatgtttggaaaaaaacagtgaaaaataatataaataaaacacaatacagtataacaaccatttttttaaaaaaatagagatggggctgggtgcagtggctcacrcctgtaatcccaccacgttgggaggctgaggtgggcagatcacttgaggccaggagtttgagaccagcctggccaatatggtgaaaccctgtctctatttaaaaaatacaaaaattagccaggcttggtggtgcacgcctgtaatctcagctacttaggaggctgagggttgggaaccgcttgaacccaggaggtggaggttgcagtgagcygagattgcgccactgcactccagcctgggcaacagagtgagactcgtctcaaaaaataaataaataaataaataaaaatagagaaatggatatggagtttcaccatgttgcccaggctggtcttgaacttctggcctcatgtggtcctcccaccttagcctccccaaatgctgggattacaggcatggctggccttaaaacaactatttatatggcatttatattgtattaggtattataagtaatccagagataatttaaagtacacaggaggaggtgcataggttttatgtaaatatgaccccattttatataggggagttgagcatctgtggattttggtattggcgggtggtggtagggagttctggaaccaatcctgcgtggattccaaggggcagcggtaccacaaagtaccataaactggtggcataaaaacagaaaatgtattgactcacagtttggaggctacgaatccaaaatcaaggtgtcagcagaggcatgttccctctaaaacctgtaagagagaagccttccttgtctgtttcttgcttctggtggtttgctggcaatccctagcgytccttggcttccagctgtagcacttcattcagtctctgcctccgtcatcacatggtgttctctcatgtgtctctgtctctctggtgtctcttgtcaggatgctgctaatcatactggattaagggcccacgctactccggcatgacctcatcttaactaattatgtctgcaacgactctatttccaaatacagtcacgttcacagttatgggggttaggatttccacatgtctttttgggggacacagttgggcccttaacagtcatttgagctattacagtagttaggaacagctaatctgatgagtaaaactcagaatagctattacaaacaattgaagaaatttgacaagaaaaagtacctcaaagaggataacaacacagaaataaaatgattcagtgtatgtccaagatttcattgtggaaaacttatttaagaatgactggctgggcgcggtggctcacgcctgtaatcccagcactttgggaggccaaggcgggcagatcaccaggtcaggagatcgagaccatcctggctaacacggtgaaaccctgtctctactaaaaataaaaaaattagccgggcgtggtggcgggtgcctgtaatcccagctatgggaggctgaggcaggagaatggcgtgaacccaggaggcggagcttgcagtgagccgagatcacaccactgctctccagcctgggcgacagagcgagactccgtctcaaaaaaaaaaaaatgacttattcatttatgccagggtattgagtagaccaggggtccccaacccccgggccatgggctacatagcaggaggtgagctgtgggcaagagagaattaccacctgagctccgcctcctgtcagatcagcagcggcattagattctcataggagcacgaaccctatcgtgagctgcgcatgtgagggatctaggttgcacactccttaggagaatctagtgcccgatgatctgaggcggagcagtttcatcccaaaaccatcccccccagcccaccccattccgtggaaaaattgtataccacaaaactggtccctggtgcaaaaaaggttgggggccactgcagtagacctattattcagatgcattttttcctgctatggaatgatgaagcatttcaccttttggtgaaataaactttcacactttcagaaaaagcctgaagctagctctgtagtagttatttgtcaaaataagtattttttttattcagtactatatgcaagtgattgaatctttcaattccyatgtttgatgtaactgacagtaatactgttttattttgtttgtttgagacagtgtcactctgtctcccaggctggagtgtagtggcgcgatctcagctttctgctacctctgcccctcgggttccagtgattctcatgcctcagcctcccaagtagctgggactacagatgtgtgtcaccatgcctggctaatttttgtatttttagtagagacggggttttaccatgttgcccaggctggtcttgaactcttggactcaagccatccacccgccctcgcctcccaaagtgctgggatttcaggcgtgagccaccgtgcccagccagtaatactgttttaaaaacaaaacattgctgggttgctgctatgatctgcctacagtctttttttttttttttttttttttgagacggagtcttgctctgtcacccaggctggagtgcagtggtgcgatctcggctcactgcaagctccgtctcctgggttcatgccattctcctgcctcagcctcccaagtagctgggactacaggtgcctaccaccatgcccggctaatttttttgtatttttagtgcagacggggtttcaccgtgttagccaggatgatctcgatctcctgacctcatgatccgcctgcctcggcctcccaaagtgctgggattacaggcgtgagccaccgtgcccggcctgttctgcctacagtcttttaaaaaatattcttggttaattcctagtctgctcagtgccatgcacagcagattcctggcacaggacctgccttttagggmatcttgacaatttgcctcttggacaaataggttgaaaaagagatacaggaattattgagagagaaccagtggaactcagtgtcagacaagtaaacacttttgttttaaatttgcattcttcactggctatttgactaataactcatgactcgagtgatcctttttattccagagaagtggtgtggggataagcactctgcctctggtttgcatagatttaggttctaatcccagcactgctgcttcctagtcatgtggctgtggataaaccacttgtctgagcctctgtgttctcaaatgtaacatgaaaatagtaacagagtaccatgttatatggttgtggtaagggaaatttgaaaaaaacccattcatgtgaagtactttggtacagtgcctatcacacagtaaccactgttggaaatttttttttttttttgagacagggtcttgttctgtcacccaggctggagtgcagtggcatgatctcggctcactgcagcctctgcctcctgggttcaagcaattctcctgtctcagcctccctagtagctgagattacaagtgcacaccaccatgcgtggctagtttttgtattttttatacagaccgggtttcaccatcttggccaggctggtctcgaactcctgacctcaagtgatccgcctgcctcggcctcccaaagtgctggaattataggcgtgggccgccgcccccagcctggcaataatattaatttattataaatactgttgaggtggcctcaaatttctattttgggcttgaccttcatacccactttcctgagtgctccttatatttctccacctagacgtgctgttgctacctcaagttccaataaacagtatgttccaaactgattggccccaattctcatcctcctccagtcttccctttgccagcctcctgcttcctttcccatgcagccttttgccaggtcttgcaaattcatcacccacagcaactcaccagaattctttctccccatatccttttggccctgtgttttattcaagtcctcactgcctcttgtgtgagtgccttaaccgtcttttaattaacctgactttctctagccggacctctctcttttaattttatgcatttttaccacataagtcttccaaagctgatcttgaatcaggtcacttcccttctcagaaaccttcagtgaccattcattatctctggattaaagtctaaactcctttgactagcccaggtgcagtggctcacggctccaatctcaggactttgggaggccgaggcaggtggatctcctgagctcaggagttcaagaccagcctgagcaacatggtgaaaccccgtctctacaaaaagtacaaaaaactggctgggcgtggtggccatgtctgtaatcccaacactttgggaggccgaggcaggcgaatcatgagttcaggagtttgagaccagcctggccaatatggtgaaatatcccatctctactaaaaatacaaaaattagctgggggtggtgccacgtgcccgtagtcccagctactgcggaggctgaggcagaagaatcgcttgaacctgggagatggagttttcagtgagccgagatagcgccactgcaccccagcctcggcgacagagtgagactcggtctcaaaaaaaaaagtacaaaaaattagctggtgtggtggcgtgcgcctgtgatcccagccactcgggaggctgaggtgggaggatcgcttgaggcaggggggtggaggttacagtgagccgagattgcgccactgtactccaacctgggtgacagagtgagaccccatctcaaacaaaaaacaaaactcctttgattaattagggcccaaggggcttcataaactagccccagcctacctttccaactatattccctttgacttgtcatttatataccttcttaatgctcaccactggccttcaagcatcgtaagaatagggagttattcatgtttgcgttctagtgcttggcactagtgggtattcatgatagtaaaccataacttacataggttgagcattgcaactctgaaatctgaaatgctccaaaatctgactttgagcactgacatgatgcccaaaggaaatgctcattgggtttggaatgttcaacctgtaagtattgaatgcaaacattccaaatccaaaaatcgaaaatccaaaatagtctggaatacagaacacttctggtcccaagcattttggataagggatattcaactgggagtgagtgaatgagtataattgctgatgctttttcttttgcctgaaattctcgtgctctggctctgtatccacattctttctccctgtgctccaggataacttcatgctcaatcctttccttattctcccagcatgtaacacctgttcctcaggcctcctccctcaataccgtctctttgacttgctctcctggcacctgctagtctcctacagagctgtgcatgaatatgtcttttctcttccactgcggactctactcctcaacrataggacctgggtttgagtcacctagctcacttcctgacatccattcatttaacattcatttagcaatcatttattgagtgcctgtcctgtgccaggcatacagcagtgagcaaaacagataaagttccattctcttggagttgacattctagtagtgcctagaacctgcctccttcattcattggcaaatattgatcaggtatctgctatttgctggtctttgtgctaaatactagggatataactgggggaaaatggtctttgtcctacaggagctcacggtgcagtagggagacagtcacataaacaaatggttatgatatagtatatcgttatgcagtatttttcaacagggacactgttggcatttctggtgggagcattcattgttctgcaggtctatcccctgcattgtgagggatttagctccttggttacccccctccatagtaatgccccccaagttatgtgacaacaaaaaccactctgtatttttcaaatgcccgcctattagagtgacatctacttctcttacattgagaaccactgtcaagagaggactgtttctattaagggggctgaatgaaggaggcaaagataaacttggtctggggaatagggatgggggaggggaggaatgtcgtgaagaatgaggctgctgaggaaggcatcaggtaaagatatagacaggaggcagtcaacagcctgttctatcccaggacctctcagttgttagttagctatggctagagaaaaaggtgcaggtatgagcacagtatttggtgaacaactggggagcaatcgtgggctctgttgtggagggctttatatgccacgctaacaggattagcccaggtgctggtggaagaaaggaggaactattgaaaggtttgaatagggcagaggcataatgagattggtgagactgttcctgcaattgagggggagggcagtagtgatgaggcttgtatcatttattgaggagggaacccaatatactctcaggttataaataacttctgtcattactttatggtatgactttcctggaagtacagacttctaggggataaagaaacatcttaaggcccaggcatggtggctyatgcctgtaatcccagcattttgggaggctgaggctggtagattccttgagctcaggaggtcaagaccagcctgggtaacatggaaaaccccatctctacaaaaattagctgggtgtggtggtgcatgcctatggtgtcagctagtcaggaggctgaggtgggaggattgcttgagcccatgaggtcgagactgcagtgagacatgatcatgccactgtactccaacctgggtgatagagtgagaccctcttcctggggagagaaaaaaagaaacatcttaaaacctcagaggcctatgcattgtaaatacaggttgagtattccttacctgaaatgcctgggaccagaagtgtttctgatttcagaatatttatatttactggttgagcattcctaatcccagagttcaaaatcttgaaatgctccaatgagcatttccttgagtgtcatgtcagtgcttgaaaagttttggattttggagtattttttatttttggattagagatgctcaacctgtatttaacttaacccacataatcatctttgattttacctcttcttgggagctcctgtgcccagctatgaaggcataaactgtgctagtggttggcacactacagttccctgaaacatactagtgtttgtgagcatgatgggaggtccgtctgggtaggtgtgccatcaggaggacaggcacgccctgcaagaagctcagattctgaggaaagcaggcaaattaaacgctgatgatactctctgtgacccttgcctttgggtcccagtcttgcacagttccaaactccatgccagcagcccatctcatgcagtatactatttgcgttttgtttgttttgttttggagatgggatgttttctgtcatccaggctacagtgcagggtcgtgatcatagctcagtgcatccttgaactcctgggctcaagggatcctcctgcctcagcttcccactagctggtactacaggcatgcaccaccatgcctggctaattttttaatttttatttgtagttagagaccaggtctcgctatgttgcctaggctgatctcgctttcctggtctcaggcaatcctctcatctaggcctctcaaaatgctgggattataggcatgaggtaccatgcccagcccccgattggactttgaggtatttttctcctctgctaggccacgggctcctttgtcatcctgccattctgagagcctagtgctgtgcctggctcagggtaggcccttagcagacggtggttaatgagagtgcttctcttctttttccagttgcaggctttctctctctctctctctcttttttttttttctttttttttttttagacaggggcctgcaatctcggctcactgcaaccttggcctcctgggttcaagcaattctcatgcctcagtctactgagtagctgaggttagaggcatgcgccaccacaccctgctaatttttgtattatttagtagagacagggttttgccatattggccaggctggtctcaaactcctggcctcaagtgatcctcccaccttggcctctcaaagtgctgggattataggcgtgagcgactgcacctggccagcatacataccgtctgttagaatcgtggtaggtcttcccgataaatccatttctcatatgtacattttctttcctttgttcttcagttacatggtgatgaattttgtcctgttttggatgcaacatttgtaatggtggctcgtgattctgaaaataaagggtaattgctattttttcataattctttattttgaagaatttcaaagmtacataagactggagagaaaactataatgaatgtccatatacctatcacttggacgtaacagttttaattgcaatttcttggccatttttattttaaggcaaatcccagacatgacatttcactcttaaatacttcgggcatcttttaaaaaatgagaatattctcaggccgggagaggtggctcacgcctgtaatcccagcactttgggaggccaaggctggtggatcacttaaggtcaggagttgaagaccagcctggccggcatggtgaaaccccatctctactaaaaacacaaaaattagctgggcgtggtggcacgcgcctatggtcccagctactggggaggctgaggcacgagaattacttgactctgggaggtggaagttgcagtgtgccgagattgcgccattgcactccagcctgggcgacagagcgagactccatctcaaaacaacaacaacaaaaagagatgttgcacaattctgtgaatacactaaaagccgttaaattgtacactttcaatgggtgaattgtgtggtatgcgaattataccttaataaagctgttatcaaaaaaaaacagacttacagacataaaaatcaaatgtaattttttgttaggcatgacaatagtaatgtagttacttaagagaatattatcctttttttttttttttttttaagatggagttttgctcttgttgcccaggctggagtgcaatggtgggatctcggttcactgcaacctccgcctcctgggtttgagcgattctcctgcctcagcctcctgagtaactgggattacaggcatgtgccaccatgcctggctaatttttgtatttttagtagagatgggggggtgtttcactatgttgcccaggctggtctcgaactcctgacctcaagtgatccacccacctcagcctcccaaagtgttgagattacaggcgtgagccaccatgcccagctgagttgtgcaatctcttaaatctgttttaatccagaacagttgtgtcttcccctattgtttcttattcactcgttgagaggctggatcatttgttctaaatagtgtcccactttctggatttgttctattgctttctcatggtggtttgtttgtttgttttttgatcttgtttctctatccctagtaatttctctaaactgaagttagatctaaagccttgtattagatttaggttgagcatatttggtgagagtactacatagatgatgttgtatatctcgtatttcatattgcatcgtatcaggaggtacaggttgtcccactcacagtgatgctaagattagtgtgtgggttcaagcagttacagcctaatctctcctttgtgaagttcagtttttcctcttctgatcagcaacaatctacaggggtgtactttgtcatcctgcaaatagctgagtttcccatcagtctttttccagtgctttcaatgtccactgctgatcattgctttaattagtatcattaggcagtttagagtaattctcaaattttgtcattccttctacgtttgttagctggaattctgtaaagaagagckttcccttaacaactagggcgattgggtttgaaatggagttaggatcaatgcttcattcttgtcttttatttacatgttttcagaataaggagttggttcactagctagtgatgacatgcttttcccagttttttagctttttagaaaagtatcatgtttttaaatttctttttttttttctgtgtgtgtgtgtttttgagatggagtctcgctcagtcacccacactggactgcagtggcgcaatctcggctcactgcagcctctgtctcctgggttgaagagattctcctgcctctgcctcccaagtagctgggactacaggcatgccccattatgcttggctaatttgttttgtatttatagtagagacggggtttcaccatgttggccaggctggcctcgatctcctgacctcaagtgatctgcccacctagggattccaaagtgctgagataacaggcgtgagtcatttcgcccagcccgttttttttttgtttttttattttttttgagatgaagttttgctcttctctccaggttggagtgcattgtcatgtgtcatgagcatggctcactgcagcctgggcctcctgtgctcaagcaatccttccgcctcagcctcctgagtagctgggaccacaggcacataccaccatgccgagctaattttttttctttctttctttttgagatggagttttactcttgttgccccggctggggtgcagtggcgcaatctcggctcactgcaacctccacctcctggttcaagtgattctctggcctcagcctcctgagtagctgcccagctaatttttaaattttttgtagagatggggttttgccatgttggccaaactgatctcaaaatcctgggctcaagtgatcctctcacctcggcctcccaaagtgctaggattacaggtgtgagccactgtcctgccagaaaagcatcattatgaattcatggttgtaatatattacatgtatttcaataaattgcagccattgtttctcttgatgctccaagtgtgccttctttgggcggtgggagttcctctaagctggctcctttccacctgtctgtttgatagcttcctgctgtctgacacaagatgtcttgggctcatcttacgtatttcctgccccaggcctggagtcagccatttctccaagtagtcctggggttccttttagtgggaactggtatttagacatcaaaatctgggcactagaactgtacattgttactagtttgttattgtttccaggcctttttagtggacagagctaggatatattttaaacaaacaaaaaacctcatgagagctgggtgtggtggctcacgcctgtaatcccagcactttgggaggccgaggtgggcagatcacttgagcccaggagtttgagaccagcctggccaacatggcgaatccccatctctactaaaagtacaaaaaaattagccaggtatggtagcatgtgtctgtagtcccagacgatgtgggaggctgaggtgggaggattgctttaacccgggaagcagaggttgcagtgagccaaggtcgcaccactgcacgccagcctgggcgacagggcaagaccctacctcaaaaaaagagcctcatgagtttatatggtcattttcaagtcatttaaccatatagacttcaacttactttacgtcatcttttttctctgaaattgaattcttggtttctaacaacagttacacccaaactgagaaaaactaattgtgggggtagagctggggtgggagggattgctctttgcacaggacagagtccagtggcctgtgggaaatctcatttgtattagaaacttgatttaggagtctgcagtgaaaaatctttgctgctgcgtggaaagctgacttggaaagccaaattaagatagaaaaatatgttggtcccttagtgatctgagggaagaataacacccatctactctggcccttcctgccagccccagctgacctgctgtggccagtgactggcctggggcttgtattcaagcactgaggccactgctgcaagtttcactcccagctgatgcatgtcactttcccaagctgttgtttcaattcttttgttttttgttttcaagacagaggttggctcttgtcacccaggctggagtgcagtggtgctatctcggctcactgcaacctctacctcctgggttcaagtgattctcctgcctcagcctcctgagtagctgggattacaggcacctaccaccacacccggctgacttttgtatttttagtagagacggggtttcaccatgttgaccaggctggtctcgaactcctgaccttaggtgatccacctgccttggcctcccgaagtgctgggattacgagcgtgaaccactgcccccggcctgttttaattcttttgtttccattgttgtttcatcaaatcttttgattctaccacagtgaaatattatcccttttcccttattttttatttcaaaaaatttgatgcttacagaaaagtagatagaataatgcaacaaacgtatgcctttcacgtaaattgtattacatttgcgtaattctcttaccctctctctacaaatacacacatttacatattttttcccatgaatcattggaaagtaagtttgagactgcttcacccattcaggagttcagcatgtatttcctaagaaccaggtatttctccataacctcaatgcctttattatatctgagaaattcaacagtgatacagttatttaatatgtgatccgtattcagatttcaccagttgtccctaaaatgtcctttatagctatcttcctgattcaggacccaatccatcaaggattgtatattgcatttggttatcctgtttctttagaatagtctctctgccatttgctgtctttcaaaaattgatatttttaaagagttcaagccagttttctttttcttttttttttttttttctttttttgagacagagtttcgctcttgttgcccaggctggagtgcactggcacgatctcggctcaccgcaacctccacctcctgggttcaagcaattctcctgcctcagcctcccgagtagctgggattacaggcatgtgccaccacgcccggctaattttgtatttttagtagaaacgaggtttctccttgttggtcaggctggtctcaaactcccaacttcaggtgatccccacccggcttggcctctcaaagtgctgggattacaggcgtgagccaccacgcccggcctaaagccagttttcttgtagagtgttctacaacctatatttgactgtttcctcatgattagaatcaggttaaacatttagcagatgccagtatcctttttataatgttaagtttctagtgtgcaattaaggctgtaactgtaaggcttccctaattgttccagcgttcacatgtaaggcaagcagtaagcactacccaaaatgaaaagcagattctttaaaagtagtaggtgattgttcatcttcaagttttattagataatggcatatcttaaattatattcttttttttcttctttttaggccggcatttgtaaatccactcatccctgaaagcccagaggaagaggagctctttagacaaggggaatgtacattaatttgtttataataaaataaatttgaaaagcacattaattacgctgcagaagagattatttaagattttatatgggctcttcataccagtcaaatgtcttttttttgtttgtttttttgtttgttttttttgaaatggagtctctctgtctcttgccaggctggagtgcagtggtgccatctcggctcactgcaacctctgcctcctgggttcaagtgattcttctgccccagcctccygagtagctgggactacaggtgcgcgccaccacacccagctaatttttgtacttttagtagagatggggtttcaccattttggccaggatggtctcgatctcctgaactcgtgatccgcctgccttggcctcccaaagtgctgggattacaggcgtgagccattgtgcctggcccaaatgtcttattcataccaataatttattgaaattaaaaatatgctattcttttttctttggagtccatactttgaatgattttattgatcagacaatatttattaagtgaagtaatttgttatctccgttttttttttttagacagttcttgctctgttgcccaggctggagttgggcttgggtccaggagtttgaggctacaatgaacaatattgtagtctcgatctcctgggcccaagctatccacccacctcagcctcctgagtagctaggactataggcacgtgccaccatgcctggctaattaaaatttttctttgtagagacaggggtctcactatgttgcccaggctggtcttgaactcctggactcaagcaatcctcctgcytccgcctcccaaagtgttgggattacaggcatgagccactgcacctggcctgttttctccgttttaatgaagtgagaaatgcatctcaatgggataactgcaggtcagggctctggatcaggatgatatcaagtgatctcacactgaaccaatataatttccatgtggaaccaaagactcactgggagttttatgtgkcctctgcagttttctcttggatacgtgtataattttcagtgagattttgaaaggcatcccaggtcagaataccgtgtgctgtagtgcgaccgtcctgatcattgctccttattctcccttgttccagtgaacaaggggagaagaattgccttcagytccacgtcgttactgaaaatggcccccagcgctgaggagaggaccaccatacatgagatgtttctcagcacactggatccaaagtaaggatggtgagattccacgttgggaaaacatttaaaccttggccttttttttttttttttttttttgagacggagtttygctcttgttacccaggctggagtgcaatggcacgatcttggctcactgcaacctctgcctcccgggttcaagtgattctcctgcctcagcctccgagtagctgggattataggcatgcacctccacgcctggttaattttgtatttttagtagagacggggtttctccatgttggtcaggcttgtcttgaactcctgacctcaggtgatctgcctgtctccacctcccaaagtgctgggattacaggcgtgagccaccacacccgaccttttttgtttttgagatggagtcttaccctgttgcccaggctggaatgcagtggcgtgatcttggctcactacaacctctgcctcccgggttcaagcaattctcctgtctcagcctcccaagtagctgggattacaggcgcccgccaccacgcctgctaattattttgtatttttagtagagacggggtttcaccacgttggccaggctggtctcaagctcctgacctcatgtgatctgcctgcctcggcctcccaaagtgttgggattacaggcgtgagccaccgcgcctggcctaaaccttggccttctccagagccacagttgtctgagtgtattgggagtgacttgcaaatgtttttacttttcaacaagagaaccatggcattaacagggtttaataaatattcatttgtacaggactataagttttcggagtcgagttttaccctctaatgcagtgtggatggagaattcaaaactgaagagtttggaaatttgccaccctcaggtattataatttagtgagaaatccgaataggatagcttccgttcatgatatttgtccaagatttgacacacctttaaactggcctttgtcctgtggcattgttaattcctctgttctgtatacaaaggtggccataagttttgtatttattgatatttatttatgtcctgtagsagcggaacattttcaatcggatctttggtggtttccttatgaggaaggcatatgaacttgcgtgggctactgcttgtagctttgggtgagttacatgtaaggcagccttaacttctgagaagcaatttatatcaccccactgaaatgaaacatttcrgaccagtctgggtgtgtgtgggaatatgttatgtttttgaatgaataccacactgataccagctgaatttgatcttcattttagaaggttgtttctctgactttgtaagttcatacattaaaaaaactactgagaaaatacagtgatgatatgtagaaaggaaaagatatagttattttggccctaatctgctcacgatggcgtctcttaccatttctcactggtaggatcttttcccccttctctaactttattcttcgttcatttttattttgcttcagctagttgttagrggaaacaattgagatcatctgaattttgcaatataccccaaattctgtcctttcccccaacagtggttctcgaccgtttgtggtagcagtagatgacatcatgtttcagaaacctgttgaggttggctcattgctctttctttcttcacaggtaggtgtgtgatgagagatgacatacaacttttttttttcatttgagcctagaagtttctatatcaaaaagccactrttttctcttatgactgcctttttycccttcctaatgcagttgactgattatagtgtctataatctgttaggtatgctttactcagaataattatattcaagtcagagtacacagtgaagtggcctccctkcaggagaagcagcatacaaccaccaatgtctttcatttcacgttcatgtcggaaaaagaagtgccaytggttttcccaaaaacatatggaggtaagtagtgattattgcttgtccctaacaaagggaagaacttctaaggacatttttctccttttgaattggaggaagtgtattgatgcctgtcagcacaagagcatgtcttcaggagattttgcttttgagatttggcagccctgaaggccaaagatgcctgtggcccccaggcgggcaagcaaccactggtagtcaaaaactgatccagccaggctgggcgtggtggctcatgcctgtaatcccagcactttgggaggccgagacgggcagatcacgagttcaggagatcgagaccatcctggctaacacggtgaaaccccgtctctactagaaaaaaaaaaaaaaaaaaaaaattagccgggcacggtggcgggcacctgtagtcccagctactcgggaggctgaggcaggagaatggcgtgaacctgggaggcggagcttgcagtgagctgagattgtgccactgcactccagtctgggcaacagagcgagactccgtctcaaaaaaaaaaaaaaaaaaaaaactgatccagccaaaggaaggggacaggagtcatggcctgctcctttgggaatgtggcacaccccggcccaacagtgtatcttgttctgtcccagtgttcccaagtagtcttgtgtttgtatgatgatatgatggttttctacggtattacaagtttctccaaggttctctttcttgtgtttcagagtccatgttgtacttagatgggcagckgcatttcaactccatgagtggcccagcgaccttgagaaaggactaccttgtggagccctaagaacaccacatttgttgaaaactagcactctacccacagtgacgtggtatctgatgaagacctgatcgagtgtattgattttagtattgcttcgtgtcctccacacaggaggaggatgtattcagcctttaggatgatcagaaaagcagaaagagagagtggccggatggggctgaggggagaaagaattattaaacaataaatactttcaagacaattttaattgtgaacctaccatgttgcctcccatcttctgaaaaaacaaaaaaattgagaggctgggcgtggtggctcatgcctataatcccagcactttgggaggctgaggcgggcggatcatgaagtcaggagatcaagaccatcctggccaacatggtgaaaccctgtctctactaaaaatacagaaaattagccgtggtggcatgtgcctgtagtcccagctacttgggaggctgaggcaggagaattgcttgaacccaggaggtggaggttgcagtgagctgagattgcaccattgcactccagcctgggcgacagagagagactgtctcaaaaattaattaattaattaattaattgaggataccattggatgcattcttttcttacacatattgcaactgtcagtatacaaggtttcctgccagggtatttggatgacgttctttaaacctaaccacttgctctgtgctgtctaaatcccatcagccgtacatgattcctttgcttccctctatttcccagcttttgttgtcagagggtagatgaaaagttggggcgaagggatttaacaaaagttactgcatccgtaaagatttgtgggaagatttaggtctgaaaccataccattagaaggtgtttagagatgatctagataaggaaatacaggaccatttggtcattctttcattcaccagacagctatttagcacattctgctagtggctccgcaggatatatctgatttaaaaaataggaaccacaataataatagctgcttatgcttatggagcattgccatgtgctagataggcaccatcctcagcccttggcaggtctgagctcctttatttcttccaatcaacactatgaggcaggttctgtaaccccccttagggttaggccactcgggaaactgaagcacagagagtttaagtaacttcctggaggtccgacgcgtaacatgtggaggtgctgggattcaaaaccaggcaatgtgggtcccgggcactcttgaccagtgcctgtacttcttccaaggaatagagcaagggaggtcataccgaatatcacagtgtcacctaggaagcccaagggaggtattcccgttaatctgcagccaaggcygggcgcggtagctcatgcctgtaatcccagcactttgggaggccaaggcggatgggaggatcgcttgagaccagcctgggaaacatagtgagaccccgtttctacaaaaagttaaaaaattatctgagcatggtggtgtgcacctgtagtcccagttaggaggctgaggtgagtggattgcttgagtccaggagtttgagtctgcagtgagctatgatcatgccactgcactccagtctgggtgacagcaagaccctgtctcaagcaatttttttatattagtttatgtaatgtttattgaaatcacagtgtcaacaagcacctctggcatgaaatagtcacaggagcgaacacaactatctcttggaagcatgcagtttgactcatggaatcaagcatgtgctgtactataataacttgtctctccatgccgtaatgccatcctgactgagatttacctggcccttcaatatagcattttgcatatctacctatgacatgatgggaggtggctaatggggagggatgcgccctggggagttttgtgaatgtgttaagtggagttaagagacctactgcatgctattgtatagattatacattatatatttaaccatttgttgctgtacagtgaagctttttctagtatttcttttttgctattataaacaatgttgcagtaaatatcctaaatactctaaaacatttgacccttaaattattttctttggaaaaatattaaatgagatatttaggtcaaatagtaggcacacgttgaaggctttgaatatgtatttcatgtaacccttcagaacagtttcacacaatcacttacacatcagcaatttccctgaactttgccaatttttatcttttctttttaaaatatctttgccattttgataggtgaagaatgaccttctgctggatgtggtggctcacacctgtaatcccagcactttgggaggccaaggcagattgcttgaggtcaggagttcaagaccagcctgggcaacacggtgaaaacctgtttctacaaaaatacaaaaattagcaaggtgttgtagtctcaccagtgcgccaaaatgtagcagtctttggttgtctgagatagtatccggagttctttgtgtcacagagcacgaacacaagggtgaggttggagcaaaagtttagtaagcaaaacaagaaagctctcggctggattcggtggctcacacctgtaatcccagcactttgggaggccgaggtccggagttcaagaccagcctgaccaacatggagaaaccctgtctttactaaaaatacaaaattaactgggcgtggtggcacacgcctgtagtcccagctacttgggaggctgaggcaggagaatcgcttgaagccgggaggcagacgttgcggtgagttgaggatcgcgccgttgcacttcagcctgggcaacaagagcaaaattccgtctcaaaaaaaaaaaaaaaagctctccgcagcggagagtgggggcctgaacgggttgcccactatgaggttggggtcgggggtttttgcggactgggaaggggaaggaatttgcttagtctgtgagctgtcttggagaaagctagattcagcttggcccgggaccaatcaggagctgaattgatgattcattgagaccactcagcttggcccgggacctatcaggagctgaagtgaaagcttggcccggggaccaatcgtgctgaagtaattcttagaggccgggctcacagtcgaaagaggaaaggaaagtgcccatcggagtcgtcggagcccacagtattaatgcccacgaaaggagaagaaactttttcccgggaacctgctgattatacaaaagacaaagacatttctatgtcaggtcttgttcccttatctgagtgagctggaggtttgtgcaagtttttatctaagtgggctggaggttctcggatctgtgcagccgcgggcttgtctccaggcacaccaccaccctgtgctacttcccttatcggtgcctgcagcttgatttttatccccaggctgctttctctgttctgtggggatgaggcactgacccgtgggttgggggctctttggggacccttcccttgctgtctacctaaggaaagctagctaactcctctcagagtgatggtgcacacctgtagtcccagctacccaggaggctgaactgggagcattgcttgagtccaggagtttgaggctgtagtaagccaagatcacgccactgcactccagcctgggcaacaagtgaaaccctgtccccccccacccccccaaaaaaagaaaactgacatttgttaattgcctttctctgaattctactgagattgaaattaaattgcttattgtttttgttgtctttttgttaaattgctcacgtaattttggataccagaatcttcaccccaaatctgtcctctaccaatacagatataaaagctagaggttttggtttttaatacaggacttttaagaagatgaggtgaagcaaactaacggatatacactaggttctggattattagtgttatgtccctctcaaagaataaaggagaatttttgaccgggagcggtggcttacgcctgtaatcccagcactttgggaggccgaggcggacggatcacctgaggtcaggagttcaagaccagcctggccaacatggtgaaaccccgtctctactaaaaatacaaaaattagctgggcatgatggcaggtgcctgtaatcccagctactcaggtggctgaggcaggaaaatcgcttgaacctgggaggcagagattgcagtgagccgacatggcgccattgcactccagcctgggcgacagagcgagactgcgtctgaaaaaaaagttaaaggagaatttttacccagcaccagcactgctaagttctagcatacatcttcctcatgtgagttggacattgttttatattaaatagtctgtgctgagatcccagttttacttcaggcatttattaccaagttcttagtttttgcctccatgcttcttcaatgtgtagtctttgaggatgctgtctttttcactggtttctttaggagagtttacttcattctagtatgctttgcactgtgttgggcatgtccatgtgattctgtggtaacccaaatcttctgtcaacgtgttccatctgatacctgtgtttgctctgatccaatctgctttcttgcacctttttgaatagagccaagcacttgactcctagagaactgaagttgcacccaactcccctggggtttcaacatttttctttttcttttcaattagtttgtgcagtytatctttctaaagatatacttgattctgtgggatggctgggctcacctgggaggttcttctgttccatgtagcattggctaaggtcactcagtcagctctgttcatctgggagttcatctggggctgggacatctggtgcctcagctggggtggctgaggtggctggctaccagcctggttggatttctttctttttttttttttttgagtcagagtcttgctttgtcacccaggcaggagtgcattggcactatcttggctcactgcaacctccggctcccgggttcaagcgattctcctgcctcagcctcctgagtagctgggattacaggcgcccaccaccgcgcccagctaatttttatttttttagtagagatggggtttcaccatgttggccaggctggtctcgaactcctgacctcaagtgatctgcctgcctcggcctcccaaagtgctgggattacaggcgtgagccactgtgcccggccttggatttcttttttttttttttctttttttcttttttttttttttctttttgaggtggagtctcgctctgtcacccaggctggagcgcaatggcaagatctcagctcactgaaacctccgcctcccaggttaaagtgattctcctgcctcagtctactgagtagctgggattacaggcacgtgccaccatgcccagctaatttttgtatttttagtagaaacagggtttcaccatgttggccaggctggtccagaactcctgacctaatgatctgcccgcctcagcctcccaaagtgctaggattacaggcatgagccaccgtgcccacccggccttggatttcttaaatggtggcttgagggctctaagagcagccagattcccgggtcttaaccacagcaccctccttcctctcaaagccattttcttggagggatcagtggtgtcactgaaggtggtaaggatgaatactgggaaaaggccactgattggatgattaagaggtccctattaaaaagaaagtttcagccaggcacagtagctcatacctgaaatcccagctgaggcaggaggattgcttgaggccaggagttcaaaaccagcctggcaacatagtgagaccctatctctacagaaaataaaaaaattagccggtcgtggtggcacgtgcctgtagtcccagctacttggaaggctgaggcgggatgattgtttgagcccaggagtttgaggctgcaatgagctgtgatagtgccactgcactccagagtgagacaacagagtgagaccctgtctctaaaaaaataataagtgccgggcgcagtggctcacgcctgtaatcccagcactgtgggaggccaaggcaggtggataactttaggtcaggagttcgagaccagcctggccagcatggtgaaacgcctatagtctcagtacttggagaggccaaggttggtggattgcttgagtccaggagtttgaaaccagcctgggcaacatggtgaaaccctgtatctacaaaaaatagaaaaatcagctgggcctggtggtgtgtccctgtagtctcagctacttgggaggctgaggtgggagaattgcttgggcccagaggcagaggctgtagtgagccaagatcgtgccactgaactccagcctgggcaacagaaggagaccctgtctcaaaaaaaaaaaaaaaaaaaagatgtaatcatataatttttatatgtggctaacacatatgtgtcaggcactgtactagtgacattaaaatgtatactctcatttaatccttacagtaattctttgagatcagtactattattacccacattttgcagatgaggaaacaggcttagagagggaaggtaacttcctgaagcctaacttgtaactatataagtgggagaggcgagactaggtctagaattttggtcctttgccacatttctgacatattttctcagctattatagtaaagggttaactaatgccatctatatatggatcagaatgcagtcaagtctcaaccataagaatgaattatggctgaaatgttctgggcatttggtttatttcctcttagaataaaacttttgcgacaattgtgattgactctctaaattgacttgtggttttttttttcttttgagatggagtcttactctgtcgcccaggctggagtgcagtggcacgatctcagctcactgcaacctctgtctcccgggttcaaacaattcttctacctcagcctcccgggtagctgggagtacaggcacccgccaccacgcccaactcatttttgtatttttagtagagactggggtttcaccatgtcagccaggctggtctcaaactcctgaactcgggtaatccgacctcctctgcctcgcctcccaaagtgctgagattacaggtgtgagctaccgcgcccagctgagttgtgttttctttcccttctgttggcagcaagtaatgaatttactataaaataggaaacagaaaagaggagttaaaagaagggattagggccagacgtggtggctcatgcctgtaatcctagcactttgggaggctgaggcgagcggatatctggagcccaggagttcaagacctcctggccaacatggcaaagccccatctccacaaacaaatgaaaaaactatccaggcatggtggcacgcatatgtagtcccagctacttgggaggctgaggcaggataatcacttgaacccgcgaggcgaaggctgcagtgagcccagatcgcgccactgcactccagcctgggcgacagagcgagactctgtctcaaaaaaaattatatatatatatatccgccaggcacggtggctcacgtctgtaatcccagcactttgggaggccgaggcgggtggatcacgaggttaggagttcgagactagcctgaccaacatggtgaaaccccgtctctactaaaaatacaaaaattagccaggcgtgatggcgggcgcctgtagtcccagctactcaggaggctgaggcaggagaatcgcttgaacct

SEQ ID NO: 93352 - DNA, 13646 bp, Homo sapiens
aggccagagtgcaatggcaagatctcggctcactgcaacctccacctcttgggttcaagggattatccagcctcagccttctgagtagcagagattacaggcaccttccaccacgcctggctactttttgtatttttagtagagacagtgttttgctatgttggccaggctggtctccaactcctgacctcaagtgatttgccaacctcagcaaagggctaggattacaggcatgagccaccgtgcccagcccccatccattcttgttcaagagtttttatggccgggccactgcactccagcctgggtgacagagcaagactccgtctcggaaaaaaaaaaaagagttcttagaggccaggtgtggtggctcacgcctgtaatctcagtactttgggaggccgagatgggcagatcacctgaggtaaggagttcgagaccagcctggccaacatggcgaaaccccatctctactaaaaatacaaaaattagccaggcatggttgtgggcacctgtaatcccagctactcgggaggctgaggcaggagaatcccttgaactggggaggcagaggttgcagtgagccaagatcacaccactgcagtccagcctgggtgacagagtactctgtctcaaaaaaattttttttttttggtctcaatctcctgacctcatgatccacctgcctcggcctcccaaagtgctgggattacacgcccaggtaatttttgtatttttagtagagacagggtttcactatgttggccaggctggtctcaaactcctgacctcaggtgatccacttgccttggccttccaaagtgctgggattacaggcatgagccaatgtgcccagcctattatttttaaactgacagataaattttacatatttatcatataggacatgatggtttggttttggtttgattatttatttattaaatatttatttatttatttttgagacaaattctagctctgtcacccagactggagtgcagtagagtgatcttcttggctcactgcaaattcaacctcctggattcaagagattctcatgcctcagcctccagagtagctgggactacaagcatgcaccaccatgtccagttaatttttgtattttttgatagagatggggtttctccttgttgtccagactgttcctgagctcctggcctcaagtgatccatccacatcagcctcccgaagtgctgggattacaggcgtaagccaccgcgcctggcctgcttttttatttttattttcagtattttcttgagacaagtctcccaggctggggtgcactgccacagtcaaggctcactgcagtctcaaacacctgggctccagtgatcctcccacctcagcctatagctgggactacaggctccagccaccactcccagctaattttttgtattttttgtagagacatggcctgcctatgttgcccaagctggtttcaaattcttgggttcacgcaatcctcttgccttggcctaccaaagcactgggatttcaggtgtgagcctctgtgcccagcctaattcttagtttccataggtattacatgctattttgaagcatatataaacttggaatgactaaatctagctaattaacatatatgcattacctcacataattaccatttttgtggtgagaacacaacattcaatctcttaacatttttcaagaatacaatatattggtttggtttggtttggtttgtctttttcttgagacggagtttcgctctgtcacccaggctgaagtgcagtggcgcgatctcggctcactgcaagctccgcctcctgggttcatgccattcttctgcctcagcctcccaagtagctgggactaccggcgtcagccatcacacagctaattttttttttgtatttttagtagagacggggtttcaccgtgttagccaggatggtctcaatctcctgacctcgttatccgcccccctcggcctcccaaagtgctgggattacaggcgtgagccaccatgcctggcctgttttgctttgtttgttttgagagggagtcttgctatgacgcccaggctgaggtacaatggtgtgatctcgtctcactgcaacctctgccttccgggttcatgagattctcctgccccagcctcccaagtagctgggactacaggtgcgcaccaccacacccagctaatttttgtatttttagtagcaatggggtttcaccatattggccaggctggtctcgaactcctgacctcaggtgatctgccctcctcagccttgcaaagtgctgggattacaggtgtgagccaccgcgcctacaatacattgttattaactatagtcatcatgctgtaccaaattttaaataggaggatattctatgtgttctacaacttgccttctttttctgatgaacttcatatttttgagtcttatattttgatgttttttgtttttttttctttttgaaatatttagacccagttagctcattttatgttgtagaacagtgctgtccaatagaactttctgcaatgatggaaattttctatatcagcattgtctaatatgggtactcactaatcacatgtggctactgagcacttgaaatgtggctaatgtgacaaaggaactaatttttgagacggagtcttgctctgtcgccaggctggagtgcagtggcgtgatctcagctcactgcaacctccacctccagggttcgagcgattctcttgcctcagcctcctgagtagctgggactataggcatgtgccaccacacccagctaatttgtgtatttttagtagagatggggtttcaccctgttggccaggatggtctcgatctcttgacctcctgatccgcccgcctcggcaaagtggtgggattacaggcgtgagccaccgtgcctggccaaggaactaaatttaaatttttaaaatgtgaaacatagacgtaattttaattatttaaatttaagtttaaatagcctcatgtggctcattgctaccatgtgggataacgcagctctttaatattcaattatataaatatatcacaaataatgtatccattcttctgtttatggattttaaagtatttccaattactttatatactgttatattaaaaaatgctgcaatgaacatacttctgcatgccttcttgagcaaatgtgggagaggctgggtataagctcataagtagagttgtattatcaactctactagatattgccaaatggtctccacagtggtttttctggtttacgctcccatccactagaagaaagtccctgttgccctggagcttcagcaacatctgatattcccaaacctgtctttgccaatttaatgaatgtcgccttgttattttattattttatttttaattttattaattttatttttttcacctcatcgttattttattttatgtatgtatgtatgtatttatttatttatttatttatttatttatttatttatttattttaagacggagtctcactgttgcccaggctggagtgcagtggtatgatctcagctcactacaacctctgcgcccccaccccctccctgggttcaagcaactctcctgcctctgcctcctgagtaacgggaattataggcacctgccaccacacctggctaatttttgtatttttagtagagatggggtttcaccatcttggccaggctggtcttgaactcctgacctcatgatccaccctcctcagcctcccaaagcgctgggattacaggcgtgagccactgaacccagcccttgtcgttattttaatttgcttttttttgaagcccaaaatgtcagtattaatttgcattttctattttctctttgagggattgtctttcctatatttaaatttttttttctcttgggttggttgtctttttcatatcgatttgtggagttctttgtaaattctagacagtaattctttattggttatatacctatatatgatgtagtctgctatggcatggcttttattattaatttaatgtttgcaaaaccagcatatttacatatatttcaaaaggtacaaaaagataaccaggggctgggcacggtggctcacacctgtaatcccagcactttgggaggctgaggcgggcagatcacgaggtcaggagatcgagaccatcctggctaacacagtgaaaccccacctctactaaaaatacaaaaaattagcggggtgtgttggcaggcgcctgtagtcccagctacctgggaggctgaggaaggagaatggcgtgaaccagggaggcggaggttgcagtgagccgagatcgcaccactgcactccagcctaggcagcagagcaagactccgtctcaaaaaaaaaaaaaaaaggtaaaaaaaaaaaaaccaggatttttttttttttttgagacagagtttcactcttgttgcccccaggctggagtgcaatggcccgttcttagctcactgcaacctccacctctcgggttcaagcaattctcctgcctcagcctcctgagtagctgggattacaggcgcctgccccccaagcccagctagttttttttgtatttttagtagagatggggtttcaccatgttggccaggctggtttcgaactcctgacctcaagtgacccgcccacctcggcctcccaaagtgctgggattataggcatgagctactgcgtccgacttgataaagactttcatgaacactaacatagtttctaacagttcaaggccacatctctaggatgaccctaatgccctttaaagtgtctgactgagagaactcaaggctgccaaaagaatgtactgtttgttccagcccacagatgaaggtaaggcccctgtttcccagctgctgtgagagtgtaggagcctaatgataagccccagctaacaaggccaggtgggcttaacacagaccaacccccttcccactttttgtaatctgtcacttctctgacgtcattgagtccccactcaccctctctgttctttcattcttgctttaaaatgcccagttatctctacaaatcaaagttgagttcagttcaagctaggctcttttccctattgcaataatatgtcactgattaaaatctgttcttaccactttatttatttatttatttatttatttatttattattttgagacggagacttgctatgtggcctaggctggagtgcaatggcacaatcttggtttactgcaaaatctgcctcccgagttcaggcgattctcctgcctcagcctcctgagtagctgggattacaggtgtgcaccaccatgcccagctaatttttgttttttagtagagatggggtttcaccatgttggtcaggctggtctcgaattccttgcctcaagtgatccgcctgcctcggcctcccaaagcgctgggattacaggcgtgagcctctgtgcctgtcctgtccttaccactttagctagtgtctggctttgtttatctatgagatgatccagcaattctactcccaggtatatacccacgaaaaatgaagatatatatccacacagaaacttgtatacaaatgtttatagcaacattatttataatagccaaaaggtgaaaacagcccaaatgcccactaactgatgaatggataaataaattgtgatctgtacaggcaatggagtattattcagccataaaaaggaatgccagctactagggaggttgagatgggaggatcacttgagcctgggaggttgaggttgcagtgagccatgaccataccactgcactccagcctgggtgacagagtaagactctgtctcaaagaaaaaaataaatgaaaggaacacagggagtgatgggctgagcgtggtaatcccagcactttgggaggctgaggcaagaggatccctggagcctaggagtttgagaccaggctaggtaagtaacatagggagaccccatgtccactaaaaataaaaaaataaaaaaattagtgttccggcgggggcggccgagggggaagagtgtgtgtctgcgggagaaagaggagaatcacccaagcggcctcagaagtcccagggagtggaggcccctgccatggagccgtgtggtgtatgtgtggtaacaccatgtctgtgcccctgctcaacgatgctgccaccgtgtctggagctgagcgggaaacggccgtggttatttttttacatggacttggagamacagggcacagctgggctgacgccctctccaccattcggctccctcacgtcaagtacatctgttcccatgagcctaggatccctgtgaccctcaacatgaagatggtgatgccctcctggtttgacctgatggggctgagtccagatgccccagaggacgaggctggcatcaagaaggcagcagagaacatcaaggccttgattgagcatgaaatgaagaacgggatccctgccaatcaaatcatcctgggaggcttttcacagggccgggccctgtccctctacatggccctcacctgcccccaccctctggctggcatcctggctttgagctgstggccgcctctgcacyrgrmcttccccmaggcagctaatggcagtgccaaggacctggccatcctccagtgccatggggagctggaccccatggtgcccgtacggtttggggccctgatggctragaagctccrgtctgttgtcacacctgccagggtccagttccagacatacctgggtgtcatgcacagctcctgtcctcaggagatggcagctgtgaaggaatttcttgagaagctgctgcctcctgtctaactagtcgctggccccagtgcagtaccccagctcatgggggactcagcaagtaagcatggcaccatcttgggtctgagctggtcgagcccctgtccccacccttcctgacctgtccttttcccacaggcctctaggggcaggtggcaaggcctggctgggccttccttcctggcctcagccacctggctctgtctgcagtaggggcaggctgctttcttatcccatttccctggaggcgggcccccctggcagcagtattggaggggctacaggcagctggagaaagaggcccagccactgacccactcactcaggacctcactcactagccccactttgggccccctcctgtaaccttagggtttggcccatggggccctcccaggcccctgccccaactgattctgcccagataatcttgtgtctcctgcctccactcagctgcttctcagtcatgaacgtggccatggccccgggggtccccttgctgctgtgggctccctgtccctgggcaggagtgctggtgaggaggtggagccttttgaggggggccttccctcagctgtttccccacactggggggctgggccctgcctccccgttaccctccttccctgcaggcctggagyctgtagggctggactgaggttcaggtctccccccagctgtctcacccccactttgtccccactctagagcagggaggcrgtgggggaggagttgtgtcttgtcttctgtctccatgtggtttttgggtgtttttcttcttgtgtcctggattctgataaaattaaagaaattgcttcctcaaaaaaaaaaaaaaattagccggacatggtgactcgtgcctgtggtcccagctactcggaaggcaagaggttggagtatcacttgagcccaggaggcggagactacagtgaaacatgatcacaccactacactccagcctgggcaatggtaagaccctgtctcaaggaaagaaaaaaaaaaaggaatgtggtagtgatacattatatgctacaacggtgaggaacctcaaaaacattatgctaagtgaaataagtcattatttatggattttttatttttcattgtcaagttagcattgtacacaaatacacacacatgctcacacacacagcttggtttcatttgcaaaacttttatttaggatttttccaggtatgtttgtcagtgagattagcctatagctttcctttctttcactgtctttgtctaatattgttatagaggttatattaatttttttttttgagataagagtctcgctctgtcacccaagctggagtgcagtggcacaatctcagctcattgcaacctccacctccaaggttcaagctattcttgtgtctcagcatcccgaatagctgggattacaggcatgtgccaccatggtcgcctaattttttaaaaaaatgtttttaaatttttagtagagatggggttttgccatgttggccaggctggtctcgaactcctggcctcaagagatccacccgccttggcttcccaaaatgctggggttacaggcatgagccactgctaccagactaggttatattaagtcttataaaatagtttgaaagtatactctctttttgaaaggcatttttttttctttgcttgtttgtttttagttttcttttctttgtttttttttatgtttttgagacggagtcttgctctgttgcccaggctggagtgcagtggcacaatctcggctcactgcaacctctgcctcccaggtccaagcgattctcctgcctcagcctcttgagtagctgggattacagacgcccaccaccacgcccggttaatttttgtatttttagtagagacaaggtttctccatgttggcttccccaggctggtctcgaattcctgacctcgtgatctgcccacatcggcctcctaaagtgctgggattacagacgtgagccaccacgcctggccgcttgttttgtttttaatgttggttataactctgtatctaggtaattatctcatgaagcatttttctgctattggaagcaatttgtataaaacagtaagcctcttcgcccccattcttttacggggctaatttctactcattctccagttctcatcataaacttcacattgttagaaagggctttgctttctctcccactagattaggtgtctctgttccatgactctcagcacatttcattgtgatgtctcattaaatgttggtattctcagctggaccctaaactacatggacagggacctaacttttgttcaccactaccccagtgcttagcacattgatgtcacaaaattggccaccaataaatatgtttggcggaatgagtgaaagaaacacggcaaactggaatgccctgggaagtcctcctgcttcagaacaaaggagaagaccggaagaaagaagggctacagcccagctgtggaagcagagccctaggcaaggaggtgtcagtgcagtcctggtccctctgtgcaggagcctctcataaagaggctgagctgtgtcagcaccaggggccccatcatcataggaggtcagtgaagcttgggagttctggcagatgcagcagaggtggccctgaacacttggagattctgggatggtcacctgggagccagcagccatgcagggtaatggggaagacagcagcgatttctggagattggctcccctcaaagacagagagaggagcttgggcaggactagattttccagtttttttgttttgttttgtttttgtttttgttttgtttttttttttgagacggagtctcactctgtcgcccaggctggagtgtagtggtgcgatcttggctcactgcaagctccgcctcccgcgttcatgccattctcctgcctcagcctcccgagtagctgggactacaggcgcccaccaccacgcctggctaattttttgtattttttagtagagacggggtttcagcgtgttagccaggatggtctcgatttcctgacctcgtgatctacccgcctcggcctcccaaagtgctgggattacaggcgtcagccaccacacccggcctaagtcacactttcaaaattcctaaatccacccaaggcacggatagctcagtggcttctgcagggccctggagaaacttccctcaccaggttctgaccctctggctcatgttgggtaatcatcttgtttagtctgcatctgcaccttagtaccaggaagtgccttaggctgaggaacaagaattcactactcactggaaaaatcaatgtcccaggtattctagcttacctatcagtctcgtgtgactttggctagcgtcagtcagttcccttgaatgtcaataaccctgaatattctggcaaatagaactttaagtcaagttatcgctggatcctagtgacaatcatcagtccttaatactagatgatggtttgtttgtttattagtaaatcctgactgagcacctcctgggggcagaccatggttgggtctgtccctggtatcaacttagacaaatatttccatgtgatccagatatcttaatctatagagtggatctgagagctgatggcttagaccagctatttgctaaatttccttcccagtatctcaaaggagaatagagtaatgaagggaggaggtacttgagagggcctgattcaagcaagcaggtttgactaaattgttggatggagtcaccttcactacaacattcctctctgagtaaagctggggcaatcccaagacaagccttacaactgagtaggggtctctgggagctgactctttcctgagttgaccagctaccggccagaccaaggtcacattggcacttttttactgccatgcacagacctttcactttttcactatgagggcattttaccactttatcctttgaataaactacaagtacataagacacttcagcctcacgcaagcttggaaggtaggataacacaatggtgggtaaaagcatgtgctctggagacaaagtctgagatcaaacccaacctccagggagtctctctgaacccattttggttcagagggctgcctgaaaaaacaacaaaacaaaaaacccaaactcccgcctttatgtctctgggtctcatggacaaatagggttaataagagtcctgcaacaaggctgggcgtggtggctcaagcctgtaatcccagcactttgggaggtcgaggtgggcagatcacctgaggtcaggactagcctggccaacacggtgaaacctgtcaccactaaaaatacaaaattagcctggcatagtggcacatgcctgtagtcccagctactggggaggctaaggtgggagaatcacttgaactcgggaggtggaggttgcagtgagccaagatggcaccattgcactccagcctgggcgacaagagtgaaactccatctcaaaaataaataaataaataaaaataaaaatagagtcctgcaacagtgaggatgcattcagatgaaagcaacagaaaactcagctaataatgtcagttaataaagacatttaattgtttcatatttcaaaaatgtccggaggtcagcagccagtaagccccctaacgatattatctaagacccagggtctcttcatcctgctccatcatccttggcgtgctggcttttggggccctctgtgtgatactccactgatattcttggcacatgggaaacatcatctgctcttggatttcccagatcaatctgaggatattacttcttgggggtaggtagggccctgtggtggtttggactgttattcccaatyctttgcttcctccttattatttaagtgtacatccatcccctttgctgtgtgacttgcttgtgccaacagaatgtcagaggacacgatgcaagcagatgctttcaatgtgcttttgtagtttggcttggcctcttgcactcctgtgatctgacaagagaaaggcaaattccagatatccattgccccttcagctgtgacccagaatagacactggaccaggactaaaggagtcctaccaagccctgtcaagcccagcctgattagacaaaccacagacaactcacaaacccatgagcatgaaaataaatagagtggcttaagcaatctcctggggacaggtataggaggacagcaagggtccttgggttctcagagtgtcctccagctcctccggtttatgagtcagtatgtacttggtcacattcatcctgggggcctttggctaaagtcaacatttagagtttctcgtggatctcttggctggatctgatctcactggtgctttctggctgactcaacctccctgtggctctcggtagcccagtgggacccctgaatctctaccatgtctcccattcagctcctaaccaagttatgcaaaccacatgcctctgctgccaggtcaccctcttcctaccccccatgccccatggcaggcccatggctctcaattcaatacccatcactggaaaagggctggtaacacaaaacagaccctgtctccctgccagtgcatcctgatttgcccacttatctacaatgggcaaaattttgtagcagcttcagtgatctcttctgttttctggatgtttctgaagccattcccccaattccaaggcatctccttgactctcacctccctgccttcgtcttgttgaaactccaagatgagaagtggtaggcttctcttttattcttttcatatcttatctttggcttcctagctctaattgccacttcaaaagacaagggttccctttggaaacaatctgttgaggtagctgttattatcctcattatggacatataggaaatcaaagatgagagattaaattacctcctcctttggtagaaacttgattctagatctggctcttgattatgttaaatgggagctaaatgaatgcagaaaacaatttctttctcatagtccagttttcaagtccattgtcttgctgcaaaatcctattttgaatttcaatagatgcatattaccatttccttctctttatatttcttctgaaacaatcttaatctcctcacaagcagtttgatgccacaaccaaataagaaagaggtcatttacttgctgaaggcaaaagagtataaaaggaaaaaacacattaatagtttcttcatacattatccattctagctccctgcttccacctgacttccctattgcaaagtctggagaatctttatctagtcctttgaatgtgtgtatgcacacatgagaattcatggctgcatgcaagagtgtgtgtgcatgcatgtattgatgagagtgttgagaaaaggaactcttcattttctctttttttcttttcttttcttttttttttttgagacagagtcttgctctgtcgcccaggctggagtgcagtgagctcattgcaacctctgcctcccgggttcaagggattctcatgcctcagtctcccaagtagctgggattccaggcacgtgccacaacacccggctaatttttgtatttttagtagagacggggtttcaccatgttggccaggatggtctcaaactcctgactgcaagtgatccacccgcgtcagcctcccaaagtgctgggattacaggcgtgagccactgcgcccggtccattttttcttttttttttttttaatgccataagtctttgaaactctaaagccaaaaatttgacccatttatttataattggtattatactgtcattcctttctttaggtaataaagccagaaccattggtttttttcattaagatagggaaccaggttacaaggattaccaaaaataaa

SEQ ID NO: 93353 - DNA, 13144 bp, Homo sapiens
tggctcactttgggaggccaaggctggtggatcacttgaagtcaggagtttgagaccagcctggccaatgtggtgaaaccccgtctctactaaaaatacaaaaatcagccaggcgtggtggcacacacttgtgatcccagctgcttgggaggctgaagcagggaggattgcttgaacccgggaggcagaggctgcagtgagccaagattgtgccactggagtccagcctgagcaacagagtgagtgagactctgtctcaaaaaaagatatgggttagtcaatatgtttaggagaaaataaaagttatcattctacaacataaaatgctattttattgcttgttgcattttatctaatggtgtttttctaagaaaatttgcaataggaataccactgtttcaggttttaaaatgatcataagcacctgatagagtttggctgtgtcctcacccaaatctcatcttgaattgtagttcccataatccccacgtgttgtgggagggaccagtgggaggtaattgaatcatgggggtggttaccctcatgctgttcttgtgatactgagtgaattctcatgagatctgacggttttataaggggctttcctgcttttgctcggcacttctccttcctgtcgccatgtaaagaaagacctttttggttccccttccaccacgattgtaagtttcctgaggcctccccagccatgctgaactgtgagtcaattaaacttctttcctttataaattacccagtcttgggtatatctttattaacagcacgagaatggactaatacagcacctgactaggaaactaatattttcctttcatttgaaaaggatatttcattagcgaacagtgtctattacacaagttacatcaagatctgtgtgcctctttccaaaagataaattacaagcattgttacaaaataaaagagtatgcggtttgcaaaattcttatgatgggagcccttctctgcccagaattatgcttgcttgcctcttaatgcttccactaattatgatgagatgtcactcagaacctacagtttctgccttgggggacgtataagaatgtcagaacacctctccatggtatcaggtgcctgcagagctttgctgtgggttatggaccaactcctcagtatctgttcctaagaccaaatgaaccacgctatcttggaagtgctggtcttggacagtaaaggacattgtgcagacagctggaagcggtccctattaacattgtccctgatagtgaataaagggacggtgtgagttcctttgggctgctttctttcttgatgtactgaaactttagtttcaatggaatcaaaagaatcagagacgctgggtgcaatggctcacacctgtaatctcaacactttgggaggccaagtaggaggaactcttgtgcccaggagttcaacaccagcctgggcaacagagtgagaccccatctctacaaaaaataagaaaaatagctggtcatgctagcatacacctgtggtcccagctactcaggtgctcgcttgggtccaggaggtcaagggtgcagtgagccgtaattgagccactgaactccagcctaggtgacagagtgagatactgtctgaataaataaataaataagaatgtctgaccagattggggcagcatctctgtatttgacagattctaaaacaacaacttagtaataaactctatcactcttacagtaatagtgatagtgttcagagtaataaacagattctcacgctgttgcccaggctgagagcagtacacaatcacagctcactgcagctcttgggctcaagtggtcctcctgcatcagcctcctgagtagctgggactacaggtgcaggccaccatgtctgagtaatttttgtactttttgtgtgtgtgtgtgtagggacagggcttcactatgttgcccgggctagtcttgaactcctggcctcaacagaccctcctgcttcggcctcccaaagtactgggattacgggcatgagccactgtgcctggcacaaacactaattgtttgttttttttttttgagatggagtcttgctccatctcagcctgcacgccaggctggaatgcagtggcatgatctcgactcactgcaacctccgcctctcgggttcaagcaattctcctgcctcagcttcccgagtagctgggattgtaggcgcccgccatcacgcctggctaatttttgtatttttagtagagacggggttttgccatgttggccaggctggtctcgaactcctgaccccaagtaatccgcctgcctcagcctcccaaagtgctggggttacaggcatgagccaccacacctggccacaaacactattttttaaagcatgtgatgttagattcttttataaattaatattcaaactcactagaaagactctggaatatgtgtatgtgtgtgtactagtttttaaaatcctatattttccttaacattaaattgaaactcattacaaaacaaaggttaatactagtgctgtcatgactatcaggagctatgacatccttttaggaagtcatgtatgttcatttgtccatttgttcattcatgtatgtaaaagttacagaacactgacattgtgctagggaccaatctaaacactgggaacacaaaggtgggtggctttcaaggggctatctaaagtccaaagaggaaagcagacaacgagaagctattaccagtgtgagcagtgctaacgactgaatggaatgagagtacatatcctccctgacatggtggggagggatgtcaaaggaaggctcttagacatagaatctaaatcgagtcctcgtgtttgtcgtatttccttaatgtagggattctctctgtataactacctatcattcatttgcctctttgctcagttcactacccaccagaggaactgctcccatgccgagggaccctcggatgacacactcgggccacctcctcttttgcctgtgtgtctgcaatatctaggtgagcttggctttggtaccatatctgttctgtcattcctgctccaaaacataagactcactcccaagaggaaatttttgcatttgaaaattcaagttgtatgaaatataaatgtttcctactttgtacgttctttaaattcatgtgtcatatattacatttactaagaagtagaaatacatgtactttctaaactgagaaaactagctggtggaagacaaaactgattctaaacacatctgatagattctaaaaagtgaaggtactttaagtggcactaccctggcacatgttcactttagattgccaggtaaaccagcccaacaggtgttaggagacagatgttcaccaaatgcttagccctcagggagaaaacattaaaatatacaacatatttcccccgagtatcagcaactgaagaaagcattttaccatctactatcatgatttctaaacacagtttaaaaaattttatcgaatacctactataatgcaagcagtactagttatggtgataaaagataaataaacccctgatgtataaactaagcaccttaattcattatttcatggttaaatacattctaaaactaatttttttcctccgcaagtcttccttctctttggggtttaaaaggctcatcactgaactgaaccaagtccatcttaggaactcactgagtataggggattgccaagtcctgttgactcttctgccctctgcagtttcaaagctgtcttcactttatcttggcaccattttccggtaggcctatagaacctgtaaccttaaataccataacataaaaactaaacttcttgccacagttttggccttttctaatccattcttattaaactgctgctaaagtgaccatttaaacacaaaagatgcatgaaattattcaatgtcacccaggcctctaggatgcagcccaacactctagcacagatcactcccttttcttgtctcatttttgttgcttctctatcatgagcatttatgtcccatggtgtcccactaaccactgcaatttatttacttttcttagagacagggtcttgctctgttgcccaggctggagtgcagtggtgcgatcatagttcattgcagcctcaaactcctgggcttaagcaatcctcccacgtcagcctcctgagtagctgggaccacagccatgtgccaccatgcctggctatttaatattgtattttctgtagagacggggtcttgctctgttgcccagactggtctcaaacgatcctcctgccttggcctccaaagtgctgggattccaggtgtgagccactgcacctggccaatcgctgcaattttaaaaatgccccaagcgtcctcaggtattggtgtccctctcacaagcccatcccagactgctcctccccaacccctgcccatggccctcaattaattttctcctctcctttttttatttcagaaaatttaaaaaagttgtaagattagtgcaataaacacacacatatcctttagttatattcaccagttattaacattttgctacatttgtgttcacttgcttttccccatccccaaatatttactttgctgaatcatttgagagtaagttgcagacattatgacactttactcttaaatttttcagcaagtatctcctaaaaataggacactctcttacataaccacaaggatcatacttaggaaatttaatattgaaatactaaaatttaatttgaatatagagttgatgctcatatttctcctcagttggctgacttctatttatctttcaagactaagctctaggaaaatgacctcccttctccccacaccccctctctgtccacacacagaatacactgggtatctctcttcgatacttttactacctttttgtatacttctattgaagcacttagcacacactatcatattgtctattttcttttctgtcgtatctgagactcagctagacccattttaattcttctatcacttcatatactacccagcattcgttggtgactgaatggataaatgaatgaatgaatgcatgatgagacattgaagattctcattccactctctcattgtaactggtcatgtgtctctaaacattctgagcaatatatcacgtgttctcaatttcacctcttatttcaaacactgctatggtacccaggtctctgtgggcttcttctaccttgtgcggatgcaacctcacagcacctgcttttggcctctgcccctagtttctggccccagggctacattggagctgtgacacaggagtcccatgggaaccacttggcactcagatatggacaatctggaaatgcaggacagttaaggcctgtaagcttgccctgaccactgagggacaggagctcatagaaaaaatgcttgtctcatttttagcccagggtggccaattctgagatgcatgttaaaaggttcctcagaagctcccacaggatcaagtagcagatattcataatggttgccaatttgaaagggacccttgggttggctttctctccttccggggggtcattcttctgtcttatcacagtctattccttggtgtcacattcccaaataaactccctacctacctccaagttgtttgtacaggctttgctttcgggagagcccagactaagacaatgtggtaacgtaaaagactggtggcttgggagccagacagacctgactttgaaaccaagtttgctcattcactagccatgaccttgggcacataatttaacttctctcagcctcactctcttcactttataatgaagataatactttataggagtatggtaatgacttcataggggtatggtaattagaaatttaccaaatatatatatgaatagaatatatacaacttccttgagtaatgattgactataataaaccacattgagtgtctgtccagcttaggagccaacctcactcttccatttctcttaagattcactatttgtcccagccatgcccaccatcattgagcgggagttcaaggagttggatgctcagcatcgctggcagctgccgtacttggaaattcgaaatgagtcycatgactatcttcatagagtggccaagtttccagaaaacagaaatcgaaatagatacagagatgtaagcccatatgatcacagtcgtgttaaactgcagaatactgagaatgattatattaatgccagcttagttgacatagaagaggcacgaaggagttacatcttaacaccgggtccacttcctaacatgtgctgccatttctggcttacggtttggcagcagaagaccaaagcagttgttgtgctgaaccgcattgtggagaaagaatcggttaaatgtgcgcagtactggccaacagatgaccaaaagatgctgtttaaagaaacgggattcaatgtgaagctctttcagaagatgtgaagtcatattacacagtacatctactacgattagaaaatatcaatagtggtgaaaccagaacaatatctcacttgcattatacgacctggccagattttggagtccctgaatcaccagcttcatttctcaatttcttgttgaaagtgagagaatctggctccttgaaccctgaccatgggcctgcagtgatccattgtagcgaaggcactgggtgcacgggcaccttctctctggtagacgcttgtcttgttttgatgggaaaaggagattatattaacattaaacaagtgttattgaacatgagaaaatactgaatgggtcttattcagaccccagatcaactgagattctcatacatggctataatagaaggagcaaaatgtataaaggtagattctagtatacagaaacggtggaaagaattttctaaggaaaacttagctcctgcttttgatcattcaccgaacaaaataatgactgaaaaatacaatgggaacagaattggtctagaagaagaaaaactgacaggtgaccgatgtacagtaaatgcaagatacaatggaagagaacagtgagaatgctctacggaaacatattctagaggacagaaaggccaccacagctcagaaggtgcagcagatgaaacagaggctaaatgagaacgaacaaaaaagaaaaaggccaagatagacacctaatattcatgacttgagaatattctggagctataaattttgaaccattgatgtgcaaaacaagacctgaagcccactccagaaactaaagtgaggcttgctaaccttctagattgcctcacagttgtttgtttacaaagtaaactttacatacagggtatgaggagcacccaccagcagaagactttgcagaaccttacattggatgtgtcgttgtggttttttttttttttttttttttttttgagacggagtctctgctctgttgcccaggctggagtacagtggcgcgatctcggctcactgcaagctccgcctcctgggttcacgccattctcctgcctcagcctccggagtagctgggaatacaggcgcccgccaccaagcctggctaattttttgtatttttagtagagatggggtttcaccgtgttctccaggatggtctcgatctcctgacctcgtgatccgcccgcctcggcctcccaaaatgctgggattacaggcgtgagccaccgcattggcctgttaagtgtttttaatgggtgtatgaaacgtagaaatatgtaaaagaaataaattaggagagattaatttgtgttgtactgccattcctactgtatttttatactttttggcagcattaaatatttttgttaaagagtcaaaaaaatttactacttgtcccatcagtttcctgggatgggttcatgtactcacaattttactagattttgtgactattagcaaccacaattctagctactgcattgactattacactaatatacagaataaacaatgcctataattatttttaaaaagaatcatcctaaatttacaaaaagacaaaccgcatttccataatatattgtctaaatttcaggaagaaattctcaacctttgaatgacagatttaagaaaactagtttagatatcaatatctcattggaatatgttgttttgtttatacctcaggttttcaaagctttgggacctcaaaagtagtccttatttaaaaactgctactcgtaaccatagtctccatcgtcaaaaaggaatgtataaggattattatgcttgaaatattaatctgtatgggtcttacaagatactccaggttgcttatatgcttagtgggaaatgagaattattcaaaagaaaaattctattttcccaatgggagaagtgtccaaaagtttcaaagatgtcagaaaaatcagcttttggaagctgctgccacaattgtcaataagcaggagataccagtatgtcttcaaagagagaattcattaaaacaagtcattgaggctgggcgtggtggctcacgcctgtaatcccaacactttgggaggccaagatgggcagatcacctgagactgggagttcgagaccagcctgaccaacacagtgaaaccttgtctctactaaaaacacaaaaattagccaggtgtggtggtgagcaactgtaatcccagctactcgagagctgaggcaggagaattgcttgagcccgagaggtggaggttgcagtgagccgagatcctgccactgcactctagcctgggcaacaagagagaaactctgtctcaaaaaagaaaacaaaacaagtcattgatagtataacgaagagatatctgcatcccatgtctactgcagcactattctcaatagccaagatatggagtcaacctaggtgtccaacaacagatgaatgaatgaagaaaatgtgatatatacacactatggagtattattcagccataaaaaagagtgaaatcccatcgttgatggaatatagatgaaactggaggacattattttaagtgaaaaaagccaggaacagaaagttaaacagtgcatgttctcactcatatgcgaaagctaaaaawagttgatctcatagaagtaaaaagtaggacagaggatactagaggctgggatgagagtgacagagagatttgttaaaagatacaaaattatagcgagataagagaaataagttctagtgttcgacagcactgtagaatgactacagttaataataatacaatatatagtttcaaatagctggaaggatattgcacattctcaacataaagaaatgataaacatatgagatggtggatgtgctaattaccctgatctgataactataaattatatgtatggaaatataattatgtgctctcaagaatatgtacaattggtatttgtcaatttaaaaaataaatttaaaaactgtatcattgaatccttaagatgctaaagttcatttacttatataacaaattaaaaaattatttcttatgctgtttttcaaaaatcatagcttttatgactttacataaatatatctaaaataataattgtatgatatgtttttgtagtctaataaaatttgcactgaattccaattttttaagggtatctttttccatgttttcatctttatttttatatgggaagttctaactgaaataagttgctcctcagttctaggagttaaccctaaaagtaatcaatgtgatcctcctcaacgcgagttccagagctaaaaagaatgcctagtctatgttcctttgcgtttttgttttattttatttaaatgtctgtctacctggtccccttgattagggagcaagcctccaagggtcaaaaccatgtttcatgtctctgcggcccagtgcctagcacagagctctgtccatatctgcactccaataaatgttgacctaagactcttacacttacagattcaccttgtagataaaagggctttggaagtcatctaacccattcccttaactctctatcctacttcaccaacaaccagcttttgcaagacacttccaggggaagagtctatgccgagacaaatgatttcattaaccatcacaaagctaattgttacctgattcttaaacttggtccaaccttgcctctttttagtctttgactgaatagctctagttctcacctaaagagttatatgaaatacagttccagaaagagaagcggatgttaagaagagagcgagacagggcacagaatagacttgaacctcatgtctatcaattcggtatgtgttcatgtggtttctgactctagaacagttatgccagtgtccctgaggttcctgtgcttggctccctccttttttcacatgtctggcatctcttgtgtatgcctgagaaggatccatgctaaaattgtaatgacatatatacctaaattagcagcatacaacttccaaaaaccgagcctatgcaagagctattaaaaaaaaaaggataatgaagagaacaggatttgagttgctgcttcttgtgtttcccttggagccttcccaggcaaatatggatcagaaagcttttcttgtcaattctaatttgtggtagtctagaaacttaacccttgctactttgatcgcctgatttcatctttcaatggaaaggtaaaaatgataaaataaaacaatattctagatacactgttctctgtaatttgatgcaattcagtttatattcacttggcaaaagtgaacagtgctgaattttaagaactagtgtctatatcttacatctcattcttagccaaaagtgtggagtttaaaaccatttgctcaccaagacctcagcagaaaattttttaaaaaaataactgaaatgaaaacataagtcatgtaaaaaaagattttttttttaagatgaaaaaatgttcaaccttgctggctttagagaaataggcattaaaatgtctgggcttttagcaataatcctagttgttagtgaaacaccaagtctgtctctaacagccatgggctatgaaaccttcctttttccaaaaagacattctgacagatagaatcaagccattcaagtgtcccccagatactgcaaatgttgatcctcaaaaccccaggagctttctttccttattcccctagagcaatagttttcaagtgtgatcctgaacttgttagaaatgcaaattcttgggccccaccccagacccactgaatcagaaactctgggagtagggccgagaaatgagtttttcacaagcctccaagggattctgatgcacggtaaaatttgaggaccaccaatgcagatggattataatcttcttgagggcaaggaccaaacttgttgaaggttaaccctggctcgtgactcacagtaggtgttcagaatgtgttgaatgaataaatgatctgtacacttttccagaaagctctgaatctatagttacttttaatttttaaaaatatcttttgaggacttctctagaaataggtgagtctgtttcttacattgccaaatgtacctggggtggggggtgcgggtggaggaaaaattgcccctgttgagaagcactgccttagatcattccttaccaaggtaggttaggcactggcctcactccaaggccagtgcttcctgtgcttctagagtggctagggaagcacactatgggacaacctttcctcaccattgacaatggtcatttacaagaccatggcttattttacagggtgaactcccaatcccggtaagatggcccgagtttcattgctggtttactagttttgcttccttgggcagtgaatttaaataacctgtcaaaagaatgaagtgatggaagccagactcaaaccaactgtgtactctgtccacacctcttcagcaatatggcatattgcaaagtagtgttcagagatgtgcgtgtagtaggctgcctgctctaacacatgagattaaatttagatagccacatagggaaatcagtttttaagaaagcggatggaattcagctgcaaatagatggacacctggaattctgggaagttctagctgctgctgctcaactaaggcataactgaactcaagatttacaaaaatgtatttcagcccaagtctctccataactactaacaagggactgaggagaagaatttatattaaaaggataaaaatatctacacttggaaacagcagattgtgaaagggtatgtgactgacaattattaaacaattaagagtatgactaagatgaatatgcattcattcaccaaaatctcatattcccaaaaagcaggaaaggtagtacagtgagatggatgatgccttcacatgactcagatgtcacgtgtttctcaccattgagacccccaaggcaccccctcccagcatttaccagaatgtgtgtgtaactatttacagtgatttgtgtaattatttgattgtttctcttgtatcctgtagcaatgagggtagagattatatcccacctaccactgcagctccaggatccagcttcacaaacatttgttgaatgaatgaataagaaaagaggayacccccaaagaggctgcaagggaaaaagctacaaagacagaagcaccaggaaaaagtagggtcatgtaagtcaaagcaggaaaaaagttccatggtggggtggtcagcagtgtctaataccacgaaggcacaaagtaggataaaggttaaaaatcagcctttggttttggcaaatatgaagcttatcggtagccttagcgagaacaattccatcagggagcagaagctaactgcagtgggttgagtcatcaagcaggcataaggaagtagggataccccattataagctactctttcaagaagctcaaatctgaaggttaggagaattaggtcagtagctagaaggaaatgtggagtcgaggggctgtttttcctcccaaggagtataaaggtgtaacattgcatgaaaccacttcagacaaaggccgatatcaatagagaagttaaaacgcacgcctcaagatttgggaaggcttggggttgggcttaaagaggtaggagcatatttcctatcctaggacagagaataaagaagaaaggataggttcccatggagataaatttctaagtgttaaagaagaggctcagaaaattctagcatgataggctcacttttttctttttccatga

SEQ ID NO: 93354 - DNA, 26715 bp, Homo sapiens
agacaagctatgttgtggagcaagagtgccctaatgtgatcaaaaaatgataaaacgaaggaaagtttgtctctccccaaccccctagagaaaccattcacaaagatcctattttaccctgccctagaattcaacaaaaacccttaccttaaatttgtagcagtagctcttattctgagaacatcactgcacctcctagccaagggggaaagcagcttcaataaggcagaactttgcctaaaacaggaagttsgttgatttcaggagaaacttatctgttgcatccagcaggggcatcccagttgggggaacacgatggattccgtgcatgaaggttgaaacctgctcaggaaggtccagggtgaccagggaggccactctgaaacactgatgactacatcattttgtggagtgaaattaaagctgccgaggcagaaatactttgataagggtttatttgaagccaaaggtgaggatcaacccagaaagatgcaccaacacatttggatgtgtgccagaatcttttacaatttggaatgtttttataagaaagtttaggagaagagaagggaacttcttatatcagaattgtctgtttttattggagggtataatacagaggtcataatgattagatacaggttataacatacaggctaaaacattttgtatgtaaaaccatcagtgaaactttataagagagggcacagtggcttatgcctgtaatcccagcactttgggaggttgagacgggcagatcccttgaggagaagctcatcgctcctgaggccagtagttcgagaccagcctagccaatatggtgaaactctgctctactaaaaatacaaaaattagctgggcatggtggcacatgcctgcaatcccaacaactcgagaggctgaggcaggaaggttgcttgaacctaggagatggaggttgcagtaagatgagactgcgccactgcactccagcctgggtgacaaagaccctgtctcaaaaaaaaaaagaaaagaaaagaaaaactttatgatttataaatataaagcaaaacttcatggtttagaaacaaaggattgtgcttttccatatcagtggaaaatcagaacatcaacagttggaagaactcataagatctgagtaattaaagataagatttgaggaactcacaagattctttactcaggaacaggatgtaacccatgcatcaagagatcttttccgggggctaattgggactaatgtgactggtaggttatcagcagagaccacgtctgtcttgttcaacctgtgtcccaggtcctagcaccatgcctgctaccatttaagtgttcatgtgaagtttgttgttgagaaactaattacctaaaagttagaacttgacctttgcattttatcgaggaggctatgagactcagagggttacacagctagtgagtggcagagcctggacttgaactcagttgtgctgaagccagaatgtgttccttcctgagcattcaaggacagggaaggtgaaactccagctagcgggcagcccgtgtgcttgttctagggagactgcaggccgattcctgggagctgggtcttcatggtgacacagtaagaacaactcacctattggctgggcgcagtggctcacgcctgtaatcccagcactttgggaggccgaggtggttggatcacttgaggtcaggagttggagaccagcctggccaatatggtgaaaccctgtctctactaaaaatacaaaaattagctgggtgtggtggctcatgcctgtaatctcagctgctcgggaggctgaggtaggataatcgcttgaacctggtggggcggaggtttcagtgagccgagattggcaccattgccctccagcctgggtgacaaagtgagactctgtctcaaaaaacaaagcaaagcaaaacaaaacaaaacgaaacagaactactcacctatgttgtggatcaactgtgtccccactgtaccaaatccttatttatttaaaaaaatttgttttggacccttttcacaagatggtgccgaaagtgaagaaggaagctcctgcccctcctaaagccgaagccaaagcgaaggctttaaaggccaagaaggcagtgttgaaaggtgtccacagccacaaaaagaagatccacaygtcacccaccttccggcggccgaagacactgcgactccggagacagcccaaatatcctcggaagagcgctcccaggagaaacaagcttgaccactatgctatcatcaagtttccgctgaccactgagtctgccatgaagaagatagaagacaacaacacacttgtgttcattgtggatgttaaagccaacaagcaccagatcaaacaggctgtgaagaagctctatgacattgatgtggccaaggtcaacaccctgattcggcctgatggagagaagaaggtatatgttcgactgactcctgattacgatgctttggatgttgccaacaaaattgggattatctaaactgagtgcagctgcctaattctgaatatatatatatatatcttttcaccatatacatgcctctctgtcaatttctggttgggctgggaggccacacacagacactgacatgacagggcttgggcaagactcctgttctacttatccttttgaaatattcaccctgccactccaccatgtgtgatcactccagagatctttgtgactagagttagtgtcctaggaaaaccagaactcagaacttgcctccatggttgagggtaacaagaagctgtacaagaaccccttttatccctggaagaggctgtgtatgaaaccaatgcccagggtttgaagggcgttagcatccatttcaggggagtgtggattggctggctttctggtagcattttgtcctcacacacccatctactgtgtccaaccggtctgtctgcttccctcaccccttgcccaataaaggacaaggacttcagaggaaaaaaaaaattgttttaattattacatttatagcatcccagcttgaaaaacgaagcaacagagacgtgtagaaagttaaaaggtttctactccaattgtaatttctccaattccatcgtggtatgtgcattcttctggatttttttcagtgtgcatacacatgtgtacatacagacacatacacatacactcgtacgttttttatattgatgggaccattactcacatctttaatttggaacttattctctgctctctctccctgtgtctgatagaatgctggcaatgctttgtgatgctttaggagacacatttgtcagatgtgaagacttaggcttaggaattgatgggtggtgactgaggctggtcactctgtggtctggtgcactttcccactgccccactctgggtaggggtggaagggcccctgcagagaagcaccagcttctgttttcccatgagtgactcccctccctccaatactcactaggggactttccataagccaggctgtgtgatttggcccctgagatattcctggttggatgagaaatcttggggagactccagccttctcaggcacaaaactcccagagtagagagctccctctggactatctctcctgcccttggcctcaatttcctgttctgctacctggtccaggaatcaggacctcagtgatgaaacttggcttctcccaggctgcagagtcctgctggggtgtgagtccttgctcatggctcatgaaagttcaacatatgcttatggcttcaatattgggccagatttcrcttcccaccttggccttcccaaggatgaattgtgtggtcccatgtgttggtgatctcagcatgaactgcgaaggaagaagaactcatgtgcatttttgcgcagcctgggtgccgcatcccatggctgcccttggagggtctccctcttcattcatgtctctgctaaaaggtcacctcctcctggaagccctccctgattctctgatttattggattgtctgatttattggatcattgcctgtctctttacgtgatgtgatacctttgacagctgagcactcactgttgcatccccagtgcctggcacatagtaggtgctcaagaaacatatagttgcatgaacagccctgagaggcatagatttttctttttattttataactgaaagaagccctgagaatcagaaaggttaaggggttaactcccagcatccctgcaaagcctggagccaggaatcttaaaacaagtctacttaaacttgaaggattgtatagggatttcctggggttctattaagatgcaatcctgagttagtatttctggattggggcatgggattctgcatttcctgccagctctcaggtaatgctcatggcgcaggtccctggaccacactttgagtaactgagccttacagttaaagtgcatgttgccagctccttcccttcacctcctctttttgaggctctttcctctgaagactcctcctctgtccccctctaaagcccctcattccacatcccatctcccaaatgcaaaatctgaactcacagcaatttgggaggccgaggtgcgcagatcacgaggtcaggagttcgagatcagcctggccaacatgtgaaaccctgtctctactaaagatacaaaaaattagctgggcgtggtagtgggcgcctgtaatcccagctactcgggaggctgaggcaggagaatcgcttgaacccaggaagcagaggttgcagtgagccgagctcaccctccatcccgtcgcgccaatgcactccagcctgggtgacagcgcaagactccgtctcaagaaaaaaaaaaaaaaaagcctgagcccaggaggggcagtactgcccatcatcaaagcaaggacagagcagaaggagactccactcagggtcccctggctctgccttccactgtctcgacctcgtctgctctcagcttccctcagcgttacccttcacaggccccctctgtcctcctatgctgagcccagcatccaggttgctttcccagctggtctcgttatctccagaatctgaccctgggtaatccccagtggtgctgcattctttgttcctgctcctgtcagtcaggtctcagcctaggtcctgggctgctgggaggcaggacttgaattcctgccaggctggcagtggagggcaacaggcttctgtctctgaatctcctaaatctgcactgagaaatggtgcacagcattctcctggcccacatttggaggggaacttgggggatgttttgggagaaggcttggcctcacccagctcacctggcatctgaacacttcattcctttacctaccttcccctggtcttggaaaggcagggtggctgcacattttggggctcagatcaccattggctgccctccaacttaccctctgccttacatgagaggtaccaaggactgagtggccatgctcggtcaccctgaattggttcttctacagttatggtccccaccagtccctgggttttggttggctgccctggcacaaaggaggcatccaggctgtgaggattggctagtccagcccagcccagccccgcccagcctcctgaagtgtttcctagatctggggccaggagcaaaaacctcctggcaaaggaggagaggaggttgtgcgggacaaccttctcctgacagaaggtgccaggctgggggtggcagggctggatagggaggggcactgcccaagactggggtggctccagggagctggccctggtgatgggtgcttgcaggtaaccagaggtcaagttggctggtggttctagatgaggctgtctggtttctggtctctagtttccttgatctctaattttgtgtcacttctcctctcccctctcccttggcctcttcccctgagattccctgaatctccctccatgctcttaaccatgtttacccatcattggtcctggagctccccagcccctttcctaggcctcaggacctcaccctccatcccgtctgccctgcaggatgtcgctgctgagcctgtcttggctgggcctcaggccggtggcagcatccccgtggcttctcctgctggtggtcggggcctcctggctcctggcccgcatcctggcctggacctatgccttctatcacaacggccgccgcctccggtgtttcccgcagccmcggaaacagaactggttcttgggtcacctgggcctggtgagtggcaggaggatggatctagtgtctcagggtggaagggtggaaatggggctcaggctgagggggtgggctcgggtctgggacggcagagaaactcactcattcctctgatcactcactcattcctctgatcactcactcattcctcttcccactcattcctctcctcactcactcattcctctcctcactcactcattctcctcactcactcattcctctcctcactcactcattcctctgcgcactcactcattcctctcctcactcactcattcctctcctcattcactcattctcctcactcattcctctcctcactcactcattcctctcctcactcactcattctcctcactcactcattcctcttcccactcactcattcctctcctcactcactcattcctctcctcactcactcattcctctcctcacccactcattcctctcctcgctcactcattcctctcctcgctcactcattcctctcctcgctcactcattcctctcctcgctcactcattcctctcctcgctcactcattcctctgctttgccatgccaagcctttctcatctccttgtctaggggaagtcacccctagactgttttgaattcttttcctgactgttttcagtacactagtgaacctctgatgggttcctgtggcagagtgggggttacgcagcaggtattcaccaktatttccacattatccactgctgtactggaggcctcttgggctcactstctagaacccactttctgcctggcccatttgcttgtgtccatccatctctgggctggagttttcccataggaagtagctatacaccccctaccctcacatcrtgacacagctgggccagaagagagatgtgtgccatctccaccctcccccgtgcaggggcatcttctttatccccactaagctgtcccaatgagttgtgttgcccaacctggataaaaattggccagtgacttcctctttaaagttacctttgacccttcagaccctgccctttcacttagacctgctgtcccctttgggcgatttggcatcagtctgttctttggcaaatggcaggaatgatgggtgtgtccacaggtgcagggtgagggaacacaggacggactagctctgagcttgatgtgcaaaaggtgctccctggtgaragccgctgttcttcctgacagacagttagagccacctcttctcccctgggggctgctgagaaaggaagttccaccgtgtacagaccttctccatgggagggcctggggcccctgaggcccagccaggacataaaaggatgtggggaccagccctggggacatgtcctgaggccacattgctgcccacacaccacacttgtggagcccaccccacgtgactktcygtgggctggagccactcccaggatgagaaaatccatcctctttattcaaggtgggcttctccatgaacagacagtttgtcttccccctgttccctgggatgtagccttggaasttagatactgcccccaagagaagggagcaggagggagtggagattacccctatgtgcgcagaatctggacatgctgttcattgcagaggctgtgccacctctaaagcctgcagtgggacctgctgtggctcctcctgggaaatgtatttatttctccagagtaatagaattaataggataycayatctmtctatctatctatctatctatctatctatctatctatctatctatcagtccgtctgtctgtctatgatctatctaatctatggagagacagaagagggcatttattataggaattgactcatgtttatggaagctgaaaagtcccactctatgccttctgcaagctggagaatcagggacactggtggtgcaattccgtctgggtccaaagccctgggaacctggagttctaatgttcaagggcaggagaagatgggtgtctcagctgcagaggagaaaacaaattcacccttcctccacttttacattctacgtggaccctcaacagattggatgatgcccacacagactgggaaggggagatcctccttcctcagttttccttcaaatgctaatctctcctgaaacactctcacagacatacccagaaataatgtttgactggatatctgggcatcccttaacccagtcaagtggacacaggaggtgatggcccttgccttgcttgcaggtcactcccacagaggagggcttgagggtcctgacccagctggtggccacctacccccagggctttgtgaggtggttgggccccatcactcccatcatcaacttgtgccaccctgacatcgtycgatctgtcatcaatacctcaggtactcctgcagagcttgtggtggtgggcacaggagaacattggagggcttctagatctcatccccaaagcttctgtgcagctcttgtagtactcagcccsttccttcctgcttctctctcagccaccttcctctttccttcctgtagtcaccaaccccaacctcagtgtcttttctctctgctgccatcttccccacctccrtgttgttctgggaaccactggggccccgagaagccttaatccaaggccctgtcctggaggaatccccaaacttgaagagatggagcagtacagagacatccccaacttcatggggttcagaatgggccaggaggagataggctgtgacagagcataggagaacaaggtttctactggggcaggctggaaggcttcctggaggaggmgtagcaggagctgggtgtggaacgatgagtgataattttttttttaaagcaggggcagggtgatgcagtgggcattgttagtattcaaggctccgggccaggcttggcattggccttgtccttctgcaggcccagagcaaggacaagaagatgagaaggagttgtggttggtggaagatctaggctgctatttccatgacattcacctcttgtgggtcgattccttctaatcccatcctgtggcacttccaccatatgttcattgccctcttgctccaggccccaggaatctccaataggagacaccaccccagcctggagccgtacccttgccctctgcccttcccatctttggacaggccagggagagcagcagaaggggtatcacgccacagagaccatggctcaggccccaaaatgctgagtgactctgggcaggtccacggctctctatgggtgctgaggtgtctttccattgtgagtggtagaaactcaaccccacgcagtctaagccattaaagagaagctattgactgcaacatccagggaggttggccttcaggcacaactggatccaggtctcacctaatatcatcagaattctgtctttaactcttattctgtaaatgtgttttgtagagtgttgacttatgcttgggtgttgcagaayatgttggaccatgtaggagccatgtcaagacatgctgggtgtgctgtaccatgtcagggtgtatcattgctctatagtgttgttgcagcctagtccggtcccctttatgccccccaccctcctttcttcttctgcccatggcctccttcctgctatgctgggcttggagaaaagacgtccaaacctctggctgggagccaccctccatacccaaagtccctcctctattcctctccatggaccctgatggtcctcattcatgtcagatgccattacagacaaggacatagtcttctwcaagaccctgaagccctggctgggtaagtaactgtaggtggacgggacggggaccaacttttgtggccaggggaagattctgcccttgcccacagcctttggctgccgtactaggggatgggctcttgttaagtgttggtgacaagtggagacaccaccgtcgcttgctgaygcctgccttccatttcaacatcctgaagccctatataaagattttcagcaagagtgcaaacatcatgcatgtgagtgccttgaactcagcatcccagctgcagycttggggtggagggatcacatacaaytgggtctggaatgttggctctcctgggtgggtttggggccattgctcttcctctctgtgccttgatttccccatgaggctaataatcctcactaaaaggtggtaggagcatgtartggactcatgtctctgacamttagtaggtggtcagaaggagtcaatttccacatttttctcacagaagccctgtaaactcaagaaaggaatgatgacacgtgcatagtagtcattgctgagtacagatcacttcaaaactaattggtttagagcaataagggtttatatttgctracaaatctgtgggactgttggccagcccttctgcatgtggataggatccctcatggtataagagcagctgtgggtcaggtaggcagctttgcttgtgccagctcagttctctcacatatttggagctttgctggcttctggctgatttaggatggcctcagctgggacacctggacttttctccatgtgattctctgcctctagaygacaycccaggattgctcacatggcagagacaggattccaaggcagtgagaggaggatacaatgcttctcactagttattattatttattttatttttgagatgaagtctcgctttgtctcccaggctggagwgcagtggtgcgatcttggctctctgcaacccccgcctcaagcaattctcctgtcttagcctcgygggtagatggaattacaggcgcccaccaccatgcccaactaattttttgtatcttcagtagagacagggtttcaccatgttgggcaggctggtcttgaactcctgacctcaagtgatctgccctcctcggcctcacaaartgctggaattacaggcatgggctgctgcacccagtcaacttctcactagttatggccttatcattttcaccacattctattggccaaaaaaagtaaaacgtccaccatgaatcaatgtggggcaaaataggctccatctcttaatggaagttgctaaaaaatcacattgcaaaagatgtggatgcagggagaagagaagaaatggagccaagcgttttgtgaaacgactaggatttttttttctcctgtgagctaataaattagcttgttacttttgcatggattctgccagaagacacgagacttctgggtcaaagrcaaaagtttattactcatgtctcagcaagtggcatgtgcatcttgttggtttggatcctttctctaagccacccaaattccctggggtgataaggtgggcttctatagatgcctgccatgtagtatatttgcatgatggggaggagcattaggcttagagaatcagcttttagagcaagcagaataagcctaacgtgtgtcccagaggagccattaccttataccccaaggctgttctctgcaaacacaatgctgagaaatagcccagattaagaacctcagggttgaccgggtgtggtggctcatgcttgtaatcccagcacattggtatcacttgaggtcaggagttcgagaccagcctggccaacatggcaaaaccctgtctctactaaaaatacaaaaattagcagggcgtggtggtgcgtgcctgtaaccccagctactcaggaggctgagacaggagaattgcttgaacccagcaggcagaggttgcagtgagccaagactgtgccactgcactccagcctgggcaacagaacgagactccatctcaaaaactagcaaacaaacaaaacaaacaaacaacaacaacaacaaaacttcagagttttgcattcttggcatgctcagaaaaaaatgttcagggggatcacagggactttttgtaatcaatttataacaatgaagatgaatcaagataatatttattgagaactcatcatatgacagaaatgatgtaatatgcctattccatggtgtatgtggtctcatttaatttacaccgccttgtgaagtagaggatattttccaccctctmccccatgccatgacaaatggtgaaactgagggccagagaggttagagagatttcccaagttcacccagcttgtcagtgagtctaagagtgggggaaaaggggttctagcctggctccctggcatcaaagcaggtcatcttgattgctattgaggatttgacaggtgagacctagaggagggctgtgagttgaccaagggtacacacagcttaggaatcacagctggggcttgaacccagccatgggatcttcatctcctaatagtaacagcttccactctcacccaagcgtagtcctccctgaggatgggggtctgggacagaaaaccaggagcatgcctctgggggagtccatcctggtggttggggttgcagggggactcagaggagccaaggcctggccccagccctgctcccttctctggccaggccaagtggcaacgcctggccatggagggcagcacctgtctggatgtgtttgagcacatcagccttatgaccctggacagtctgcagaaatgcatcttcagctttgacagcaattgtcaggagtgagttcttgcccagggcctgggaacatgggatggagtgggggkgtgggtgtggggagagcaaagcccagggagacaagaagagccttcctggagagatgatgagaactaggcattgaaggacaaagaaggagagaaggagagagagagagagcgagagaaagagaagtttcctccaaacaagtggaactgtttgggtcaaggcaaggaggctaagatgaacagagcatgtgcaacaggcagttgggagacacttggaaatgaaggtggaggggttggcagttaactagatcttaaggatcttgaaaagtcagacaaagggagatgcattttatccaaggttcctaaggagccatggaggtgtttgagcagatgagagacatggtcagtactgagcttggacactggactctatgggactctatggaagattgactgtcatgtagacacagcatgcaaggatgccagggagaggaggtctgagtttggtggagaaaatggggcagatttgggagaaactgagtaataataggcaggagcagatgttttataagacagagagaggagatgcccatgatggccaagctgtgccytggggacctggggcaggaggcagctcacagagagtgggaggcagagagtraagtgcgcttgcaggacacccctttctgcatggaatgtggtcctgggattctggctggaaggtgctcccaggctttcatgtgggtaaggagctgcttcctctctctggactggccctgcaggaagcccagtgaatatattactgcgatcatggagctcagtgcccttgtagtgaaacggaataaccagttcttccggtacaaggacttcctgtacttcctcactccctgtggacggcgcttccacagggcctgcagactggtgcacgacttcacagatgccgtcatccaggagcggcgccgcaccctcactagccagggtgttgatgacttcctccaagccaaggccaagtccaagactttggactttattgatgtgctcctgctgagcgaggtgggcctctctgggatctgaattcaagaggtaaaatggagcttcaggtcaaatgtcagattgaaggaccggacttgatacagagggcactaaggagccatggaaggtgctcgaagaagggagggacaagtcagataaattttagaggtgattgcatagaaagcttcctgggaagaacaaacaggaggtcggaaggaagcatgtgggggtagatctggaggtgacaagggagggatccttctgggataatgggtcttcagagactgtttcagtttagactccagtgaccccagaactagtgtgattggggttcttgtctccaggataaaaatggtaaagagttgtcagatgaggacataagagcagaagctgacactttcatgtttggaggtgagtgtcccagtctggggctacagtggggacaggggtctctccactccagggaagtggagggccggccctgaatcacttcattctgcccaacctccccctcccctcaaccttcctgagagcctcaatgtatgggcgctgtccaccctctgggtgctgaagcagcccagagactcaagcctgcctggctgaccctcaggccatgacaccacggccagtggcctctcctgggtcttgtacaacctcgcgaggcacccagaataccaagaacgctgccggcaggaggtgcaagagcttctgaaggaccgtgagcctaaagagattgaatggtgagtgcaggtgctggtggctctgcctttctgcctttctgagtccttctcgttggttcttctccccaggtgggggaaaaggggaggatctttttgatgattctgccattgttgcctagtgggaataggagtagagcccagaaacaggctagcaagggtaacattgcatgctttggggacagaatggtctgggagtccatatttatttccccactaacttgstatgcaagcttagtaaaatcaattcccttttctgaacaacttttctcctttgtaaattgggggtgtggggaattgctgtcccacagggctgcttggagaattaacggcaaaaaccgcaatgacttttggaccaatctaatattatgatttatcaaaacattctcttatcaacgcgtgtttttatactttccagccttttggtataaaagacatgatgtgttgaatatcggtgtacgatgatcattgctgacatgtcatctttgtagagcagattcctagaagtgcaactgctgagccaaagaccatttgagttttacaattcaatagctcttgggaaatctactgctatacacagattttgagaataccaaatttcctcataacctccccagaagtgcctattatgaaactaaaacatttgccaatctgatagatgcaatataatattttgttattttaatgaacataactttaaatgtgggtaaagttgagcactgttttcacctgccgatgagccatccatatctatttttctgtgaagtcagtttttgcgtaatttgttttttctactttgggtcgtactagttttcttatttacttataaaaactctttacatattaagaaaattatttcttttttctgttatgcaaaatgttgcctcgcattgtcttggactttatttttatttttggttcatttatttgtcaccaaatttattaattttttcttttataattcctgtttgtgtttcttaaaaaaatatttaaaaaccattttatactctaatagtaaaatgcaaaactcttgtttgacttattttaataggcttatatatttttaaaagtttaacattttatcaatatttttcacatttagaaatttttccctttgaaatctatgttggaatctattttttctccaaatgtctaattgtcccaaccaagtttaatgaatattttgtccttgtgtcatgattctaaataacaacaaattcacaagaaactatgtgtgtgtatatatatatatatagtgtatatatatagtgtatatatatatagtgtttgtgtatatatatatacacacacacatactatatatagtgtatacactatatatatatgtattttaaggcaacaaataaaaccatatatatatatgcctatcttaggcatgtatgtatatatatggttttatttgttgccttcattttgttccatttattatgtagtcctacatgagcagcatgaagtctacttttaaaaacactttaatatttggtagagtttgttctgtctcattactttgtgtttacagttttttttccctcgagttcctatttttttccatttgaactctgtgatcaggttagccagtttgacaaatacttttgaaaatgttaattaataaattttttggaccttaggtgctaatgtttgagttaacgatgctcttcaattcatggcaaattctcgtcatttttctatacaatacgtatttcttcccatttatctcaaatctctccttccagctctccatcagtatgattacaaaatggtggatacttttatctgtaaaacttgttgttggggtggatacattttaaaattctatatatgtttttatttcacagatgttgtgctggttcttaccttttcagaaatatagcactatgatttgtgctacgtttgcagcaccgtggttgcatgctatgatttgtgctatataaatgtagcactatgatttgcagcaccgtggttctaagtacatttattctcytgcttttagctatgatctagtccttttctcttcagttctgtagtggatacctggactgcttctatctctccagtgcaatgaccatctttgtgcatatctctttatctgcatgtctgataatttctctgggatctacagttgggaaccagcttgctgggctgtaaaacacacatctttccttggccatgtcctggaggttgccttccatattggcagcttctgtgcaccccactgtcagtgcatgtgacccctctacccacacctcagccaacccttggcaacacctacctttggccattctagcctcgaatagatgtgaagtggtacctcgttgtcagctagcttccatttctatgacagctagtgactttgcgcatctcctcttacatttctcatgtttgagcatccatgaattcttagatcaaatcctttgtctacttttcacttgggttacctgttcgttctcttgtagatttgcaggaattcctgacatattcagatattgttctggatatchatctatctatctatctatctatctatctatctatctatcttaggcatcttctctgaatctcttatctctcattggaatgttaattgggtccactgtatcttttactgcacagaaatccttaatttgcatgcgtatttatcctttatattttatcttgtttaagcttttggggttttaagaattcctactcttaagtcacaaaaatttctcctatgttatcatcttttaacattataattttacctttctcataaaggaaaagactccaccttgtatatgcagtagacaagaacctgtttctctctgttcccacatttccagtggtctgaacaacttccaccacactatccattctccaggggcgtgtggaccttcctttagcagatgttaagtttccccctattcacaggcctgattctgagctctctactctgttctatggatctgtttttctgttcttgcagcagtcccacagttttttttaaattattttatttttattagtatgcatttgtaatatctcttaatatctggaagcttgggttctccttcttcaatcttttatttaaaaattgacctagcttggatagggcatggtggcttatgcctgtaatcccagcactttgggaggctgaggcaggcagatcacttgaggtcaggagtttgagaccagcctggccaacatggtgaaaccccatctatactaaaaatacaaaaattagttgggtgtggtggtgcacacctgtaatcccagctacttgggaggctgaggcacaagaatcgcttgaacgcaggaagtggaggttgcagtgagctgagatcaggccactgcactccagcctgggtgacagagtgagaatccatctcaaaaaaaaaaaaaaaattgacctagcycttgatgaactttaaaattccttcaattagaataagatttcaaagttccaaaaagaatccagctagatttttattaattgcatgaagtatattgattagtttagaaataattgacacctttacaacatatggtcatcccaccctacagtgtggagtggagattatttattcaaataactttataagccctttgtagagatgtttttttcctgcttttgttacctctttatataattttaaatactttttcacacaaacaaatgaacacttttgtttttgagatggagttgctctgcctcccaaactggagtgcggtggagtgatctcggctcactgcaacctctgcctctcaggttcgagggattctcctgcctcagcctcctgagtagctgggactacaggtgcccaccaccatgcgtggctaatttttgtgtttttagtagagatgggatttcaccatgttggtcaggctggtgtggaactcctgacctcaagtgatcctcctgcctcaggcttccaaagtgctgggattacaggagtgagccactgcaccccgccggaatgaayacttttaagagacaccctctgaatattgttttgctcagaaatacctctaaaaacaccaggtcaacttttcttctagtagttttgtgactttggttttctaatgcttacatctttgttgcttctggaattaattttgttataggactgagggtcagagggaggtggtgagagggtctccaggggcagcaggagggccgtgtatgctcyctggataattgttgggtgtttccttagggacgacctggcccagttgcccttcctgaccatgtgcctgaaggagagcctgcggttgcatcccccaatccctacattygcccgcggctgcacccaggacgtggtgctcccagacagccgagtcatccccaaaggtgccctccatggcaggggaggagggtcytgggcagggcggtggtcccagcaggcagctcggaccttgtycttactgtcctctcctgcacgacagggaatgtctgtaacatcaacatcttcgcaatccatcacaacccctcagtctggccagaccctgaggtgctgcccctccctgtttctccatcccccgggcctggtckggggaggggtcttgtcccggaaaaccagatactccctctctactccacccacatctgttttatgtgggggtggctgggtgtcctgagaggccccatcagcagccttaacttgcctccaccccaggtctatgaccccttccgcttcgacccmgaaaacgcccagaagaggtcacctatggcttttattcctttctcggcggggcccaggtgaggcyagggggtgtctgaggtgggcatgggctgagggtggcacagatggctgccttgtcagatgcctgacttgtaggaccacgtgtttctgtgataggggttttaaagaagatcctaggaaaaagggtgtgctcagagcctcctgccccgtctggtttcagttggggctggggtctgggctaggctctgggaatatgcaagcccacatgggggtcccagacccagcttcccccctgtctgcccaaggtgatctgggtggggttgggggttccgggcctsgttcctggcgcagtggggccgggatctgggtcctgggtgcagtcagaccttccaccytggcccccaggaactgcatcgggcagaagttcgcgatggcagagatgaaggtggtcctggcgctcacgctgctgcgcttccgcatcctgcccgaccacagggagccacgcaggacgccggagattgttttgcgtgcggaggacggactttggctgcgagtagaacccctgggctgaggcctgcagtgacccacccacctacctttgcatcacctacctttgcaccaaytaccttttcagatttccggtaataaatctgtgttggcccctgtgcctsagtcccrcggatggccagtagggggcgctggaggactgcggggatctagggcctggctgggaagaggcggggagatgtctctgtgyccaagatactcactgcctctctgggtgagcacaggagccccgtgctgagggtgggatctcccagagtctaagtaaagactttttccccccmaaaataattgtgtattctgatataaatttttgccaatttagaatccctgttttttagctaggtgcatagcagcctgaaatacagatcacatttgaaagcctttcttgaagctcaattggttaagtgactgtggctgtcccatgtgtagaagccaaagattatgtggtaattctggtaacctttcttaagagaaagctgctacagtctgtctgctcagtcctcccctcttccttcctgctgcttggaagattttttttttttttgagacagggtgtctctcgtcacccaggccggagtgcagtggctcactgcaacctccacctcctgggttcaagtgattctcctgactcagtcgcctgagtagataggataacaggcgcctaccaccacacccggctaattgtatttttagtacagatggggttttgctatgttggccaggctggtctcaaactcctggcctcaagtgatcagcccacctcagcctcccaaagtgccagaattgcaggtgtgagaacaaaaattcttgagtttcaatgtttattttagaatcaggtgctaacatgcaaatttattacaaaggtatattgcatcatgctgaggtttggagtatgaatgactccatcacccatgtagtgagcatagtatctaataggcagtttttcagcttttccccctccctgcttcccctgtctagtagtccccaggatctgttgttcccatctttattaccatgtgtatccaatgcatacctcccacttataagtgagaacatgcaatattttgttttctgttcctgcattagtttgcttaggataatggtccccagctgcatctatgttgctgcaaacgacatgattttgtactttttaatgactgcatagtatttcatggtgtatttctacacattttctttatccactccaccattgatgggcgcctgtgtagattcagcatcttcgctattgtgattagagctgcgataaacatgtggatgcttgtgtctttttggcagaatgatttattttcttttgggtgtatacccagtcgtgggattgctaggtcaaatggtagttcaactctcagttctttgagaaatatcctaactgctctccacactccattagtttagtggctgaactaatttatatttccaccaacagtgtataaatgttcctttttttccatagccttggcaacatctgctattttttgactttttaacaaattgcttgcaagattgatgtggcctctggagctccatcttggctcatgaggacagggactgctatttagggcagatggggcagatggctagaagcagtcagggtctatgaccctagatccatgctgtgacctgaatgtttatgtagcccccaaatccatacattgaagcctagtctgcatatggtggtattaagaggggaggcctttgggaggtgattaagttgtgagggctctgccttcgtaagtgagattaccccttataacagagacctgagggagcttgtttgccccttccaccatgtaaagacacatgcaaggtgccatctatgaggaacaggcccttagttgacactgaacctgcaggcaccttgatcttggacttcccagcctccaaaattgtaagcaataaatacctgttgtttataaactacctagtgtaagttatgttgtcatagcagcctgaatgggctaagataatccatatccccttggaattgtactaaacatcaccttgaagttgtattataaatgtcagaatcccagtctgctattcactagctgattggcttggggaaaacttgtttatctctgtagccctggttttgtttaccacttaatagtattcacctcattgggctgctggaagactgaacaagccagtatctacaacatccctgagccacatctgttgggtattagtggtccatgagggttaattgcctctctttctcttctttttgcatcacatttgaagttttgacattttaaaaaatcgcaagaggttgcttcaagctttgggatgcatggcaaccttctcttgaggaaaattcattcgaatattttgtgtgctcaaaatatccgttattacatccgagaatctacagtggactttggtgaaaggttggcccaaagcttagaacggaaaaaattaatttttccagagaggcacgactcagaatttattcctgtctaaaaagttcaggtcatgaaggttttcaagtgagaggaaggtagagggtgtgggctgggcggggggcgggcggggggggggaggggccgcccctttcagcaccagggacagcggctgcacctggactttcccctgtctgactgtagggggctcctgcggggcgcagagtccaaggactgagcgcttttcaggggcccatagattgggaacctggaaggattattggctgcaaaataagaatggaacattgcaaaacgaaataaataactatttaatatattctatgctgaaagtcaatttgtttttcttccctttaaagtttaagtttcataaataatgcatgcttatagaagaaattgcaagaaataaaaatcatccataatttcaaaatgtcaaaataatcactgtttatattttcttgcatatgcttccagtttttaattcatatgtgatctttttacatatgaaaatgtttatttacatctatatagctgtgtcatatcacatttgcatgtaattttgtttacaartgctattttcctgccaaatgagcacgtgaaaagatgctaaacattattcccattatgcaaaccaaaagcacaacgtgatgtcacctcaacacctacaggatggctagcatctaaaaaagggaatataacaaatgttggagaggatgtggagtaatcgaagccctcatccattcctggtgtgactgtaaaaatggtgcagctgctgtggaaaacagtctggagattctgaaaaagtaaaacatagaattactatatgaygcaattccacgatatcatattaagctcctagctatatactcaaaataatagaaaacagttgttcaaacaaaaaagcttgtacattcgtgcttatagcagccctattcacaattgccaaaaggtagaaagaactcaaatatccattaacagatggatggataaagaaaatgtgatctattcgtataatgaaatattactcagccacttaaaaggaatgaagtactgatacatactaccacctggatgaaccttgaatacattatagtatgtgaaagaagtcagacacaaaaggtcacatagtgtatgatttatttataagaaatgtccatctgggtgtggtggctcatgcctgtaatccmagcactttgggaggcccaggcaggcagatcacttgaggtcaggagttcaagagcagcctggccaacagggtgaaaccccgtcgctactaaaaatacaagaaaaattagctgggcgtcatgggatatgcctgtaatccaagttacttgggaggctgaggcaggagaatcacttgaacccaggaagcggaggttgtggtgagctgagatcatgccatcacgccactgcactccagtctgggcaacagagtgagactctgtctcaaaaaaaaaaatgtccagaataggcaaatctatagagacagaaaggagattggtggtgtcaggagctgtggggaagtgggaagaggaagtgctaatggggtcaggatttcctgctgggtggtgaagatgttctggacctagatagtggtgaagtttccacaacactgtgcatataccaaatgctactaaattgtaccctttaaaatggtgaattttatgttttgtgaattttacccaaacaaaaaatgctattttatctcaaatttttgttaatttgggctactcacacgatatgctgttaacatctttccatgacatcaaatcattttatgaaacattattttgtggttttaacaaatatttgggttatgtattcaaaccactctatttcttaaaaatggcgtgatgttacaaaatgatataaaagtgctttgtctcacgttgcaagaattgtcttcatacaagttgacagtttgaggtatcattggttacaaattgagtaacttcatcaaataagttttggggtaaagatttcattttcaaagcaatagataacaactattttttgtctttctactcaatatatgggtagtttacataccgcagttacagtgttatagtattgtgtttgtctatgtacttacagtgagttttgtaccttcagatgatttcttattgctcattaacatcttcttctttcagtgaggaactccctttagcatttcttttaagacaggtctgcagatcccttaggttttgtgtgtctgggaaaatctttatttctccttcatgtttgaagaatatttttgctggatatactattctaggataaaagttcttcccttcagcactttaaatatgtcatgccactctctcagcatatgaggtttccactgagaagtcttctgccagacatattggagctcctttgtatgttatttgtttcttttctcctgttgcttttaggatcctttatccttggcctttgggagtttaattattaatctttttttttttttgacaggatctggctctgttactcaggctgtagtgcagaggcatgatctcagctcactgcaacctctgccccctgggcttaagccgtccttcaacctcagtctctcaagtagctgggactacagatgcataccaccatgcccggctaatatatatatatggtagatacagggttttgccatgttgcccaggctagtctcaaactcctgggctcaagcaatccacctgcctcggcaacctaaagtgctgagattacaggtgtgagccgccctgctcagcctaactattaaatgttttgagttagtcttatttggattaaatctgcctgcttttctgtaaccttcttgtacttgaatgttgatatctttctctaggtttgggaagttctgttattatcctgatctctctccacctcctctttaaggccaagaattgttaaatttgcccttttgaggctattttctagatcctgtaggcatacttcattttaaaattcttctttcttttatcttctctaactgtgaattttcaaatagtctgtcttcaagatcactaattctttgttttgattgatcagttccgctgttgagggactctgatgcgttcttcagtatgtcaaatggatttttcagctccaggatttctttggttcttttaaattatttcaatcttggttcttcttaattatttcgatctctttgttaaatttacctgataggattctgaattccttctttgtgttgtcttgaattttactgagcattctcaaaacagctattttgaattatctgcctgaaaggtcacatatctttgtcactctggaattgatcactggtgttgtatttagctcatgtggtgaagtcatgttttcctggatggtcttgatgcttgtgaatgtttgttgatgtctgggcattgaagagttaggcatttactgtagtctttgtggtctgggcttgttcgtacctgtccttcttgggaaagctttccaaatattcaaagggaattgagtgcagtaatctaagtctttggtcaccacagctgtatctacacagggagcacctcaatcccagtaatgctgggactcttgcagattagtagaagtactgccttggttgtcttgggtaagatctgggaaaattccctggattcccaggcagagactcttctcttcccttactttcccccaaacaaatgtgtctctctctcgatctgtgctgatctgtctggagctaggggagggttgacacaaacacccctgtggcatctaccactgggactgtgctgagtcagacctgaggccaccacagcactgggtcttgcccaaggcacacagtgaccactgcttggctaccacctgtgttgactcaaggcccaagggctgcataatcagcatgtggtaaatctagccaggccttgtgaccttcccttcagtgcagtgagttccccacatatctggtgggtccagagatactgtccaggagctgtggcctggaatcagggactccaggtgctccatcccactgtggctaagctggtacccaagctgcaagacaaggtcccctttactcttacctctcctttcctcaagcagaaggagcttctccccgtggccactacggctgggaatgtgctgggtcacacctgaagcccgtatggcactgagtctcacccaaggcctgcaacaagtacaacccagctaccactgatgattattcagggcctatgtcctctttaatctgcaggtggtaaatcctgccaggactgggtccttcccttcaaggcagcatgtttcctttgtccaagagtgtgtttagaaatgttgtctgggagctagagcgtggaatgggagcctcaggatgctgtctggtgccctattcttctgtggctgagctggtatccaagctgcctctcctcaagcagaaggaagaagtctctcctggagcagcaagctgtgctgcctggagttgtgggagggatgatgcttgccaagactcccttggctgccctggctggtgcctcactaggttg

SEQ ID NO: 93355 - DNA, 77173 bp, Homo sapiens
  misc_feature (1)...(77173): n = A,T,C or G
acatggagaaaccctgtttctactaaaaatacaaaaaagtaaccgggcgtggtggtgcatgcctgtaatcccagctactcaagagaatcacttgaacctgggaggcagaggttgcggtgagctaagattgcaccattgcactccagcctgggcaacaagagcaaaactctgtctcaataaataaataaataaatagttctgaggtcccttctaagttcaattaagttctacatactggatagaggcaagaaaatgtgaaaaaaaaatgtcgtgcccatttaacacaaaggaacactgagtgttttaagataatctgctcctatgctagctcagaaatcaaaattttgttaacatctgcaaacacaaatgtcatgtttaactttagtttctatctttttttttttttttttttgacagagtctcactctgtcacccaggctggagtacagtggtgccatctcggttcactgctgcctccgcctcccaggttccagcgattctcctgcctcagcctcccaggtagctgcaattacaggcaggcgccaccatgcttggctaatttttgtatttttagtagagacagggtttcgccatgttggtcagggtggtctcaaactgctgacctcatgattcaccctcctcggcctcctagtttctatcttaaaggtggtttctctaatttcgtctcaaattctggatggtacactatttggggcataaaatcttctgcagcagaagtgtagtaaatagtactgctgagtaaaactaaaccatgcaataattacctcaaggaaaaagatggtttttccaagttatttaaacaaatagcttttatttaacttttcataaaatggaaaaaaaggaactttttataaagaaaatgcaatgacgcaataaagaccaggccacatctctttagaaaaagaaaaaaaagcctaagtgtatcagtagaactatctgaagagacaaaggtacaaatattctttccccattattgactcagaaaccacttatctgcagaaacatgacagattgaatttccatggctaattaagaacatatacagctttgacacctttgggactctggcagctgtgattccaattttgcgtctcccaccaatttacattcacacacaatgaatgtgacagtggtagtcagattagagtgattattttgttaaatactgagttgcaaaaacaacagggtcagagtaaaggcaggtgtacagaatgtaacctcttgagacacgttatctcacagctgtaaatacacaaagtggctctaatagatggacaatggactactactctccttggtagatgtcactgatattttctagctatgggaagaaacaatagcatattaatgagatttttactttgtttctgaaattaattcttttttttttttttttttttttgagacagagctttgctctgccacccaggctggcatgcagtggcgcgatcttggctcactgcaacttccatctcccaggctcaagtgattcttgtgcctcaacctcccgagtagctgggattacaggcgggtgccaccatgcccggctaatttttgtatttttagttgagacagggttttgccatgttggccaggctggtcttgaactctgagctcaagcgatccacccacctcggcctcccaaagtgctaagattataggcgtgagccactgtgcctggcctaaaattaattctcagagtgtatgtttgaagattttgaactctatgattaaagacatgactcctaaaatgaacaaatcagtggatgacaataggtaaccctgaaatagatccaagcatatataaaaacttactaataaaggaagtatcagtaaccaattggaaacacacttttttgaaagaaattcaaactcactttatgccaaaataattccagataaatttgaatgtaaaaacacattttagccagaaaaatactagaagaaaacataaaattttagtcatatttaagtaatctcagaagtaataagaacgttttattttctgggtttttgttgttgttgttttttaagatatgaggtcctcgttttgctatgttacctttgctagtctggaactcctggcctcaagcaacccttccactttggcctcccaaagtgctggaattacaggcatgagccacaatacctggcttaaaaggacactgaggacattttaagcataaaaccactggaaatataacaaaggaaacttaaaaagatgttttaggatatttttatcccatgttttcttttagtatttaaaaaaaaacatatggccaggcgcggtggctcacgcctgtaatcccagcactttgggaggcagaggcgggcggatcacgaggtcaggagatcgagatcatcctggctaacatggtgaaaccccgtctctactaaaaatacaaaaactagcctggcatagtggtgtgtgcctgtaatcccagctactcggcaggctgaggcattagaactgcttgaacccgggaggcagagcttgcagtgagctgaaatcacaccactgcactccagcctgggcgacagagtgacagtctgtctcaaaaaaaaaaaaaataataataataaataaataaaaattaaaacataaaaaatattctaatatctgtaggacaactaatcaccttctttttcaacatcttggctattcttatccattttctcttccagataaatgttggaatcaacttgtcaagtaaaaaaaaaagaatccagttggaattttgattaaagttatatttgtagattaatttgagaccaattgagttgttttctcatctagaaacatggtatgtttttacatttatttaggacttattttttctttagcaacgtttcctggttttcctcatattaattttatacatttcgtgctgagtaaattaattaatcaactcactcaacaactctttgtccgaggctcagagtgtacagcaatgaacaaggcaagttccctgttctcatggagcctatattctaattgggacaaataaacaaaaaagatcagctagtgagtagtcctctgcagataattaaaatagggttatgtgatagagagatattgggtggctacgttagattgggtggttaagaaagtcccttaatatttcaactgagatctgagtagcaagaagaatccagctttgtaaagctgctgggagtggggatggcatttcaaggagagggaaccgctaatgaaaaaaaaaaatcactaagtctcctaatagtttgatattttctgttcaaggaacagaaaaaaggccagtgaagctagcggtgagtggtgaaggggaaagtgttatgaaaagatgttagacaaacatttaggggccaaacagatgattcaggccttcataaggagtttgcatattattttatttttttgagacaaagtctctgttgcccaggcttcaaggtagtggtgtgatctgagctcactgcagcctctgcctcccaggttcaggtgattctcctgcctcagcctctccccctagtagctggaactacaagtgcacgccaccatgactggctaatttttgtatttttagaagtgacagtgttttgccatgttggccaggctggtctccactcctggccttaagtgatctgcccgcgttggcctcccaaagtgctggaataacaggtgtgagccactgtgcctggcctacattatattaaatgtgatggaagccatgtattgagtaaaagaatgacttgatctgattcatggtttttgaaagatcgctatagtacctagcggaaaaaggatagcagagggccaagagtgaaagaaagatttgtgaggaggcgagtgtagtggtccaggtaagaggtaatagtggccagatatggtggctcacacctgtagtcccagctactagggaggccgaggcacgagaattccttgatcccaggaggcagaggttgctagtgagccgagatcacgtcactgcactccagcctgggtgatggagggagactctgtctcaaaaaaaagaaaaaaaacagaacatatttatacacaaatggaaatgacccagaagaggagaaattagtctgggtgtggtgacatgtgccttaatctcagctacttgggggctaaagttggaggatcacttgaggtcaggagtttgaggctgcagtgagctataattgcgcctgtgaataatcactgcaccccagcctgggcatcatagaccccgtctttaacatttagaaagacagagagaaaggagagattgatgaggcaggagcaaggaggataattgttggagcagtaaaactcttgaaaaggagacagtatggaagatatggatagtatcttgaaaaataaagtggatgagaagtgacacgaatagtggaagaaacaaagacggtgggctatgaaaaatgatggggagataccagggatcagtagctgacagcatctcagagtagcagcagtctgcataaattttaaaagcacttgagtttctgagggaggaaggaagagaagtggtttggaggtaatatgaggaataggccacagataagaatacctatgagaggaaaaataacctcctgtacttgaaaagttgcaagggaggtagttttgctaagtgataaaccgggtttcagttggaatgggaagttgatgggaacatttacagaagaggctaagaataaaggggaagtggttgatggcagatgttgaaatcaaaagtgtgaagtgaaatggttaggatatttggtgaagagtgggatatggaatcagagtaattgaagcagagagtagcatggagatactagagcaataaacggatgacgcagatcctactggttgtgattgaggtggaaaggattataaagcatgatggaattatcttttggtaatctcttgggtcaaacgtggtgaacggtaagatgaataatatagagctacacaaaccgttcttgtgatatggaggctgctccctaattacaatgctaatatttcatttaggatttttgtattcatcgttacaaaacagggtctgtaggtttccttttagtgttcataatgcttaggttttactaacagggttatgattacctctccaaacaagctgggattttttttttcaagcgtttccatgccctggaaccatctggtctagtgctttttggggtaatgaatatcttcaattgtatttatttttacttagttgatctattcagattttctacattttcttgagctgattttgcttatttatatttttattgatataaagattttttctatttttatttcttgtgccaactgtatgtacattccccccattcccgtttccatactgtttttaggccatttgaaaatctcaaaggttttacaggaaagtacagattgatgaagaaatggccaaaaacgggaaaagtgaactttaaagtgattcaactacaaaacgtatgctactgagcaaatactagtgtattcctcgctctgcggcttaactccatgaaaatccgtgcaaaggttttagcgttgggattgtgaccgactcggtgaagagaggggacgatcaccaaaccgttagagcactggggctcttggcagtgtttgtcagttattttcaagtgataacttgaagtgataccgcaggaataaaatgctgtatccagagctggtcggaacgagcactacctttaacaaaagctgaaaagatctgcctaggaattcgttagaatacagccctcttacgtctctgacatacctagttatgtgaaccgagactgtgcagctgacggtggaaatttcctaagtgctttttaaacaacagaactggactccctccctcctccattcccagtcgaatacgtcccacccagatccagctcaagggtgcagcacttgttccggccagctcacaatcgccctttggaagggaggtttcccgccatttcgcttaggaggagggtgaactcttctcccttcattctccactcgctgggggcccgagcccacaccaccttcctagcaaagcaagcagcgggacgccaaggccagcaggccgcattaagaacgctggactgagccaaaagcctacacagaccaagccgctcgggaaaggatcaacaactgccgacaacccggagggcgaaaacgcccgcggcgtaggggaagcaaactaggagatgmgcgggcccagcgccagcggcgggaggaggsagcgcggccgtcgcaggcgggagcgaaggcggggacggagggcgggctcgctccactcgactccggattggtcgagcttagagagccgagtgacgtcagcgggggagaacgcctgatttgtgtggtgggcgcgggcggtggggggaagcgcagtgcgcaggcgcaactgcctggctcygctcgctccggcgctccggcccagctctcgcggacaagtccagacatcgcgcgcccccccttctccgggtccgccccctcccccttctcggcgtcgtcgaagataaacaatagttggccggcgagcgcctagtgtgtctcccgccgccggattcggcgggctgcgtgggaccggcgggatcccggccagccggccatggcggggctgtactcgctgggagtgagcgtcttctccgaccagggcgggaggaagtacatggaggacgttactcaaatcgttgtggarcccgaaccgacggctgaagaaaagccctcgccgcggcggtcgctgtctcagccgttgcctccgcggccgtcgccggccgcccttcccggcggcgaagtctcggggaaaggcccagcggtggcagcccgagaggctcgcgaccctctcccggackccggggcctcgccggcacctagccgctgctgccgccgccgttcctccgtggcctttttcgccgtgtgcgacgggcacggcgggcgggaggcggcacagtttgcccgggagcacttgtggggtttcatcaagaagcagaagggtttcacctcgtccgagccggctaaggtttgcgctgccatccgcaaaggctttctcgcttgtcaccttgccatgtggaagaaactgggtaagttccctggcttgtttggcgcccgcccctttttcaggcagttcagggcttttatggcaccagccccgcgtgggcccccggcacccagagcgcaaccaaagtatacactgatggaagtgactaaaagctgtaatagcgctttgctgggtggaggtccgggcaaaccaagcggccttggggaagataggattgccgtctccctgcagcctattcttgctttatttccatcctccaaggatcaatgggaagcagtccactcccttccctgcttcactttggtggcaaccagaggaaacgtgtttgaaacctggcgccagattttggccaaaagataaatcgatgttgcacctgggccaggcgaaggaaaaactgtagtgtttccttagagaatctgtcataattctgctcctgaaagtcttatccctctcggttgcctcctaccggtggtgtcagttctccagattgacccgggattgctggggttggttgctggagtaaagcgtaagctaatttagaagggctgaaacgtaaccatccggcaacttaaagttttggaaggaattccgttgtaatgatggtgagatgtttttaggatcataaacctgtactgcttatgaaaactaaaaacgcggaacgtgttgttacctcttaaaaactggccccgtgttaagggtgtgcgttagattctgcttgggttttctttttggaaattgccttagctgattgctttcagatagttcccamccggttgttcctagtttaaaaagtacttataaattgtaactgcccatcaaaataagaaaaggcaaggaattactgtatgctagaaggaaataaaggtcttaaatgtctaaaaatttcggtgtagttgtagtttcatctaagtttttttaaatgtttgtaaagcaggcaggatttctgtgcccaacatttacagaatcatcttacagcattataattgcttatctattgcagtgaataaatggcatgcatctttgttagagcaaagaagacaatacttccagtggtgggaaaaaaccttgtttatggcagcataataacgttgctttattttcagcagagggatagagacatagagaaaagagttagatttagcaaatacagaacatttttagaaaggtattgtcatagagttgtagattagccggtttcaaagtctgttttccatttgcttggctttctgccaagagttagttgattgactcaaaaaccagccactaggcttgttggaggcgtttcccatccatcccaggggcccctctttatggatttattttgtttttgtgtaggcaccgtagagctgaaagcactgtagtgtattgtagaaatatgtgatatcattgactgcagggcaacgagaagtcgacagcagcacaagagaggaagactaggcacagaactatttagagtgctgtttattttgcagtatacttggagtaacatgaatttgccatatgtttgaactttaaggataaaaaatctttaaggtataaactccgttacattagtattaaatttttttttttttaagagacgggcaggggcgggggacgggtgtgggccgccttactttgttgcccaggctgggcaacaagcgatcctgggctcaagcgatccttcctcctcggcctccgaaagtgctggaattacaggcgtgagctaccctgccggaccttcaggaacattttttaataaagcaggggccatgctgttaaatgtaaatatgtatggtttagttttacatacacagacttttcgaattaagctgtcactcttatgatgcataaagtttagagccttatactccagaaaaatgttaaagtttgttttgtaccacagctagacctcagacttcgtcctcaaagcttgaaaaaaaaaaaaaaaaaaaagtatgctaattattttgggagtcttgacaaaggaaacgaaggtttaaatttttttttcaatcacaaattcttggatggctccacattttctgtaaagtaaactgtagtttgcaatctgcaggccaacccctttcctgtacatattcagcctctccagtaaattatatttgttacacgaatttccattacattagtctctactcaccttttttcaggacacatggaaatactccatttccattttcttggattctgcctctctcaccctgcccccccaacaaggaaaactcaaacaaaaatatatccatcatgtagattcccagtcagtatgttttcttctgtgaagactactttcttttggaattgagcacccttttttctacttttgtagtgctcattggattgtagtaatagttctcaaactttttgctctcagaaccctttatatgcttattgaggaccccagagagtttttatgtgggctacatcttccagtatttactatatgagaaatttaaacttaggcaatttaaaaatatttctttaaaaacaaacttayatgtttatatatatattttaaagaaaaaacacttttttccccaaataagaaatagtggtgggaggagtggggttgttttacattttgcaaacctctttcaatgtctggcttaatagaggacagctgaatggccgggcgcacgcctgtaatcccagcactttgggacacaaaggcaggcgaatcacctgaggtcaggagtttgagaccagcctggccaacatggtgaaaccttgtctctactaaaaatacagaaattagccgggtgtggtggtgcatgcctgtgatcctagttactcagaaggcttaggcagagagaattgcttgaacccgcgaggcggaggttgcagtgagctgggattgggccactgcactccagcctgggcaacagagtgagactccgtctcaaaaaaaaaaagacagctgaattatcatatccacttctgcactcaatctcttgcgctatttggttgaagtatctaaagaaatagcagccccacatgcatatgtagtaggaaaaaggagaaatattttattagtcttttcagataattgtggatattctgcactaaaatggtagctattttcccccccagagaaaggtggaagaaaagtagtttcttaaagtttgctgaattggaatttgaaaccttagtaatgaatttcatacttaatacgttaagatccattggtctattttgtactttgaacgaatctcatccatgtgtgatttttgtgacatagtgcattagttatttggaaaataatggttcactcagttaagaacgtcctctgaatagcaacacatttcattatacaatatcaaagaaaatcatgtttgttaatatcactgatctcatcagaaaactctttaaatattgggaagctatctagttcactgttgtggatacacattatccaaaatgtatttttcaagcaacaattagaaatgtatcattgagaacaaatactgtcagtttttcttgaagcgaaaagctcactttgttcatgttgaagatgtacaccaaatgcccaagtcttattaacacagtttatcagtctctcaagtaaagatgatggtccatgaaaaatgtggctagttcattacatgactcagacaatcacaggtgcttttcctgtagtatgtaacaaaagcctgtttatgtagtctcctttttgtcatatagaatattaaaaagatatgcagcctgggcaacatggcaagaccctgttgctatacaaaataaaaaattagcttggcatggtagcatgtgcgtgtagtctctgctactccagaggctgagatggagggattgcttgagcctgggaggtggggttacagtgaaccatgatggagcctgtgcactcagcctgggcaacagaagaaaaaagtaggtattcatgggttgggatttaatacaattaatttttattgtgtcatcaaggatattctttttttaattttagtttttgttttttgagacggagtctcactgtattgcccaggctggagtgctgtggcacaatttcagctcactgcaacctcctcctctcaggttcaagcgattctcgtgcctcagccttctgagtagctgggactacaggcatgtgccatcatacccagctaatttttgtattttttttagcagagatggggtttcgccatgttggccaggctggtcttgaactcttgacctcaagtgatccatctgcctcggcctcccacaggcatgagccaccactcctggccaggaatattcttaagtgaaactagcttgctttttttggactgtaattaggtagctgtgaagaatgcagtgactaatggctcaatctggtgccactgccttgactcctgccaaggtaccagtagtttaccagccattgctttctaccatcagtacaaatgtcagcacagtgaaaagggcaaataaactcttagaattattatgaaaatagttttggccttgtagaatccctataaagattacacagaccactgggagatgctagtctgctatagtatctgcctgtcagctaaatcttgaggtctttggggccagagatactgccttactcatctttaattgttttaggattggccacataataccttgcccaaagtagctgctcaacaactagttgagtttagttgaatttctgttgagtgtaagtaaataaatggactttcttccattttttaattaaaatttctccttttaaaaaattgtgctaaaatacagataacataaagtttataccaggccaggcgtggtggctcacgcctgtaatcccagcaatttgggaggccaaggcgggcggatcacccaaggtcaggagtttgagatcagcctggccaacatggtgaaactcagtctctattaaaaatacaaaaaaattagccgcacgtggtggtgtgtacctgtaatcccagctactggggaggctgaggtgggagaattgcttgaacctgggaggcagaggttgcagtgagctgagatcacgccattgcactccagcctgggagaagacgcgagactctgtctcataaataaataaataaaatttataccattttagccatttttaggtatataatttagtggcgttaagtgtattcataatgttgtacaaccatcaccactatcagttttcaaaacttcatcagcccaaatagaaactctgtgtccattaaataatatctcattgtttccccctttcccatctctggtaacctccccattctactttgtactgctatgaatttgactattccagtactccatttaagtagaaaagtgttcttttgtgtctgacttattttacttagcatgtctttagagttcattcatattgtaccatgagtcagaatttctgctgaataatatcccatcatatagatgtatgcatgccacattgtgtttatccagttttctgttgatggacatttgggttgtttccactttttggctattgtgactagtactgctgtgaacattggtgtacaagcatttgtttgcatcccagtttttcaattcttttgggtatgaacctataagtggaattgctggatcatatggtaattctatgtttaacattttaaggacttgccaaactgtttacacagcagctgtaccattttacattcctaccagcaaggtatgaaggcttcaatttccccatattctaacgcttgttaacttttgtattaaaaaaaaaaatcctgatgaatgtggactgtcttacattttaaaattatagcttttctatgttactgagcccttcttgaattatttggtgttaagcttgacctctcttgtctttctaatgatgtgtacgcctcccaaatttacaaaggaaaattttttaaatggcttatttttgtcttgaggtagggagatttggtaaatacagtatggaatgaaagagtatataaatatattctttttttgtgtgtgtgacagggtcttgctctgttgtccaggctggagtgtaatggcatgatcaaaggtccctgcagccttgacttccttggctcaagggatcctcctgcctcagcctctgaagtagctgagactacaggcatgtgcctgcaaagtagctgagactacaggcatgcgcccagctaatttttttttttaattttttttttttatagagacagggtcttgccatgttgcccagggtggttccttaccctgggttcaagaagtcttcccagcttggcctcccaaaatgctgttattacaggcataagccaccacatccaggcctgaatatattctttattaaaaggtcattatttttcttttttctttattcatgatcataagttttaggttatgcctaatttatactcacatatatatgtttactgcccttttattatgcttgccttctaagaaataagtttttttgtttgttttgttttgttttatttttgagacggagttttgctcttgttgcccaggctggagtgcaatggtgcgatctcagctcactgcaacctccacctcccgggttcaagcgattctcctgcctcagcttcccgagtaactgggattacacgcatgtgccaccacactcagctaattttgtattttcagtagaaaagaagtgagactctgtctctggggtttctccatgttggtcaggctggtcttgaactcccgacctcaagtgatccacctgcctcaggctcccaaagtgttgggattacaggcgtgagccaccgcacctggcaaaaataagttttaaagtttgtataggcttttttaggtttacttattggaaataatgttttcattgtcccttcttttgatagtttaaagaagatggtgaatgaagtgcagcttttagctctgtgtcatagtcttatcaatagagtcaatagaaagatgacattctgcaaagggtgatctctggtgtgattacagggaattggccacagtatttgtaaaggaagatgaaatacaaaagtttcatttgttaacttggactgaagatttagagcattcattttaaaagagtatgaccaaggaaatcgtgaagaagttaatcttaacataaattgttggttctagatttggcattactttaatttaaaatggaaagaaaccaaagtggggagagagaattgaatttggagaaacctcttaaactatagaattttaaatgtgtatcttgttttatgttggttgttcgcattttttcatcataaaggatcttcaccttctcataaattatacgttctgaaagagttgtgtgccatattacttatcaagttcaaatttattttttctattttcattatcagtcattacttttgatccttattaggtagtctctccagaattgatatcacttagagaaatagaagcaatttaaattctcattagtttctacattatgcaggtaaaactagatttctttgcatctttatattatgaaatattcaaaaagatgtaaaatgattaaacaaacacccatccataactcagcttaaaaaataaaacattaccaggccgggcatggtggctcacgcctgtaatcccagcactttgggaggccgaggcaggcagatcatgaggtcaagaacctgatgaaacccagtttttactaaaaatacaaaaaattagctgggtgtggtggcatgcgctggtagtcccagctacagtgagctgagatcaacgacactgcactccagcctggcaacagagcgagattctgtctcaacaataaataaataaataaaataataaaacattaccagtatagttaagccccttctctctgtgtcatattacatctttttcactccccatgaggggcaactgcttctatattcagtgtttatcatcctcactattttttttataattttattaggtatatctttttttttttttgacacagagtctcgctctgtcgcccaggctggagtgcagtggcgctatcttggctcactgcaagctctgcctcctgggttcacaccattctcctgcctcagcctcccgagtggctgggactacaggcgcccgccaccacgcccggctaattttttgtatttttagtagagacggggtttcaccgtgttagccaggatggtctcgatctcctgacctcgtgatgtgccctcctcggcctcccaaagtgctgggattacaggcgtgagccaccgcgcccggcctttattatgtatatctttaaccaatatacagtacattttgtattttgtttgtttgtttgttttttaagacagagtcttgcttaatctcccgggctggagtgcaatggcgtgatctcggctcaccgcaacctccgcctcctggattcaagcgattctcctacctcagcctccccagtagctggaattacaggcgcgcactaccacgcccagctaattttttgtatttttagtagagatggggtttcaccatgttggccaggctggtctcgaactcctgacctcgtgatccacccgccttggcctcccaaagtgctaggattacaggtgtgagccaccgtgcccagcctgcatggtttttataacttatatatgacatcttactatatgtatgctattgtcatcccttatgtgttggtttcactttctgcagtttgttaactttgttcaatgttgaaatattaaatataaaattctagaaataaacaatttgtaagtttaacttgtgtgctgttgggagtagcatgatgaaatcttgtctcgtcccactgtgtcagccctggatgttaatcatttctttgcccagcatatctacgctgtatatgctacctacctgttagtcacttagtagcttgttagtcacttagtagccatcttgggtgtggttatcggatcaactcttatggtattgcagtgtttatgttcaagtgactcttattttacttaataatggacccaaagagcaagagtagtaatgctggcatattgttatacttgttttattttattaatkttgttaatttcttactgtgcctaatttataaattacattttatcatagatacgtatgtataggagccaagcacggtggctcacgcctgtaatcccagccctttgggaggcagaggtgggcggatcatgaggtcaggagatcaagaccatcctggccaacatggtgaaaccctgtctctactaaaatacaaaaaactagccgggcatggtggtgcgcacctgtagtcgcagctactcaggcggctgaggcaggggaattgcttgaacctgggaggtggagattgcagtgagccgagatcgtgccactgcactccaacctagcaatagagtgagactgtctcaaaaaaaaaaaaaaaaaagatatgtatgtacgtataggaaaaaacatagtgtatataggatttggtactatccaaagtttcaggcatcctttgggggttttggaacatatgcccctgcgataagggggtactactctattcttctgggtcttacttttttggttcagtattgtatgatttcttcatgttgacacacgtagctctagttcgttcattttcacttatggatagtataaatataccaatattgtgctcatccattgtatccttgaaggatatttagttttacaactatttataattaaaaacaatgatgtttggaatatttccgtacatgtctttggttgttcttcaaatatctgaggggttctctgagagcccaggtttggcaaagtaaagcctacaggccgcattgggctaccaccaatttttgtagataaaattttttttattggagcactgccaagatcatttgtttatacaatgtctgtaactgctttcacacttcaacagcagagttgaatagttgtgacagataccatatgttttgcaaagccaaaagtattttctggtctttcatagaaaaggtttgctgaccctgctctagtgtactaggggaacaattgctgggtcatgaggtatgatatcttggacctcactagatattgccaaattgctttccaaggtgtttatacctgtttattcccctgaagaagtgtaggagagtatcattctttcaccttcttgccaatacttgaagtggtctgcattttatggtggtgaaattatatcttattgtggttttaattctcatttccctgattcctcataagattgagtacattattatttttgagacggagtctcgctctgttgccctgttgcccaggctggagtgcagtgcctcgatctcagctcattgcaacctctgcctcccaggttcatgcgatcctcctgcctcagcctcccaaagtagctgggattacaagcatgcaccaccaccccagctaatttttctatttttagtagagttagggtttcaccatgttggctaggctagtcttgaactcctgacctcaagtgatctgcacgccttggcctcctaaagtgctgacattataggtgtaagccaccatgcctggccatgttttctttttatgaaataccttttaatttttttgcccatgttaacactgaattgttttcttgctgatttgtagaaattctttatgtattttgtggggtttttttgttttgttgggtttttttttgagacagggtcttgctctgtcacccaggctggagtgcagcggcacgatcttggctctgcctcctagtttcaagcaatcctcctgcctcagccacttgagtagctgggattacaggcatgtgctacaatgcctgactaatttttgtgttttttgtagaaatggggtttcaccatgtttgccaagctggtctcaaactcctggcctcaagtgatccacctgcctcggcctcccaaagcgctgggattgtaggtgtgagctgccacgcctggcccaaaattctttatgtattttggatactaattctttgttacagagttagcaggtatcttccagtttttagtttgtctcttcacttcgtgatgtttattaatgaacagaagatgttaaacttatgtaattttattaatcattttcttgatatctcatgtttttaaagatgctattgtgttctcttctaagaggtatacagctctgctttcacaattaagtcctcctatcatttttgtttttgtcctttacctatgtgctgtccaattgactggagtacacatgtagccactgactacatgtagtcagtggctacatgtgggtatttaaaaaaagaaaacagatttatagaggtataattgacatacaataaatggtacacatttaaagtatactctgataatttttgacatatgcgcatgtcaagccatcatcacattcaaagcaataaacatctatcacgcccaaaagtttccttgtgaccatttgcaattatcccacattctccaatctccatttctaggtaaccactgagccgctttctgtcttgtagattattttttctataattttatatacagtcatatgttgcttaacaacagggatatgttctgagaaatgtgtcttaggtgattttgtgttggtgtgcgaatatcagagtgtactgacacaaacctagatggtatagcctactgcacacctagattgtatatagcgtgttgctcctaggctacaaacctgtatgcaggtggtatggtatcattgttaacttcctgattttgatgggatcgtagttatgtaggagactgtccttgtgtgtaggaattaaatactataaatatttaaaattgatgggatttggtggtttacacactattgcttcaagaaaaagaaaatagaattattcttgcaaaaaaggaaaggtaaagctgaagatataaaaagatcagaaacccggatacttttaggaatctaggtagcagtttcatcagggtcttgctgctggatgtgtaccagataacagtctgttttttttttcaatgacgagaataaataagaaacagcagcatttggagtcaccatttggttatgataattcactgtcattttccaagagctatcagacttttgcagtggtcaaactatgtaataggaatagatgggatttaccaccccttcttctttcatgttttagtggtggcaggaatctttgttattctttgaaggatgcgacagtgcttttaaattattagtttggagtagagtctcattgttgaggtgctccaaagtcttgcacttggccttttctaccataataggcttcctaacctatcagttaagagctttcaggagaagctattagtttttgtccagctagttgatattccattcagtctgtggaattggggaattgtgtactatgtaatactaaatagtattactgcttaaataaaccctttaaataagggctaaagtgaaagcagtgtagccttttttttttcatttggactatttcttcagaaaaaaaattctcaaaactgaattatttgcttaaacaatgtataccttttgatggttgccaataagtattttcaaattgcttccctgaaggctttacatctccatactactttggaattggaattctgtaagaactcttaagtgattgagagtatgtgccctagagttgtactgcctaggttcgaattccagcttctccacttactgagagttgacagcgtgctggcagccctcgctggctctcagcgcctcctcagccttggcgcctactctggctgcgcttgaggagcccttcagcccgccactgcactgtgggagcccctccctgggctggccgaggccggagccggctccctcagcttgtggggaggtgtggagggagaggcgcgggtgggaactggggctgcgtgctgcacttgtgggccagcgcgagttccaggtgggcatgggctccgcaggccctgcactcggagcggccagctggcgctgctggccgcaggcagtgaggggcttagcacccgggccactagctgcagagggtgcgccgggtcccccagcagtgctggcccaccggcgctgcgctggatttctcgccgggccttagctgactccccatgaggcagggcttgggacctgcagcctgccatacctgaggccccccccccgccacccccccgcctcacacagcccaagcctccccgatgagcaccaccccctgctccacggtgcccggtcccgtcgactgcccaagggctgaggagtgcgggcccaagggctgaggagtgcgggcccaagggctgaggagtgtgggcgcaaggcccgggactggcaggcagctccacctgcggccccggtgcgggatccactgcaaagccagctgggctcctgagtctagtggggacttggagaacctttatgtctagctaagggattgtaaatacaccaatcagcactccgtatctagctcgaggtttgtaaacacgccagtcagcaccctgtgtctagctcagggtttgtggatgcaacaatcagcactctgtatctagctaatctggtggggacttggagaatctttatgtctagccaaggtattgtaaatataccagtcagcactctgtgtctagctcaaggtttgtaaatgcaccaatcagtgctctgtgtctggctaatctagtggggacttggagaacttttgtgtctatctcagggattgtaaatgcaccaatcagcaccctgtcaaaacggaccaatcagttctctgtaaaacagactaatcagctctctgtaaaatggaccaatcagcaggatgtgggtggtgccagataagggaataaaagcaggctcagccaacattggcaacacggtggggtggcttccacaccgtggaagcttagttcttttgccctttgcaataaatcttgctgctgctcactgggtccacactgtctttatgagctgtaacactcactgcgaaggtctgcagcttcactcctgaagccagggagaccaccaacccaccagaaggaacgaacaactccagacgcgcagcattaaaagctgtaacactcaccgggaaagtctgcagcttcattcctgaagccagcgagaccacgaacccaccagaaggaagaaactccgaacacatccgaacatcagaaggaacaaattctggacacactgcctttaagaactgtaacactcgtggcaagggtctgcggtttcattcttgaagtcagtgagaccaagaacccaccaattctggacacattactacctttgtaaccttcagtaaaactatttgcaccagggtatccttacctataaaatagagatgttataacaatttattggtttttgcctttatgacatgcatattttcttgcttaagaaaattttccttaggctgggtgtggtggctcacacctctaatcccaacactttgggaggctgaggtgggcagattgctcgagcccaggaattcaagaccagcctgggcaacatagtggaaccccctctgtacaaaaaatacaaaaattagctgggcgtggtggcgtgcacctgtagccagcccaggcaaacccagctgcttgggaggcccaggtgggaggatcgcttgagccgaggaggcagaggttgtggtgagccaagatcatgccactgcattgcagcccgggtgacagagtgagactctgtctgaggaaaaaatgaaaagaatacttaagtgagagttagtatactagatggtgctgtcttttaatgcacttctcgttttatgtcattaaaaaaattaaaatataaagtaggaaataaatactatagttaaggaagacaacataaaaataccagttgcttaatatataaatttagtgcagtttcaatcagaatctcaagaaggttttttaattttgcaagttgctactaaagttcctttggaaaagtatgtgggagaattttctttttacttttttttttttttttttgggtagagatagggtcttactatgttgcacagactggtcttgaactcctgggctgaagctatcccctcctgccttggcctgccaaagtgctgggattacagatgtaagccaccgcgcctgcacctccctcccccttttttaagcgacaggatctctgtgttgtccaggctggagtatagtagctattcacgggttcaatcacagtgcactatagcttctaactcctgggctcaagcatcctcctgcctcagcctcacaagtagctgggactgcaggcatgagtgactgcacccagctatgtaagattaatttttttgtttttgttttttttggaggcagagtcttgctgtcacccaggctgaagtgcaatggcatgatctcggctcactgcagcttctgcctcccaagctcaagtgattcttgagcctcagcctcctgtaactggggttatgggtgtggtggcacacaactgtaatcccagctactctggaagctgaggcacaagaattgctttaacctgggtggcggaggttgcagtgagctgagattgagccactgtactgtagcctgggcgacagagcaaggctctgtctcaaaaaaaaaaaaaaaggaaaactaaaaagaaaagaaaaaggccaggttcagtggctcatgcctgtaatcccagcactttgggaggccgaggcggcagattactgaaggtcaagagttcgagaccagcctggcgaacatggtgaaatcccgtctctactaaaaatacaaaaatattagcctggtgtggtggcacatacctataatcccagctactcgggaggctgagacaggagaatctcttgaacccaggaggcagaggttgcagtgagccaagatcacgcctctgcactccggcctgggtgacagagtgagactgtctcaaaaaaagaaaaagaattgagggatacttaaactaccaattattaaaaagtactataaatagattagtaggatgagtttagaaatagatctaaggcaaaatgtagcatataataaaggtgacatttcagatgaatagggaaagtatgaattagtcatttttaggtcattgcaaaatatctctttgttcatgttaggcttttgaccaaaagtgtgatttaaataatattgcatctaaggatatttatttttagctcgttttttcacttgccattttgttttaggtgatttttgtgaatggctgaattatttgtatactgtaggtaaattttgttttgttttctttcttttactctttaggagactgagtcttgctctgtcgcccaggctggagtgcagtggcacgattatagctcactgcagccttgaactcctgagctcaagtgatcctcctgcctcctcctctgaagaagttagaactaacagatgcatgccactaaacctggttaattaaaaaaaaaaattttttttttttttttgtagagacagaatgtggctgtgttccccaagctggtctcctggcctcaagtggtcctcctgccttggcctcccaaagcactgtgaatgtaggcatgagccactgtaccctgccaaattttgtgttttgaatgtgctgtagaacttctgagagttcgcctcatttattcattcacatttattgtagtagaagttttttttttgtttgtttgttttttaatttacttcagtttgtttaaaaagaaagaggatagccaggcacagtagcacatgcttatagtcccagctgcttgggaggctgaggcaggaggattgcctgagcccaggaggtcaaggttgtagtatgtgatgatcacacctgtgaattagcctgcactccagcctgggcaacatattgagaccctgttgttaaaaaaaaaaaaaaatagaagaaagggttttatcaaaagctagtaaacaccccaaataattgaaagggctgaagaaacatacagtatactctaggctgagcttccatgaaataacttctgcaaccagattgcaaactggatgggctatgaagctgtccttgctgtgatttctgccggcaaaattgataccttttctctgctttttttttattttaaatattgcaaaataagcatatgtatagaaaaggtcataaaacataaatgtacacttcaatgaataattataaactgaacaccatccagttaggaaagaacattgtctgcactgcagatatctgtatgtcctttctgatttcatatttctatctccccctaaaaaactaccttcctgactttcatcatgagagttctgtaatggtttacttgtttttcttaatagtttcaccacttttctctaaacatgatggttgtttttgaagaaagtcatgctctatgtgttcttttatcatgtgctgcttgtgagattcttgtgtgctttatgtagtattgtccattttcatgttgaacaacttgggctgttgcccatttgtagcccttattattgttttagagacagggtcttgctgtatttcccaggctgtaaactcctgggctcaagcgatccccctgcctcacagcctcctgagcagctggtactacaggcacatactaccatggttgactcatgtatttgttgtgtatgtatgttaatttgtggtatatacctaggaggtagtcaaagagtatacatatctttacctttaataagtaatgcctaaatgttacctgcaatgtaccagtttacactttcacagtagttgatgatagtacatgttgctccattttcttgaccacagttcggttgctattgtcgaactttaatttgtgcggtcttgtagttatgcagcactatctcattgtggttttaaattagtatttctctgataattaaagaagctgaatacctttgcatattttgtggctgtttggatttcctattttgtaaaaggcttgtttaagctttttgtccattctcccatttgggtagtctgtctcattgatttgatttgtaggaaaattttatatattctggatgcttttcctttggcgcgtaggtgtgtgtattctgttctctgtgttgtttttattctaataatggtatcttctgaagaatagatttttttagttgcttttaaaaaagatgtgcaatgtgatagatgattttatgtatgtatacattgtgaaatgattaccacagtcaagttaattaacacatccatcacctcacatagttacctttttttggtggtgagaacactcaagatttattttcagcaaatttcaagtatacaaaacagtattattaactatactctctgtgttgtacattagatactaagaacttactcataatgggaagtttgtgctgtttgaccaacatctccccacttctcctaacccctaatccctggcaaccgtccttctactctttccttctgtgactttttctttagattccacgtataagtaagatcacacagtatttgttttttctgtgtttggcatatttcacttagcataatgtcctacaggttcatccttgtgttgcacatggcaggatttcctttttttttttttatggctgaacgatattccattgtgtatacatacattttctttatttatttatctcttgctggatacttagattgttttcatatcttggatgttttgaataattctgcagggagtgttgaggtacatgtatctctctgagagactgatttcattttctttggatatacattcagaggtgcaattcctgagtcatatggtacttctatttttagatatatttttaattctataatattttccataatagctatgccaatttacatttctatcagcagtgtacaaatgttctcccttcttcacatcctggccagcacttgtttactgttatctttttgataatagccatcctaataggtgtgaggttatctctctctttatttttttaatttttttttagatgggtcttctcgctctgttgctcaggctggagtgcagtggtgtgatcactgtagccccagactccttggctcaatggaaccttctgtctcagcctcctgagtagctaggactacagatgtgtgctaccatgcccggctaatttttaaatttttagtggagatgggtctcgttatgttgtctatgctggtgataaattcctggcctcaagcgatcttcctgtctcattttgtttttgatttgaatttccgtcatgatgcttgatgttgagcttctgttcatatacttgttgcccatttgtatgacttctttgacaaatgtctattcaggtcatttgcccagtttttttttgtttttgtttgttttgttttgttttgttttgttttgttttgagacagagtctcgccctgtcgcccaggctggagtgcagtggcatgatctcggcccactgtaaactccaccccctgggttcaaactattctcctgtctcagcctccccagtggctaggattacaggcgcctgccaccatgcctggctaatttctgtatttttcgtagagacggggtttcaccgtgttagccaggctggtattgaactcctgacctcctgatccacccacttcggcctcccagagtgctgggaatacaggcatgagccaccgcgcccggcctgcccagtttttaactgtgtttttgtttgtttgtttgttttgctattgagttgtatgatttccttatatattttggatattaatatcttaccacatagtgtaaagtttgtaaatattttctcctgaaagttgccttttcattttgttgatggtttcctttcccgtgcagaagccttttagtttgatgtagcccaactgtttttttctgcttttgttgctgttttttttgtttgtttgtttgtttttttgagacagagtctcgctgtactacacaggctggagtgcagtggcgtgatctcagctcgctgcaatctctgcctcctgaggttaggatccctcctgagctgggattacaggtgtgcgctaccatgcctggctaatttttgtatttttagtagagacaggctttcaccatgttggtcaggctggtctagaactcctgacctcatggtccacccactttggctttccaaagtgctgggattacaggcatgagccactgcacccagcctgttgccatttcttttggtggtcatattaaaaaagtaattgccaagaccaacgtcgagatttttccttatgttttttttctaggagttttgtgctttttgtttttcttttcttttctttctttctttttttttgaggcagattctcgctctgttgcccaggctggagtgcagcggcacgatcttggctcactgcaacctccacctccaaggttcaagcgatttgcctgcctcagctgcctgagtagctgggattacaggcgcacaccaccacatctggctaatttttatattttcagtagagatggggtttcatcatgttggccaggttggtctcgaactcctgacctcaggtaatccacccaccttggcctcccaaagtgctgggattacatgtgtgagccaccgcatccggcctgagttatgctttcaatgtatttcttacatttcagtttttaatcactttccagttaatttttgtgtatggtataagacaagggtacaatttcattcttttgcatgtggatatccaggttttccagtgccatttattgaagactatccctacctcagagttttgtttgtttgtttgtttgtttgttgttttgagacaggatctcactctgttggccaggctggagtgcagtggcaccatctccactcactgcagcctccacctcctgggttcaagtgattctcccacctcagcctcctgagtagctgggactacaggcacacatgcctggctattttttgtatttttttttttttttttttttgagacggagtctcgctctgtcgcccaggccagactgcggactgcagtggcgcaatctcggctcactgcaagctccgcctcccgggttcacgccattctcttgcctcagcctccagagtagctgggactacgggcacctgccaccacgcccagctaattttttgtatttttagtagaaacggggtttcaccatagtcaggatggtctcgatctcctgacctcgtgatccgaccactttggcctcctaaagttttgagattatnnnnnnnnnnnnnnnnnnnnnnnnnnnnnnnnnnnnnnnnnnnnnnnnnnnnnnnnnnnnnnnnnnnnnnnnnnnnnnnnnnnnnnnnnnnnnnnnnnnnnnnnnnnnnnnnnnnnnnnnnnnnnnnnnnnnnnnnnnnnnntatctcaaaaaaaaaaaaaaattatcggccaggcgtggtggctcacgcctgtaatcccaacactttgggaggccaaggcgggcagatcacgaggtcaggagatcgagaccatcctggctaacacggtgaaaccccgtctctactaaaaaaatacaaaaaaattagttgggtgtggtggcaggcgcctgtagtcccagctatttgggaggctgaggcagaagaatggcgtgaacctgggaggcggagcttgcagtgagccgagatcatgccactgctctccagcctggacgacagagcgagactctgtctcaaaaaaaaaaaaaaggaacactcatttactgtctttattactgatttttctttttgcttatgttggattacaagtctgcatttttattttttttcttaacataattctattcctttaaacttccaggaattcttcatctttgcctatgacctttctgtgtgtgtctatatgttgtggatttatttctaacatttacattctgtcctttcagtgggattttggtggggagaatatgtcattgtttggactcattttgccatcatgaactataagttgcagtttgtttagtgttacataatacttcagaattgttgaatgacagtgaatttaattaaacagtatagggtttgtaatttaatatacagggattctgcccctaaatatttgagttatctgaagcaggtttcttaattattcaaagtattgatatccttatctgcaaaatgaggaataagtaaataaataaagggaataatcatatctgtctcataagttcgtcacaagcattatttgagataatacatgtaaagctcttagtatagaacttggtatacagtgaatatactcagtaaatgtaatttgttaagtagtgactattcaaaatagttatttcaaaaacaaatcaagccgagtgcggtggctcatgcccatgatcccagcactttgggaggccgaagcgggtggatcacccaaggtcaggagtttgagaccagcctgaccaacatggcgaaaccccatctctactaaaaatacaaaaattagctggggatggtggcaggcgcctgtaataccagctactcgagaggctgagtcaggagaatcacttgaacccaggaggcagaggttgcactccagcctgggtgacagagtaagactcaatctaaaaaacaacaaaacagaaaaacaagtagctttttcagaaagccttttagaagagatatgagtaaacagatgctaagtggctggctaaatgataccacaactcttgaatcaaaactgattcagattaaaaaaacctcttaacacattctttcctatcaatgtagttaggactragagtcatgtagcagtagtaaacctgtcctgtaatatatttctcttaggattggtttgatagttgtatcataattgcattatttataacattaatttattaatgtattcattaattaacctaagtccyttagtagttttcagaatatttttcttaaattgtttcctgtgctaattcgaatgttaacatgctaattcagagtttgttgccatttgtatcctgacagtgtattaatgtttatacttgcaagagtraaatattttatttcttattacagcggaatggccaaagactatgacgggtcttcctagcacatcagggacaactgccagtgtggtcatcattcggggcatgaagatgtatgtagctcacgtaggtgactcaggggtggttcttggaattcaggatgacccgaaggatgactttgtcagagctgtggaggtgacacaggaccataagccagaacttcccaaggaaagagaacgaatcgaaggacttggtgggaggtaacattctgtcgttttctctttcctcttttggttctatttagtccttttatgctttactaatgaaattgacctactactstcccttttactgaagttactttcttagtattacaggttttttagtttgtctgatgtaatactcatgtatgtatgttcatatttttctcattactatgaattgacttttatttctgataatgactctaataggaaataatatttcagtgagccccaaggaaacaattcaaggttttactgaaaacctttcagatgactttcagaatctagacggagcagctcttggagttccagagtagaacactttgaatctggctgggggaaaaagattaagttagaattaaccttcagcttttttcattgatttcagatttactgcaaacctttccagttattgttttctttgtttgaacttagcgtttcaatgtgtaagtaatttgtaaactaggaactgaaattgatttcaattttatatttttatgattcaaacttaaatgaaagattattctaaaaatcaagagagtgaataacatgaaaaaatttaaaaattatctcaatactaatttttaaaaattgaggatatgaggcaagttgagtagaatccaatgttttctaaataatccttctaactaaagccttcccatgatatcgttacttgcctcttttttgcttttattaaatcaaaattggtcttttgcagagaaacgacaaactaaggaaaataattagcatctggctgggcactgtggctcacacctataatcccagcactttgggaggctgaggcgggcacatcacctgaggtcgggagttcgagaccagcctgaccaacatggagaaaccccgtcgctactaaaaatacaaaattagctgagtgtggtggcacatgcctgtaatcccagctactccggaggctgaggcaagagaatcacttgaacctgggaggcagaggttgtggtgagctgagattgcaccattgcactccagcctgggcaacaagagcaaaacaccatctcaaaaaagaaaaaagaattagcatccttaaactataaggagttcaacaaattaataaagtactaaagtgtgaggctgggcgcagtggctcacgtctgtaatcctagcactttgggagaccgaggcgggtggattgtctgagctcaggagttcgagaccagcttggggaacatggtgaaaccccatctctgctaaaatacaaaagaaattagccgggcgtggcagcgtgcaactgtagtcccaactattcgggaggctgaggcaggagaattgcttgaacccaggaggcagaggttgcagtgagctgagattgcgccactgcactccagcctgggcgacagagcgagactccatctcttaaaaaaataaaaataaaataaaataaagtactaaggtgcatggcaaccccggttaggtggataaaggagagaaagtttgaacaacaaaaaaatgcaaaacagtagtaaacatttggtgaaataaaagtaaaacattaagatgaaacttcatttcctgttattagattaggaaagataaagagattcctctcaatatttttattgaaatggttaccttcttggtaagattacaaattggtactacctatatagaaaataatatataccagtagctttaaatgtttagggaatctaaagaagaaatctgaactgtggacaaaaatatctgaatagagttactgattgcagcatttgtaatgactgttaaaggccagaagtaacttgaaggcctaacagctggataatggttaagtatatttagcaacatattcataatgctgaatatgatacagccattaaaaataacatttatagataagtttataaaactcatggtgttttgaaatttttccaagtaaaggtagagtaatatgaactcccatgtatatggggaaggtttaatgatagaggaaaatgtttatggtcacaaaaaagcaggatataaaattatatttctggtgttagcaatgcagagacatgggaataagatggaaatattctaaatttttataaatgagtgatgagattttatgccatacgtttatttttatttttttaatggcgacattcatttggttcaaattcaggtagcataaaaaagaggatatgctatggaaggtctctcagctgctactgtcccaaaggccacctcgttcccctccacttgctaagcaaccagtatggctgtgtgtcctttcaaaagagagatattcatatacaatcaaatatattatggagctgtaccatgtacagatgtaccgtcatttattttaatcagtctcctattgaaggatttttatttctaatttttttttgttattgcaaactgctgtgaaatgaaaaatctgcacatatgtgtttttgtgcacttgccagtatatttgtaggatcatttcctaaaagtggaattgcttggccaaagaggtgtatgttttgaatattgataactatttgtctctataaaggttgtaccaatttacacttctaccatcagtgtatgtggatgtcctggacaacaaataaaactttttgatcatatccagtttcaggtttaaaaaagaggtgtctcaatgatgtgtttttttggggttttttttgttttttttttttgaaacggagtctggctctttcgcccaggctggagtgcagtggcgcgatctcggctcactgcaagctcggcctcctgggttcatgccattctcctgcctgagcctctctagtagctgggactacaggcgcctgccaccacgcccggctaattttttgtatttttagtagagatggggtttcaccatgttagccaggatggtcttgatctcctgacctcatgatccacccacctcagcctcccaaagtgctgggattacaggcgtgagccactgcacccggcaatgatgttgttttaaaaaaaaattttaagaaatagaaatgaggtcttaccatgttgcccaggctggtcttgaactcctaggctcaagcgatcctcccaccttgtcctcccaaattgttgggattacagatgtgagccacgtgcccagcttcagtaatgttttaatttgaatttatcttatgagaaatattgaatctttttatatatttaagagccatttatattttcttttctctgtatttcttttaatatttattattcattttgggggattgttgttagccatttttttcccacattaatgtgtaggggctagctgtacattaaagaaattagtctgatgtatgtgatgtgaattttagatattgtttccacagtttgtcttttgattatgctcctggaactttttccacgtggaagtttcttttaatgtagttaaatttattagtctcttctgttacaactttttgggttttatgccacacacacagtgaagctttttaataaagtctgctatattttcttttagtacaacaggaatatttttggtcttagaaactctgtttgttcattgtatttgtttttgacatgatctcactctgttgcccaggctgcagtgcagtagcacaatcatggctcactgcaacctcaaatgatcttcccatgttagtctcttgagagctgggactacaggtgcacgtgtgccaacatgccagctaattttctttttctttcttttttttttttgagacagagtcttgccctgttacccaggctggagtgcagtggcgggatctgggctcactgcaacctctgcctcccaggttcaagcgattctcctgcctcagcctcctgagtagctgggattacaggtgcccgccaccatgcccagctaatttttgtatttttagtagaaacggggtttcaccgttttggtcaggctggtcttgaactcctgaccttgtgatccgcccacctctgcctcccaaagtgctgggattacaggtgtgagccaattcgcctgaccaggaaggagtattttgctcacttttccataaatgtttgtctttgatactgtttcaaaactcaagaaatgatagtttcttaaggtatctgaaactttattaatgaactttgcatattcttacattaacagccattagtcagtcaatgaagacattagttgaatagaaatttttttttttttttgagacttgagttttgctcttattgcccaggctggagtgcagtggcacgatctcgtctcaccgcaacctctgcttcctgggttctcagcctccggagtagctgggattagaggcatgtaccaccacacccagctaattttgtatttttagtagagacggggtttcacgaactcccgacctcaggcgatccacctgccttggcctcccaaagtgctggcatttcaggtgtgagccactgctcccggccctgaattgaatgctttttaaaaatccctgcataatttaaaaaaattaatgactttaattttaagagtacttttagattcacagcaaaattaagtgggaagcacagaattctcatatatactttggcctaccccccgtctcccaggcttccccactatccttctccagagtgtttgttataatcaatcagtgaacctacactgacatactgttatcacctggtgtccatagtttacattagggttcactccgggtgttatacattttatgggttttgacaaatacgtcatgacacgtatccatcattatagtatcatgcagattagtttcatcaccgtaagagtcctctgtactttgtctgttcatccctcccccacttactcctggcaaccactgctctttttactgccttcataattttgctttttccagaatgtcatatagttggaaccatatagtatgtagcccctatgcatgactttttaatatatgcatttattgtttgtaatatactaggtcactgagttatacagatcttgcaaatattgacactttttattatactatataatatccagtcatgcagcctctcaaaaaactccactgtatacatgtggtcttagtagtattatgaaaaaaaaaaatggaccttggagacaccctgaaaaagtctgtagtaacctgccaggggcccctaaaccacattttgagaaccactttgccagtactcgtatggtttcatcatcttttatattttaatctttaatccttctggaattttaagatctaagctatgtagtaaataggcaagttaactttttttctagatggctactagtagccacttgaataattatacatcttttcattactgagtagcagggtgaccaggcttaagacccttctttagtgggaagatgaccttgaatttaccctcttcttgtatttctctggtgaagataaatgtgaaatatcacctctgttgtaagacagcattgcttattgtagaatgatccctgaatggaattgcatcttggtagggaagttgttgaatggactgtacatttctattcggaagcacaggccttggcttccttgtatgcatgcagtttgtcttgtgtagggaccaagaaactgtagtcatgtgctatttattacattggtttctgtgacacatgaagcttacctaagctagaccctgtcgtcttgcttacaactgagccatcacttgggagatggaaaaatggcttctggctgtctgaatcactgctgaagacaatatccttgaagctgctatggtggcatactctatttcctgcccagtattctgcaaagttagatgaacctcctttcaggctatagtctatttgatcttgtgattgtgaaggtgagaatatatctgacatctctgctggttgtcatgctaagtgggctttgcaaattataaacagaattcttccatatatttgggtcttttctgggctataatttttttcctgcttatttaccagtattataatttttaaaacggagactttattataattttaaatattggtaggcctgattccttctcattaatcttccttttaaaaaatacttttcttggggccgggcacagtggcttacgcttataatcccagcactttgggagcctgaggcgggcggatcaccggaggtcaggagttcgagacaagccgggccaacatggcgaaaccctatctctactaaaaatacaaaaatattatccaggcgtagtggcatgttcccgtaatcccagctactcgggaggctgagggaggagaatctcttgaacctgggaggcagaggttgcagtgagccaagatcctgcctctgcactccagcctgcccaacaagagtgaaaactgtctcaaaaaaaataaaataaaataaagcagctggctgcggcacttgtaatcctagcgctttggaggccaagatgggaggatcacttgaggttagaagtttgagaccaacctgttcaacatagcgggacctccatctctaaaaaatttttttataattataaataaataaaataaatgaacaaaaaaggaaataattattttctacagaagaaattacccttttgtgttttaaaaatacctttcttgactattctttcttgtttgtttttttacttgaattttaaaattatattttatttgattttaataatgtttttagaaagagttttttggctttattaccaaaaacaccatctggacagttgggcagatactccgctattttggagcaggtaactttttgcaaaaattgagctattttattataagttatttccttgcttccctctgtcccggcctaggcaacgggccagcattttgtttttccagccttctgttgctgctcagtcagctctctgcgtgtcaggctgttcctttttacatgccttttaatcatataggacaacaacaggaagtgcagtaaaagcatcttttataacattgctttggttttttgttactagatgttgaaacttctatgttttaaccagtatcattatttgtctttttgtttctcagaaacacagatcataatatctttgaatattaagtgtcgagagagctgctcgtctagttatgttggaagcagctactgtaaattacttaggtactaagccttaccttgtaaggagaaggtttagcaaagaataatagagctttaagatggtattaaggcagaatgttggcatcttataactcttgtgtttcatggattcttgtgaatggcaagtttagtctttactctgctgttgacttttgagagtcatcattgaagaaagcttaatacaacaaaatgaatgcctttgatattttaactcttgttatgatcaacctatttatatcagaacttatttaaactagttcttggctgggcatggtggctcacgcctgtaatcccagcatgttgggaggcccggatgggaggatggcttgagcccaggagtttaagaccagcctggcaaacatagtgagatctgttctctacaaaaaaattacatgcctttggtcccagctatttgggaagctgaggtgggagcatcacttgagcctgggaagtcaaagctgtggtgagccacgatcacaccactgcactgcagcctgggcaacagaacgacaccctgtctcaaaaccaaatgaaaactagttctcaaaagggatggtaggctgggcatggtgactcatgcctgtaagactagcactttgggaggctgaggcaggcagattacttgaggccaggagttcgagaccagcctggctaatatggttaaaccccgtctctactaaaaataaaaaaattagccgggcattgtggcgggtgcctgtaatcctagctactcaggaggctgaggctgcagtgagttaagatcacaccactgcactccagcctaggtaacagagcgagactgtctccaaaaaaaaaagggtggggggatggtgaatgagcaactttctggaatttctcttctttgttaacacccacaatgttttctggtcattctctacttgtttcagtcttcctctggactgttcagtatactcaccactagccacaaatggctgtttaaattaataaaaattaaatttaaaaaatcaattcccatttgaagtaaagctcatttcggtcatgccaggcatagtttgagagaccatctctaatgttttgattatcagtgttttttcctaaagaactaatcatatttcaggccgggcgcggtggctcacgcctgtaatcccagcactttgggaggccgaggtgggtggatcacgaggtcaggagatcgagaccatcctggctaacctggtgaaaccccgtgtctactaaaaatacaaaaaattagccaggcatggtggcaggtgcctgtagtcccagctactcatagtcccagctactcgggaggctgaggcaggagaatggcatgaacccgggaggcggagcttgcagtgagctgagatcgcaccactgcactccagcctgggtgacagagccagactctgtctcaaaaacaaaaaaaaaaacctaatcatatttccaagttttaggcatttcttttgctcctatgacacattttaggagggttttcttactcttgtaactcccaaatctatatgtctacagctgatctatttcacaaagtctagtctcaaactttgaattacagaaatacctaaatatatagtattttctgtatattgctgaaatcatattaaaactgccaacaattagctgggcatggtggcacatgcctgtattctcagctactcaggagactgaggtgggaggatcactgcagcccaggaggaagtcaagcctgcagtgaaccatgagtgcaccactgcactccagcctgggcgacagagaccctgtatcagaaaacaaaaaacaggctgggcgctgtggctcacacctgtaatcccagcactttgggagactgaagtgggaggatggcttaagcccaggaccagcccaggcaacatagtgagaccccgtctcctcaaaaaagaaaaaattaggcaggcgtggtggcccacgtggtggctcccagcactttgggaggctgaggtcaagagttcgagaccagcctggccaacatggtgaaaccctgtctctactaaaaatacaaaaattagcaggcgtggtagcgtgtgcctgtagttccagctacttgggaggctgaggcagaataatcgcttgaacccaggaggcggaagttgcagtgagtcgagatggtgccactgcactccagtctggacaacaagagcaaaactccatctcaaaataaataaataaaaataaacaaaaaaactggctgggcacggtggctgacgtcagcctgtaatcccatcactttgggaggccgaggtgggcagatcacttgaggttgggagttcaagaccagcctggccaacatgctgaaaccccatctctgctaaaaatacaaaaatagccaggcatggtagcatacgcctgtaatccaagctactcgggaggcttaggcaggagaatcgcttgaacccaggaggtggaggttgtggtgagctgagatcacaccattgtgctccagcttgggcaacagagtgagactccatctcaaaaacaacaacaacaacaaaaattaaaactgaagttctgctgtttcgcccgtcctcaacataaacactcagaaccctataacctttcctttttaattgcttatatcacaatttaatgcctatttatttatttatttattgagacaagagtctcgctctgtcatccaggctggagtacagtggtgtgattctcggctcactgcagcctctgcctcccgagttcaagcagttctctctccacttagataaggccttctgtcaacccccaattgtttactaattaggtagtgttgctttttttttgacatggtatttatacttacttttcttcacattacattcatttggttatactgcctattccagtaatctcaaaattttccastttgaatctaccctaattcctctctgaacaggaattttggcttatgyatctttgtatttgaaacacataagacattattttgtaataatgtagtcttattttattagtgatttaatatactgagctatcttagttgttgtattttaatcatttagattatttatgtgaactctttatttttagtgtaatgaacaagtctggggtgaatcgtgtagtttggaaacgacctcgactcactcacaatggacctgttagaaggagcacagttattgaccagattccttttctggcagtagcaagagcacttggtaagtaggacttaatttggtgaaattatattgaattttctacaatatatggtggcaaaataaaagaggagacagaactaaacccttacttggcatatagtgagggtagagatatcatgatattctattaactgctttagaacctaatcgaagccatgcatggtggctcacgcttataatcccagcactttgggaggctgaggtgggcggatctcttgaggtcaggagtttgagaccagcctagccaacatggtgaaactgcatcttcactaaaaaatacaaaaattagctgggcatagtgatgtgtagctgtagtcctagctactcaagaggctgagtcaggagaattgcttgaaagcaggaggcagaggttgcagtgatcgcatcactgcactccagcctgggcgacagagcaagactctaaaaaaaagcctaattgaggggaaggtttaggtatataattcactgacagttgccctttgttcatgagtcacgttcaatgttttgctaatttctatctctgtttagggaagtatatgcatatctaggcttaatgttacccttgaaactatttttaagtatcccattctcctttagcccttaatagtcctcctgagagccttcaaaacctcttttttctttagttaggaaagtaaaataactatgaaaaaaatagttatatttctggtctacctggctttggaaagaaggctagagaattacacctgttaaggtgtcttaccttggctatgctagatgggggtagttttttcaaagaaaatgtctctgagaaaacgcacatttgtttatttttattttatgagacagggtcttgttttgttattcagcctggattgcagtggcatgatgacagctcactgcaacctctacctcccaggctcaagtgatcctcccacgttagcctcccgagtaactgggactacaggtgtgagccaccacgcctggctaattttttcttttttaaggagacggggtctcactgtgttgcccggggtggtcctgggcttaagccatcctcctatctcggtctcccaaagcactgggattacaggcatgagccaccacacccagcacaactactatatatattaataatttgtttccaatgtgaaactaattttcttctttcacaccctgactggtggacttttatgttatatccaagcatttgctattatgaaaaatactgcaataaatatttccttatatacacatatgggttgttttttttttttaaatggagttttactcttgttccccaggctggagtgcagtggtgcagtctcggctcactgtaacctctgcctcctgggttcaagcgattcttctgcctcagcctcccgagtagctgggattacaggcatgcaccaccactaccggctaattttgtatttttagtagagacggggtttctctatgttggtcagactggtcttgaactcctgacctcaggtgatctgcccgccttggcctcccaaagtgctgggattacaggcgtgagccactgtgcctggcaagatttctttaagatacataactagaaatggaatttctgggtcatagtatgttacttaccaactgtttttgtgtcgtaacactcacacaagatgataatatttctacagtaagcagaggaggctacttgagactgaggtaactaacatggactctctagccactgaggacccaccctgctgcccctaggcctcactcatccaaggaataccaattgggagactcagttcagagatatctacatgtttagttttattaggtattgctaaatttcttcccaaagtgatyatcccaggttattacagtcccgctgtattagttatctattgctgtgtaatcaaatactcccacacttaggagtttaaaacattttttatgtacacagttcctccggctcaggaacccggggtgacttaactggatggttctggctcagggtctcttgtgtagctgcaatcaagatgtcattaatcatcgaagccttcaatggggttggagcatctacttgtaagacagctcactgagtaacctggattggctggaggcttcagtttcttgctttgccggcctctgcatagggttgcttgatgtgtcttcatcacatggcagctggcttccttagagcaagtgatcataaaaagacattttgacttctaccttgctttcttgatcacttgctgtagggaacccagctttgtattttgttagccctgaatcactaaatcaagcccaccctcaagtatatcaaataatttgtggatgtattttaaaagcatatagttcctacttcttcatgattgttctttattcaccaaatatttattaaatacctgctatgtgctaggtactgttccaggtgctgaggattcagcagtgaatgaaacaaaaattcctgcacccatggagcttactttctaggttaggggaaaacatgataaactaaaataactaagtaggacacatactgtgttagaaatgctaccaagaaaaataaagcagggaatgctatgagggtggggcctgtataataattctaaatgggatggtcagaggagggtctcgctaagatgatatgtcagtaaagtgtaagtaaagagatgaggcagtgagacctgtgagtgtctggggccacagaatttaggcagaagtaacaaatgtaagggttctcattactcatgaatttttctcttttttttttgagatgaggtctcactctgtgccctaggctagagctcattgcagcccctaaagtcctgggctcaagtgttcccccagcctcagcttcccaagtagctggggctacaggtgcatgccatcacacccaactaatttttaaaaattttttgtagagacgtctcgctttgcccaggttggtctcaaattcctggcttcaagcgatctgcccacctcagcctcccaaagtgcatgtgcgacagcgctcagcctactcatgattttttttttttttttttttagacagaatttcgcttttattgcccaggttggcgtgcagtgatgtgatctcagctcactgcaaccttcacctcctgggttcaagcaattctgctgcctcagcctcccaagtagctgggattataggcgtgcgcccccacgcccggctaattttgtatttttagtaaagacctgtgagtgtctggggccacagaatgtaggcagaagtaacaaatgtaagggttctcattactcatgaatttttctcttttttctttttctttctttctttttttgtttttttgagatgaggtctcactctgtgccacaggggtttcaccatgttggtcaggctggtctccaactcctgacctcaagtgatctacccacttcggcctctcagagtactgggattacaggcatgagccactgtgccccgctcctactcagtatttttaactgagcagctggaaaaatggagttgccactaagtgataaagaaatgactggaacatcagtgtaaaggagaggtcggaagttcagttttggacacattaccctttcggcatgttttagacattaaggtggtgatacctatttggcttcccattataagaattgatttcaggtgttgtctagggtggagctttcaatttgggggagccagtagcatatagatagtatacaaagtcttgaggtcatgtagggattgagtgcagatagaaaaggggacaaggtctagtggctgagccctgagatactctcactgttaagactcgggggatgtgctctggtttcatttgagggttggattaaaattaaaaaaaaatctaaaagagttaggggatgtgaatggaagaacaaggtaaaacaactaacagctgtaagtcaaataggaaatttgggttagcgtaccctggaagctaagtgaagaaagtgtttccagaaagaaagtgtttcaaatactgttgtcatttaggtggagggaggattgaaaaatgaccatgggatttaggaatgtggaggtcattggtgaccttgaaaaagaaggtagcttttggtggaatagcaagaccacaaccatgattggggttattgaagaaagaactgtcttcttgagtgggaggaataaaatttgatacagcgagtttttagacagtgtttttatagaagttactttacttcaacataattttgtaaacacatacagaaatgaattaatattttgataaaagggcttataagagaaaatcgttttagtgataaaaaagcttttttcctcttgatttctcttgtcacataaatattttcttttcaaaaataatgctaccttttagattttaatatttaagctaaaaaggctttgctgtattacttttcaaaccattattctgacacttggaaaaatttttttttttttatgagatggaatctcactctgttgcccaggctggaatgcagtggcacgatctcagctcactgcaacttccgcctccccggctcaaatgattcttctgcctcagtcttccaagtagctgggattacaggtgcgtgccaccacacctggctgatttttgtatttttagtagagatgggatctcaccatgttggccaggctggtctcgaactcctgacctcagttgatccgcccacctctgcttcccaaagtgctgggattacaagcgcaagccaccgcgaccgaccggcctggaaataatatttttaaaagagccatgttattggttttctgagtttagcttgttgcatggaaatacttactggcctaaagtaaattaaatgctcatatttagcacacacccttatggtttacggccatttttcttataggtttttttgggcgggggaaggggtgggaatagatgtctccttgtcaacattggtacccaccctatagacactgatgataattacccaagtacaaatgtagcaaaggtgccctctagtggctgcctgctggaattgcattttgagtcttgcaaatcattttattcactggggagataatttttgagtatagtgtgtatgaagcactctgctgtatgtacaagcacatgatctttgccctcatggagcttgcagtctaggaaagggttgaaaggcattcatcagatgataacaaaaaactgaaaaaaaaattatttttttttgagactgagtttttttcttgtcatccaggctggagtgcattggcacaatctcggctcactgtaacctttacttcccaggttcaagcgattctcctgcctcagcttcccaagtagctgggattacaggcacccgccaccatgctcggctaagttttgtacaaaaatacaggggttttgccatgttagccaacttggtctctaactcctaacctcaggtgatctacccgcctcagccacctaaagtgctgggattacagatgagagccacagcgcctggctaaaactgaacatttttaattcttcttcttcttctttttttttttgagatggagtctcactctgtcgcccaggctggagtgcagtggcacgatctcggctcattgcagcctccgccttccgggttcaagcgattcttctgcctccatctcccaagtagctaggactacaggcgcacgccactgcacccagctactttttgtatttttagtacagacggggtttcaccatgttggccaggctggtctcgaactcctgacctcaggtgatccgcctgcctcgggttcccaaagtgttgggattacaggcgtgagccaccacacccagccaattcttaacttcttatatgtactaatgaaaacctaaaataaggatatttcacttaaccagagaggccagaaaagtgatatttgaactgagttttgaagaattactggaggttaaggaggaagaaagtgtgttttaggcatagaaaacaacattttcgaaaagttcggtgataggaagaagcatagtgatataggaactctgatgaagggcagtgtagctggaacggataaggaaataagagacttggataaaatgagaaaatactgcattttataggcagtggtaaataatcatgtttggctggatgtggtggctcacacccataattctaacactttgggaggccaaggcaggtggattgcttgagttcaaggagttcaagaccagctggacaacatggcgaaatctcccctctacaaagaattggctgggcgtggttgcacgcgcttgtagtctcagttactcaggaggctttggttgggaggattgcttgagcccaggaggctgcagtgagccaagattatgtcactgtactccagcttgggcaacagagcaagaccctgtttcagaaaaaacaaaagaattgtgtctttatcttaaaaacaattgtgaactataacagagttggaatgggaaacataaccagatttgtgtgtttttaattgtggtaatatatgcttagcatacacgtaacttaccgttgtaaagcatgtggttcattgatgttacgtacggttacactgttttgcaactgtcatccaccattcatcctagatttgtgggcttttgtttgtttgtttttgtaatttcagcttttagattcaggaagtacatgtacaggtttgttacatgggtatattgcatggtgctgaggtttggggtacgattgattccgtcatccaggtagggagcatagtacccaattgttagtttttcatgtcttcctccttctctcccttctccctctagtggtccccagtgtctattgttgccatctgtatcttcatgtgtactcaatgtttagctcccatttgcaagtgagaacatgtggtatttggctttcttttcctaaaagaaattggaaatttcttttatttagaaatttagaaatttcttttcctaagtaaattggattaatttacttaggataatggcctccagctgcatctgtgttgctgcaaaggacataatttcatttttttttttgtggctgtgtagtattctgtagtgtgtatgtaccatattttctttatgcatttcacttttgatgggcacctaagtagattccttgtctttgctattgtgaatagtgctgcaatgaacatttgagtgcatgtgtctttttgtagagcgatttattttcctttggatgtatacccactaacaggattgctagatcgaatggtagttctaagttctttgagatatctccacactgctttccacagtggctgaattaatttatattcccaccaacagtgtataagcattcccttttctctgcagctttgccagcattgtcatttattggctttttaataatagtcattctcacagggtatgagatggtatttcattgtggttttgatttgcgttctctaatgattactaatgtggagctttttatgattcttggccgtttgcatgtcttcttttgaaaagtgttgatgccttttgcccactttctaatggggttatttgtttttaacttgttgaattgtttaagttctttacagattctagatattagatctttgtcagatacatagtttgtgaatattttctccctttctgtaggttgtctgtttactctgttgatagcttcttttgctgtgcagaagctctttaattaggtcctacttgtcaatttttgtttttgttacagttgcttttgaggatttagtcacagattctttcccaaggctgatgtccatccacgattcttacagtttgaggtcttacatttaaatctttaatccattagtttgtgttttaaagagagaattttcattgagttttgagaatggattagagggggtaaacattgttggaagttctccatgggaagccactcaaaggggtgctgaaatttgataggtgtaaggaccactgagtgtcttgtggactgctggctgccaagtgccacaggagcaagcagaaaatatactggaaccagaaagcaggcctcctctcttctggtgtcccttcagcaccctctactgaggaaaaaagggaattggctgtctgccagtttccaaggcacctcctttcaggacctacagaaatgatgttctatgatcgtactttggtgtacaaacactagaccagtaataaaaacccttagttaaaggcccaattctgatccttaccagttatttgatattagatagaatcatatagactctttgaactggtaaaacaagggaaagtgtctatgagtatgaatcatctggtgagtttgttgaaaggtcagattctagggacttttactagcaaatttgaagcaacttgagcatcaaaacaaattataacaggaataagttaaaaaatattgaataaaaaagaatctgtaagtctatatagagataaaaaattgtacaggtagaagaatggatttttttttttttttttttttttacatttaaaggagtttaattgggcaatgaacgatttgtgaattgggtagccacccccgcccacagcagattcagagagactccaaagaaaatctttttttttgagatggtgtcttgctctgtcaccaggctggagtgcagtggcgcgatctcggctcactgcaacctctggctcctgggttcaagtgattctcctgcccgagcctctcgagtagctgggactacaggcgtgtgccaccatgcccagctaatttttgtatttctagtagagactgggtttcaccattttggccaggatggtctaaatctcttgacctcgtgatccaccagcctgggcctcccaaagttttgggattacaggcgtgagccactgcctccggccaggaaactcttctttaaaaaagattttcagccgggcannnnnnnnnnnnnnnnnnnnnnnnnnnnnnnnnnnnnnnnnnnnnnnnnnnnnnnnnnnnnnnnnnnnnnnnnnnnnnnnnnnnnnnnnnnnnnnnnnnnnnnnnnnnnnnnnnnnnnnnnnnnnnnnnnnnnnnnnnnnnnnnnnnnnnnnnnnnnnnnnnnnnnnnnnnnnnnnnnnnnnnnnnnnnnnnnnnnnnnnnnnnnnnnnnnnnnnnnnnnnnnnnnnnnnnnnnnnnnnnnnnnnnnnnnnnnnnnnnnnnnnnnnnnnnnnnnnnnnnnnnnncagagcgagactccgtctcaaaagaaaaaaaaaaaaaaaaagactttcaggcctgagcacagtgacttatgtctctaatcccagcagcctgtaatcctagcactttgggaggccgaggtgggtggatcgcttgagctcaggagttcgagatcagcctggccaatatggcgaaaccccatctgtagaaaaaaatacaaaaaaattagcctagcatggtggcacacacctgtagtcccagctacttggaaggcaggtgagagaactgcttgagcctgggaggcgcaggttgcagtgagccatgatcgcaccaatgcactccatcctgggcaatagagtaagacccagtctcaaaaaaaagaaacctttttggggttgggaaagaagagcaaaaagaaccaaaataaagtaaaataaactgtcagctaataaatgtagttagaatgtcctaattctgtcatcagtttataaccgttataataattgattcattcaggaatcatcagtagatgctaaaatatggcatattttggtacagaacaggatatttcacagagcctcaaactttcaccctacagactactcaccagttaaaaaaagaaaaaggcacctttatgctgccagtagatagcactttaaccaaatgatgaaagtcaatactgccaataataggactgactgacacactgtctctcctcatgtgatatacggagaaggacatgacatcagcaatgtagtcctgtagccaaaagtgagtttacccgttcatgaacccctgtagagcacgagaacaagaggaaacaatcagatggatccaatttaaaggtcattgtgcaatagaactcttttcttttcttttttttttttttttttttttgagatggagtctcactctcgcccaggctggagtgcagtggcatgatcctggctcactgctatgtccgctttctggggtcaagcaattcttctgcctcagcctcccgagtagctgggattacaggcgcgtgccacccagctaattttgtatttttagtagagccggggtttcaccgtgttagccaggctggtctccaactgttgacctcaagtgatccacctgcctcggcctcccaaagtgctgggattacaggtgtgagccaccgtgcctggcaaaagaactatcttgaactcttcacagttgtcaataccatgaatgataaaaacaaaacaaaaccctagggaattgttttaggttaaaaatgactaaaaaatgacaaatgcaattaactttttaaaaagtttttttaaaaataaagatggggtttcactgtgttgccccggctggtctcgaactcccaggctcaagcaatcctcctgtctccacctcccaaagtgctgggattacaggcatgagccacctaacctgactgaagaatgatccttgaatggatcctggatattaaaaatgcattattgtgacaactgggaagatttgaacataaactttatattatacagtgctatagcaatatgaaattgcctgagtgtggtagaataacatcctcatgcttaggagataaatgttgaagtattactgtttggaggtgaagtgttttgagtctgtaatctaatctcagatggttcagcaaataactaaaaccagctctatccacagattccaacactatctgcataaaaaatcccagataatcttcaaaagaactactggaattaataagtggagtcagcaagttcacaggacctagatttagcatacacagtctatcatatttttatgtactaaaaatgaacaattcgtaataaaatttaaataagtatcatttataatcgcacccaagaaaaccatgaaatacttaggtataattgtaacaaactgtgtttaagatttatatgcgtgaaactacaaaatgatgaaagaaatcaaagaaatagaaatataccacatatcttagtcaaaacccagagtttaaaaatttaagttagaagaaacaatcccttcttctgaaaatgtattgaggtttattgagaaagaaatagagattgaggctgggcgtggtgtctaacgcctgtaatcctagcactttgggaagcctaggtgtacagatcacctgaggtcaggagttccagaccagcctagccaacatgatgaaacctcgtctctactaaaaatacaaaaattagccagatgtggtggcgggcacctgtaatcccagctactcgggaggctgaggcaggagaatcacttgaacccaggaggcagaggttgcagtgagccaagatcgtgccattgcactccagcctgggcaacaagagcgaaactccatctcaaaaaaaagaaaaagatattggagactagtgatttggaagttgtcagtaaaagagttggaaacttgaaaggatggtttcaccaaagcaatgtaaaatatatakgtgtgtgtgtgtgtgtgtgtgtgtgtgtgtgtgtgtgtatgtgtatatatatatgtgtatatatatgtatatatatatgtgtatatatatgtatatatatgtgtgtgtatatatatgtatatatatatgtgtgtatatatatgtatatatatgtgtgtatatatatatgtatannnnnnnnnnnnnnnnnnnnnnnnnnnnnnnnnnnnnnnnnnnnnnnnnnnnnnnnnnnnnnnnnnnnnnnnnnnnnntaggtagataggtatctccagaaagataagaacataagaataatagtccttacagggaaaactggaagggcagtggtgagaagggagaattttcactgtatatgtacccttttatatcttttggttttcatactatgcgaatatattacataatattataaaaaggcagacccagtaccgtggctcatacttgtaatcccagcactttggggaaccgaggtgggaggattgcttgaatccaggacttggagaccagcctggacaacatagtgggaccgccatctctacaaaaaataaattagctgggcctgttggtatacacctatagtcccatctacttgagaggttgacgtaggaggatcacttgagcccaggagatctatcctgcagtgagccatgattgtgccactgtccccatgttcatttttattatttcgtcaaccagggagctttgttttgctggtataaagaggtaagtgtgtctttgtgagcttatctggattataattagcttttagtgcttgcatgtattctgttttgctgctcagagggctgaattgctttttgaagagtctggttagcaatgattttgctactttcaagtgggagtaattgacttgaattattctttctttggactctgagcatgtttgaattgccagtatttctgatggggagctagtggggaagtttaaataaagaaaaggacaaagcttcctcttgtttaacaaaaaaaccagacctactgaaaggggacaaaaattgtttaacctcttgtctgaaaatcttttgcttttaatttaggcctttcccttaaatagttcacaataaacaaaagaggcagaaattaatgttttctcctttctgtctcctcttccacatttattggaaacagaagaaaaatttatattgtttcatttatgttgtcttatatattacagaaaagtagatggtttctataaatcatttttattttcttctgttttagttttattgatcttttttatggcctgggtcgactaaaagttattgtctcttgaacattttgatgtttgtatctaataggtctaaaggcagaagtttaggcattgtttttatgtggagctaatcaaggagaaggataaatgtaagagctttctttttccggctcagtgaaagggagaactgttgctctccaaagtttggtcatatggttggtaaagagcattacaatgctcatttttatattttgaattttcttgcaagtgactggtacttgttctgtaagttttgatgtaggtactttactgatctagagattaacaggaagtttgcaaacagccattggtacttctgtttgtaggataagttctcatcttgtcctttttcttcaaaattatcttgattaatcttggccctttgcgcttagcctgtcaaattctacaacaatccttttgggattttggttagaattacattgactttgtagattattttgggaataattgacatctttattatagtaagtattgctatctatgaatctgattggttacttcatttatttagattatctttttaatgtttcaaaatagaatctataatcttcataacaggcatgtataccgtttgttaaagttgttcctaagttccttacatttggttcattgttaaaattggattatttaaacatttatattttctatgtcttgctatcatatagaaatacgttgacttatatattgggtttgtatttaacaactttgctaaacttttctattgtaataatttatttttggttttccatgtataaatgaaattatctgcaaataatattagtattattttctcctttccattttgtatatactttatttttattatcttactgtgctgggaaggactcagtatagtattagaagagaagcaatgatacaaggcatagttttcttatttctacattttaaagggaatacttttaacattttacctttaagatgattattacagaattctggtggatatactttatcaggttaagggagttcccttttattcttagtttgctaggaaatcttatcatgagaggagtttgaatgttatcaaatgcttttctgcgtctattgagatgaactgtgtagattttctcttttaatctgttgctgttgtactattagcttccaactaatacttcttgctttttctgctcccttcccccaggtgatttgtggagctatgatttcttcagtggtgaatttgtggtgtcacctgaaccagacacaagtgtccacactcttgaccctcagaagcacaagtatattatattggggagtgatggactttggaatatgattccaccacaagatgccatctcaatgtgccaggaccaagaggagaaaaaatacctgatggtgagatgtgattgaataacttgatattgttgtctaaacattgttttggtrcttctgtcagaatcttgaatatgaactaaggacattgaccttgggtagatttttgcatttgccttgatctgctagtgggtaaaacataggctttgtagctcctaatcattagaggaatgagacaagaaatatataaccgaagtctaataacaaaacacacaaccactgacttcagtataaattggcctgtgaaacgttgctaattccttatttttttaaatgacatataatttccataccataaaatttatcgttttttttttttttttgagacggagtcttgctctgtcacccaggctggagtgcagtggcacaatctcggctcactgcaagctccgcctcctgagttcacgccgttctcctgcctcagcctcctgagtagctgggactacaggcgcctgccatcacacgcggctaatttttgtatttttagtagaggtggggtttcaccttgttagccaggatggtctcgatctgacctcgtgatccgcctgccttggcctcccaaagtgctgggattacaggcgtgagccactgcgcccggccaaaatttatccttttaaagtgtataattcagtgattcttagtgtagttcacaaagttgtacaaccatcaccactactactttttttttttttttttctgactgtctcagtgtctcgctctgttaccgaggctggagtgcagtggcatgatctcagctcactctaacctctgcctcctggattcaagcgattctcccacctcagcctcccgagtagctgggattacaggtgtgtgccaccccacccagctaattttttgtatttttagtagagatggggtttcatcatgttggccaggcagggctcgaactcctgacctgaggtgatgcctcagccccacaaagtgctgggatttaaggcatgagccaccgcacccggcctccatcaccactacttctactactttttttgtttttttttccccccaagagatgaggtgtcactatgttgcccaggctggtttagaactcctaggcttaagcagtcctctcacctcagcctcctgagcagctgggactactgtggtgccatgcccagctcctaatctcaaaacattttcatcatcatcccctaacagagcacatggaagtatctggaatcaaaaatccaaagatgggttatccttagaaaagatgatctttctctcagatggcaggaatagtaaagctgtattttgaggtggaaggaggggcaaattgattgaatttttgttaattgcctccattcattccgggcgcagtagctcacgcctgtaattccagcactttgggaggctgaggcgggtggatcacccaaggtcaggagttaagagaccagcctggccaacatgatgaaaccccacctctactaaaaatacaaaattagctgggtgtggtggcactcgcctatagtcccagctacttaggaggctgaggcaggagaatctcttgaacccaggaggcagaggtcgcagtgagccaagatcatgccattgcactccagcctgggcaataagaacgaaactctgtctcaaaaaaaaaaattgcctccattcattcactcaattaacatactaggtactaggtacagggattgcaaaggtaaatagaatatggtccttcctcagcacttaccatattattataaatagaatatataaaaaactaacaatcccattagatcatgagttcttttaaggtgagagtcatcttgattcagttttacatgttcagggcctggtgtgttgcatttagttggagattatcatgtatcaaagagtaacataaagactcttctgtctaatggatttagaattctttaatgatctgagagagatcatttcaatggcataaagacaaaaaccagtttgtagtgcattggaagaacctatttatgaaccataaagtgttttaagatgagtattgaaggaagcatccgtataatgtataattagaacaagtcttatgagacctggaagagtgagacgatagaaaacttcacaagactgcataggaagcttcatggaagagagtgatatttgagcaagaaaatttgcaggcttaatctaaggcagcagtggtttttggaaaaaacacaaagaaatacatgtaggccgggcgcagtggctcaagcctgtaatcccagcactttgggaggccaaggcaggtggatcacttgaggtcaggagttcgagaccggcctggccaacatggtgaaaccccatctctactaaaaatacaaaaatcagccagacgtggtgactcgcacctgtaatcccagttactcaggaggctgatgcaggagaattgcttgaacccaggaggcagaggttgcagtgagctgagatcgtgccactgcactccagcctggtgacagagcgagactccatctcaaaacaacaacaacaacaacaacaacaaaaaacacaaatacataagtagtagaattgacagctcttatgtttataaggaggaagaatatgatgacacctaaatttctaactctggtgactagtaagctgttataaagaagagacattatttagggagagatgggggaggtaattagttcagacataggcatgttgagttgaggtacctgtggttcatctagatagatatcttcagtaggcagttataaatatttgagagagaggggtggcatgctcctatagtcccagctactcaggaggctgtgggaggattgcttaaccccaggagttcaaggctgtagggctctatgattgtacttgttaatagccactgcactccagcctggacaacatagtgagaccctcatctctttaaaaataaaaacttgggagggaagcgtggaaatactaatttaacagttaacaagagttgcgtaaattgtggcaatatatgcacttagagagactctgtggtttaagagcacacaatattagggggactcaagtcagcagaattctagtgagctgagggaaaaatatacaggtaagatagtggaaaatggtttatataattgttttcatagagcattgatgggaagggaaacaggcacactgaaaaagtgagaggtaagggctcagtcagctggtgtttggagagtggaaccacatgccgtagggaatgtgatagattcatgaattagagattaatgctgcctttaatcaattctgaggtgcatattttcttttaatatctctgaaattggaatactttttacaaatggtatatcacagttcaattaacagtgtttttggtttttttttttttttgagatgtaatctcgctgtgttgccaggctggagtgcagtggcgcgatctcagctcactgcaacctctgcctcccaggttcaagcgattcccctgcctcagcctcccgagtagctgggactacaggcgcgcgccaccatgcctggctaattttttttattttagtagagacggggtttcaccacattggccaggatgatctccatctcctgacctcatgatccacccacctcggcctcccaaagtgctgggattacaggtgtgaaccaccatgccaagccaccacgcccagccgacagtgttttttatttcgtttgtggcacataaaatgatgcatccataacacaaggctcatggtattctacatgaagaaaacaatctaagtgatccagtcagagttacaaaaaagaatatcatagtaaaacccctcaaagtaggaggttgaaaataatagagcagaaattaattatttagggagattcacaaaacccagaagggcagtcttttaagaagacacataaggcatgattgattgtttctagttcaagagaaaagcacaaaaaagtttgagtggacataactacacttaaaaatagagatttttaaaacacactttaaaaaattcgaagtatactatacatatgacatttactatttgtactatttgaaattgtacaattcaatagtaaaaaatccatttatattctttttttccacccttcatctctctctccctactacccttcctggcttcttgtaaccacaattctactctctctctttgtgagatctactcttttagctgccacatatgagtgagatcatgtctttctgtgcttggattatttcatttagcataatgtcctccagttccatccctgttgctgcaaatgacaagatttcattcttttytatggccgaatactatttcattgtgtatgtgtatatacaccacattttctttatccattcatgtattaaatggaattgacgtaggatgattccatatttggactgttgtgaatagtgctgcaataaacatgggagtgcagatataccttcagtgtattgattttctttytgttggatatatgtatagtagtggaattgttggatcatatggtagtttacttctgkttttttttttttttttttttttttgaggaaccttcatactgttcttcgtagtggctgctctaatttacattcccactaacactgagggttcccctttctgcacatcctcaccagcatctgtagttgcctatctttttgatgcaagtggttttaactggagtgagatgatacctcattgkggttttgatttgcatttctctgatgattagtgatgttgagcattttttcatatatctgttaatcatttgtatgtcttttgagaaatgtgtattttagatcttttgcccattttaaaattggattatttggggcttgttttgttttgttgctactgatttgagctccttacatgttgttaattccttgtcagatggatagtttgcagatgttttatcccattctgtgggttctctcttcactttgttgattgtttcctttgcattttagcttgtattttcatttgtctatttttgctttggttgccagtgcttttgaggtctcatgcaaaaattatttgcccagaacagtgtcctggagcgtttctccaatgttgttttcttctagtagtttcatagtttgtgagatcaaagtagatctcacagagggaatagaattgtggttaccaattctactaattgagatcttagatttaagtcattaatccattttgatttgatttttgtgtgtgatgagagataggggtatagtttcattcttcagcatatagttatccagttttccccctaccatttattgttgctcttggcacctttgttgaagatgagctggctgcaaattgcgtggatttatacataggttttctgttctgttccattggtctatgtgtctgtttttgtagcagtaccatgctattttggttactgtagccctctagtatagttttgaagtcaggtagtgtgatgcctccagctttgttcttttggcttagaattgctttggctattcaggatattttgtggtttcatatgaattctgagcttaaagaaaaaattatgtgaagaatgtcatttcaattttgatagggattgaatctttaaattgctttgggtagtattgtcatgttaacaatattaatccatccaatccataagcatggactacctttgtatctttttgtgtcctcttcaatttctttcatcagtattttctagttttcctttatagatctttcacatctttggttaaattgattactaggcattttataatttgkgtacctattggaaataggattgctttcttgatttctttttcagattgtttgctgttggtatatgtaaatgctgctgatttttgtatgttcatcttgtatcctgcagtttcactgaatttatcagctctaacagttttttggtggcgtctttaggtttttgtaggtatgagatcatgttacctgcaaacaaggctcatttgacttattcgtttccagtttggttaccctttatttctttctcttgcctaattgctctggccgggacttccagtattgtattgaataacagtaagtgagagtggggcatccttgtctgtttcagtccttagaggaaagaccttcaatttttttccccattcagtattgatgttggctgtgagtttgtcattttgaggtatatttctactatacttatttttgttgggtttttatcataaagtgatgttcaattttacgaaatgctttttcagtgtctattgaaataatatgctttttttttttgagagagagagtctcactctgtcacccaggctgggagcacagtggtgcgatcccggctcactgcagcctccacctcctgggctgaactgattctcccacctcagcctcccaagcagctgaggtgggaggatcacttgagnnnnnnnnnnnnnnnnnnnnacagagtgagaccctgtctcaaaaaacaacaaacaaaattttccactcattttcattagtcatttatttctatgggtacttttaatacatgcaggcagccgggcacggcggttcacacctgtaattccagaactttgggaggccgaggcaggcagatcacctaagattaggagttcaagaccagcctggccaacgtggtgaaaccccgtctctactaaaaatacaaaaaaaaaatttagctgggcatggtggcaggtgcctgtaatcccagctacttgggaggctgaggcaggagaatcacttgaacctgggaggcggaagttgcagtgagccgaggtcttgccattgcactccagcctgggcgacaagagcaaaactccatctcaaaaaaaaaaaaaagaaagaaaagaaaagaaagaaaaaaatacatgtaggcttatttcctggagtacatcattttcacttttgttctgtgaaacctagcagattttaaattcatatatgacactggaagttttattccaagccacatttatttgcataaaatgagatccttttggttttgttttctttactcgttcaattggtatatatttgttctttatactataagcagttattgtattactttttcctcatatgagtgacattgactgtttatatatatatatgagctgtttatatttccttttctctggattttgtttatattctttgacaatttttatgttgagtcattttcttcgatttgcagaatctcttatgttagaaggaatttgaccctttgcaatgatttttttttgtaccatgcctgattgtcttgtttgtgaattatgttttcttaaataacttgatgtttacttcttgttgttgttgttgttttgagacggagtctcgctctgtcgcccaggcgggagtgcagtggcgtgatctcggctcactgtaacctccgcctcccaggttcaagcaattctcctgtctcagcctcccaagtagctgggattacaggcacacaccaccatgcctgactaatttttgtatttttagcagagatggggtttcgccatgttggtcaggctggccttgaattcctgaccttgcagtccacctgcctccacctcccaaagtactgggattaaaggcgtgagccaccacacctggctactttctttttaagtaacttctttataactttttcttttctttttttctttttctttctttcttttttttttttaaatggagtcttgctctgttgcctaggctggaatgtggtggcctgatcttggctcactgcaacctccgcctcctgggttcaagcgactctcctgcctcagcctcctgagtagctgggactacaggcatgtgccgtcgcgcccggctaattttttgtttttttagtagagatagggtttcaccatgttagcgaggatggtctcgatctcctgacctcatgatccacccgcctcctcctcccaaagtgctgggattacaggcatgagccattgcgtctggacaactttttctaaataaagttacagtgaaggctgagtttcttgataaaaataaaaatagtgaaatttaatgacaggataaaaccttgttttattagtattttttgaatttagaaaagtattattttaacatggctaaggagactggggataatgtttgaaaatttgggagctttggctgggcgcagtggctcacacctgtaatcccagcactttgggaggcagaggcgtgtggatcgaggtcaggagatcaagaccatcctggctaacatggtgaaatcccgtctctactaaaaatacaaaaaattagccggccatggtggcgggcgcctgtagtcctagctactcgggaggctgaggcagaagaatggcatgaacccgggaggcagagcttgcagtgacccgagattgcatctctgcacttcagcctgggtgacagaggaagactctgtctcaaaaaaaaaaaaagagaaaagaaaaaaaaaaattgggagctttgtttgggccacagcgaacaccaaatatttaatttgatatagatacagatgtagtggcagctaaatctgagttactttccttctccttgttcttttgaatacagggtgagcatggacaatcttgtgccaaaatgcttgtgaatcgagcattgggccgctggaggcagcgtatgctccgagcagataacactagtgccatagtaatctgcatctytccagaagtggacaatcagggaaactttaccaatgaagatgagttatacctgaacctgactgacagcccttcctataatagtcaagaaacctgtgtgatgactccttccccatgttctacaccaccagtcaaggtatatagttccatagtttttaagttatgttttaatagacaccagttctttggttagcgtcacctggaaacaatttttaaattcttacaggattttggatttgaactcgattcaagaaagtgatgtaacttattatcagagagccatctttacatcaatactaatctgaatgccagccatgtgtacagcactaataaaaaggtgattgtgggcccttaagaatattattgtttgccatctaatgctatgaacattatttttaaagcatttagaagtttgtgaagcacttaaatatattttatttgaatctcgtagcccagaagtagagctaatgttattatttcattttatcagtaataagcctgagagattaaactgtctaaacaaggtcatagagaatcaaaattgagctggacctgaggatagcagacgttacaactggttgtctgttaactcgtataagaaactttattcctatttcttatccatgttaatattgattgagtttaagatatgctttgaaataagcaaattttaagtagatatcatacttttttgatttactaagaactcaaatacttggttgtgttttcatcctaatttttcccaccaaaaattagcagtattgattgataattgctttaatacatagcatggctaacctggctttctgagaatgtgttttcagtagactgaccattaaaatgggaaatgtagggaaatctaatgtcacctattcaggaagttttttaaagtgtcaaaggcctttaattttgggcgtcgtaatcctatagtcaatacttggaaatggattattactgctttgctttctttcactttacatacatatggcaaaaaccacatatggccagatacaatggaatgttttcatttctttttcttttttttgtttttgagacagagtttcactcttgttgcccaggctagagtgcaatggcattatcttggctcactgcaacctctacctcccaggttcaggtgattctcctgcctcagcctcccaagtagctgggattacaggtgcccgccactacgccctgctaattttttgtatttttagtagagatggggtttcaccatgttgtccaagctggtcttgaactcctgacctcaggtgatccacccgcatcggcctcccaaagtgctggtattataggcctggctgaaatgaagtattttcattcacaaaaggtttcttttctttgaaaaccatgaatggtaatgcaggttgaaaccctttaaagcctctttattctcttttcaaagctgtgaaagagcttatgtttgtatatttgcgtatttctgaatatttgtatgtaattattactttcatgttcccttataactgacctttaggcagtatagagaaggaggagacattagggtggggaatagtgtgaggaacaaaagggcattcttaatattgacctcaaataaaaattattgcagtctgctgactggcattagtaaacccatacataaaatacgtttaaaaaattacttaagctgggcacagtggctcatgcctgtaatcccagcactttgggaggctgagttgggcagataacctgaggtcaggagtttgagaccagactgaccaacatggagataccccatctctactaaaaatacaaaattagccaggtgtggtgatgcatgcctgtaatcccaggtacttgggaggctgaggcaggagaatcgcttgaacccaggaggcggaggttgcggtgagccaagatcgtgccattgtgctccagcctgggcaacaacagcaaaaccccatctcaaaaaaaaaaaaaaaaaaattccttaaattctgggctgggcgtggtggctcacgcctgtaatcccagcactttgggaggcagaggcacatggatcatgaggtcaggagatcgagactatcttagccaacatggtgaaaccccatctctactaaaatacaaaaaattagctggatgtggtggctcgtgcctgtaatcccagctacttgggaggcagaggcgggaatcgcttgaacccgggaggtagaggttgcagtgagctgagatcgcgttgcagcactccagcctgctgacagggcaagactccatctcaaataataataataataataattctgataatgacctaataatactactaaagtaaagataagaagacgtatgtttgccatatgcaggtatagttatttgttaacccattggccctgcccaaatatgggaaaatatttaggttaattcagaataattagtattgttggctctgatctaacaactaacaaaagacagatttctgcccaagaaattgtttttggtttgttttatttaccttaattgacataaaggtgagtactcctgactatatttaatttacatcattattaaagttgtctcatgtttagtaacatagagataaatttaattataatgtggttaatgttgaacagtcagagacttaatcacatttagacaaggcatttgagactagatttgtctgtaaacatgtcagcttccatttgaattctcacataaattagtctttgttttgggatggagatagtggaaaagcctttgtttaagtaagatagattactatgacacacatttctttctctgtcctttgtttagggcaaaactaaatttagctatgttttacaagctaagatctttaagaacggaatggggaagagagcaaagagtttcagaaaattaaaacttagttttagttgcattttaggcacagtttgtaattaattgtttaatattggattacagggtagatgggaggagaaagttgatctctgaagcagtgaacttttttaaagtatgtatttttaggggtaacctcaatatcacataactgttttacgaacatgcaggccttagcaatacaaattaacctggggtacatctaagaagtctaaacagttgcctgtgctaacagatacaatgtattcccacagaatgccaataaaaagagaattcccttcagaaatgttcaagaagaaagtaggggaagggaagccagcacacctgtggtgtcagaataatattctgtgcatttaggctgggtgtggtggctcacgcctgtaatcccagcactttgggaggccgaggcgggtggatcacaaggtcaggagttcgaggccaatatggtgaaaccctgtttctactaaaaatacaaaaattagctgggtgtggtgacatgtgcctgtaatcccagcactttgggaggccgaggcaggctgatcacccgaggtcaggagtttgagaccagcctggccaacatggtgaaatcctgtctttactaagaatacaaaagttagctgggtgtggtggtgggtgcctgtgatcccagctacttgggaggctgaggcaggagaatcgcttgaacccaggaggcggaggttgcattgagccaagactgtgccattgcactccagcctgggcaacaagaatgaaactctgtctcaaaaagaaacaaaaacaaaaaaacagagaagtgatgtatttggggcagtaccagattagtaactagaaattctttgtccttttcttcagtgtccattggtcctaaagtctatatatatatgtgtttttcagtaaagcatattcatatctatgattagatcgagatcattttagaaacgagtttctgggccgggtgtggtgggtcacttaaggtcaggaatttgagaccagcctggccaacatggtgaaaccccatctctactgaaaatacaaaaattagctgggcatggtggtgagcacctctaaccccagctactcgggagggtgaggtgggagaatcgcttgaacccgggaggcagaggttgcagtgaacagagatcgcgccactgcactccagcctgggtgacagagcaagactcggcctcaaaaaaagaaaaaaggaagcttctggatgccttcaatttccctttcattttattttttgaacctccctgcctcccttatttccctttgtttttaactctagacaaattaaaggaaacattcctatgataagtatacttttatatagcacttctaaraaagttgtatattcaggctgggcgcagtggctcacgcctgttatcacagcactttgagaggccgaggcggacagatcacctgaggtcaggagatcgagaccagcctgaccaacatggagaaaccctgtctctactaaaaatacaaaaaaaaaattagctgggcatggtggcgcatgcctgtagtcctagctactcaggaggctgaggcaggagaatcccttgaacctgggaggcagaggttgtggtgaaccaagattgtgccattgcactccagcctgggcaacaagagcgaaactccatctcaaaaaaaaaaaaaaaaaaaaaggaaaggtgtttatttataggagattttatttcggagaaagatcagataaatacgtcttcatttgctgctctgcttgggcttttcagaatctattaatattttgatacatttgattgagagtccacttgaggaaaattttacatgtttgggggagagagtatttatgctttaactctggaccttgataaagtattaagacaatgattttatgaaatgttattactttggaagagctgggtttgatagtaaraatgttcttatctggaggtgagcggctattctgagtatatgtagatttagagcactacactcaaagtagtggtgcatatctagattgacatgaagcgttgtgaaaacagcatttttaaaaacaataaagtgccttggataattctcatttgttttcatcaattgggaatttccctaaccattctcagaatggtcccatgtgtactacttttctcaaatcacagagcagtatctagtgtttgcaggatgggtgcaaagcagcattcttctgagtttccattatgaccattatgacatagttgctttaatgttgtactttgctttaatgatgtgctttaatgttgtaatgctttccacactacatactcagaaattagaatttaggagataggataaaccaaaaaactacaaatttgttgcttatcctactgagatgctaccatcccctccagtggttacactggttttcattactagaaaattcagatttttatttttaattttaatatttatttatttattgtgagacggagtctcactccgtcacccaggctggagtgcagtggtgcgatctctgctctctgcagcctccacctcctgggctcaagcagttctcctgtctcagcctccagagtagctgggattacaggtgcacaccaccatgcctggctaatttttgtatttttagtagagacgcagtttcaccatgttggccaggctggttttgaactcctgacctcaaatgatctgcccgcctcgacctcccaaagtgctgggattacaggggttagccagtgtgcccggccaaaaattgagatctttaaaagcttttttttcttttttgaaatagggaacgcttcatgaatttgtgtcatctttgcacaggggccatgctaatcttctttgtatcattccaattttagtatatgtgctgctgtagtaagcacttaatggcatcttaaagcaattttttgatggttcttatggaaaaatatgacttttatgaaaaatagagcgatttcatcagcattatgttattaccaaaagtaaattaaaatgcacacagagaatgcgatacttttgatcttctccatgtttgagtacagaatagtggaagagtgaatgtgtgcctatggttaattttgagggtttgttttgaaatcttgttccttaatgtatcttatttttgtttacctgccaatggatagaaaatgcttgtgaccacgtgaattttcacccacttgaatagattactttataatttcatctattaccctgaagacagaattcaatgtcattcttacctttatattgtcttctcactcaggttcctcccattaaaccttaacacatagttcagtaaatagaaggtgaacraattagtgaatgcataccccgtttttgccatcctactagcttcataagaagcctaatatcacatgcatagatttgttgagttctgggataaattttttcttatttgttttaccttcttatttttcagtcactggaggaggatccatggccaagggtgaattctaaggaccatatacctgccctggttcgtagcaatgccttctcagagaattttttagaggtttcagctgagatagctcgagagaatgtccaaggtgtagtcataccctcaaaagatccagaaccacttgaagaaaattgcgctaaagccctgactttaaggatacatgattctttgaataatagccttccarttggccttgtgcctactaattcaacaaacactgtcatggaccaaaaaaatttgaagatgtcaactcctggccaaatgaaagcccaagaaattgaaagaacccctccaacaaactttaaaaggacattagaagagtccaattctggccccctgatgaagaagcatagacgaaatggcttaagtcgaagtagtggtgctcagcctgcaagtctccccacaacctcacagcgaaagaactctgttaaactcaccatgcgacgcagacttaggggccagaagaaaattggaaatcctttacttcatcaacacaggaaaactgtttgtgtttgctgaaatgcatctgggaaatgaggtttttccaaacttaggatataagagggctttttaaatttggtgccgatgttgaactttttttaaggggagaaaattaaaagaaatatacagtttgactttttggaattcagcagttttatcctggccttgtacttgcttgtattgtaaatgtggattttgtagatgttagggtataagttgctgtaaaatttgtgtaaatttgtatccacacaaattcagtctctgaatacacagtattcagagtctctgatacacagtaattgtgacaatagggctaaatgtttaaagaaatcaaaagaatctattagattttagaaaaacatttaaactttttaaaatacttattaaaaaatttgtataagccacttgtcttgaaaactgtgcaactttttaaagtaaattattaagcagactggaaaagtgatgtattttcatagtgacctgtgtttcacttaatgtttcttagagccaagtgtcttttaaacattattttttatttctgatttcataattcagaactaaatttttcatagaagtgttgagccatgctacagttagtcttgtcccaattaaaatactatgcagtatctcttacatcagtagcatttttctaaaaccttagtcatcagatatgcttactaaatcttcagcatagaaggaagtgtgtttgcctaaaacaatctaaaacaattcccttctttttcatcccagaccaatggcattattaggtcttaaagtagttactcccttctcgtgtttgcttaaaatatgtgaagttttccttgctatttcaataacagatggtgctgctaattcccaacatttcttaaattattttatatcatacagttttcattgattatatgggtatatattcatctaataaatcagtgaactgttcctcatgttgctgaatttgtagttgttggtttattttaatggtatgtacaagttgagtatcccttatccaaaatgcttgggaccagaagtgtttcagattttttaaaattttggaatatttgctttatactgagcttttgagtgttcccaatctgaaattcaaaatgctctaatgagcatttcctttgagcatcatgcctgctctgaaaaagtttctgattctggagcattttggattttggattttcagattagggatgcttaacctggattaacattctgttgtgccatgatcatgctttacagtgagtgtattttatttatttattattttgtttgtttgtttgagatggagtctcactctgtcatccaggctagagtgcagtggcgtgatctcggctgactgcaacctctgcctcccgggttcaagtgattctcctgcctcaatctctctccccagaagctgggattacaggtgtgtgccaccacacccggctaatttttttttttttttttgagatggagtctagctctgtcatccaggctggagtgcagtggtgtgatctcggctccctgcaacctctgccttctgggttcctgcgattctcctgcctcagcctcctgagtagctgagattacaggcacgcgccactgtgcccagccaatttttgtatttttagtagagatggggtttcacatgtcagtcatgctggtcttgatctcctgacctcgtgatccacccgcctcgacctcccaaagtactgggattacaggcgtgagccaccgcatccggcctgagttttatgctttcaatgtatttcttacatttcagttcaagtgattttcatgtctcagcctcctgagtagctggaactacaggtgcgtgccaccatgcctggctaagttttgtatttttagtagagatgggttttcatcatgttggccaagatggtcttgatctcttgacctcatgatccaccagcctaggcctcccaaagtgctgggattacaggtgtgagccaccgtgcccagccaactatgccattatttaaccatgtccacacattctggttattttcaatattttgcagaagataattcttgatcggtgtgtcttatgccacaaggattaaaatatgtattcattgctacaaaacaatatctcgaaatttagcagtttaaaacaacaaatattatctccagtttctgagcctcagaaatctgagagtggtttagctgggtgatagtctcgtggttttggtcaagctaccaaccagggctacaatctttcgaaggtgtcattggggctagaagatctgcttcccgcaagactcacagctgttggcaggagacctcagtttgttgccacatgttcccctccagagggcctctcacaacatggcagttatttgtccccagagcaagcaacaccggagggcaaggaagaagccatgatgttttttgtaacctagcctctgaaagtgtcataccaattctgtattttgttggtcacacagaccaagtcaactacaacgtgggagactcctacacaaggcatgaattctaggaggtgggcatttttaagtgtcatctggaaggaggctgtcacaacctggaagttaaaagcattgatattctgaaatacagcgtgtataacattgttttagtagggtgtgcaatagttatgttttggtaatagcattaatgaacaatgttattttcatcttccagacatctggaagattgctctagtggagtaaaacatcttaatgtattttgtccctaaataaactatctcactaacaaagttgagaataattttttttttttttaacagggtctcactgtccccaggctgatgtggagtgcagtggcaaaatcataggtcactgtaacctttaactcctgggttcaagtgatcctcccatctcagcttcctgagtagctgggactacaggtgcatatcaccacacctggtggattttaaaaatttccttagagacaaggtctcactgtgttgctcaggctggtcttaaattcctggcctcaagtgatcctcctgcctcggcctcccaaagtgctaggcaaattttaatcttagagacaaaatatttaggcagtattagtggttgcattagggattacaatgtacatacacttatagactacttagaatcaatgttctatgactaaaagtggaatgtaggaacgttactagccaggtgtggtggcatgtgcctgtagtcccagctactctggagtctgaggtaggaggatcacttgggcccagggggttgaggcttcagtgagccgtgatcacaccactgcacaccagcctgggcaacagagtgagacactgcctcaaaaataaataataaaagtaacaaaagttttagcaaaaggaaaaaaagttaaaagaaagcaagctgggtatggtggtgcattcctgtagtcctagctactcaggaagctgcggtgggaggattgcttgagcccaagagttccaggctatagtgtgcgatgatcacacctgtgaatagctattggactccagcctggacagcatagttaggccctgtctcttacacaaaacacaaaataacaaaatgaaaacaggtcgggtgcggtggctcatgcctgtaatcccagctctttgggaggctgaggtggggggatcacctgaggtcaggagtttgagaccagcctggccaacatggtgaaaccccatctctactaaacatacaaaaattagctgggcgcggtggcacacacctgtaatcccagctacttgggaggctaaggcaggagaattgcttgaacctgggaggcagaggttgcagtgagctgagaatgtaccactgcactccagcctaggtgacaaagtgagacttcgttgcaaaaacaaaaacaaaaaaacaaaaacaaatggaaacagagaagaatgtggtgctaaaaaaaaaatctaggctgggcacggaatatgcctgtattcccagcactttgagaggctaaggtgggtggatcacttaaggttaggagtttgagaccattctggccaacatggtgaaaccctgtctctactaaaaatacaaaaattagccaggcatggtggtggatgcctgtagtccagctactcaggaggccgaggcagaagagtcacttgaactcgggaggcggaggttgaattgagccgagatcgggccactgcactccagccttcgcaacagagtaagaccctgactctaataataataataataatataataataataataataataataataattaaagatggctttaaaacatcctaagtctaatgagtcataaacctacaaattcaagctcagcaaatccccaaacagaaaacattaagaaatcctgacataaccaaattgctaaaaactaaagagaaaaacaatcttgaaagccaccagagggaaaatataatgcatactgacatacacaggactaatttaaatgactgcatatttctcttcagaaaccatgatagggccgggcatggtagctccacctgtaatcccagcactttgggaggccgaggtgggtggatcacttgaagtcaggagtttgagaccagcctggccaacacggtcaaaccccatctctactaaaagtaaaaaaattagccaggcatgatggcgtatgcctgtaatcccagctacttgggaggttgaggcaggagaattgcatgaacccaggaggtggaggttgtagtgagccaagacaaagcaagactccgtctcaaaaaaaaaggaagaaaaaaaacaaacatgaagaccagaggaagcggcattttcatttttttgagacagagtcttgctctgtcacgcccaagctgcagtgcatnnnnnnnnnnnnnnnnnnnnnnnnnnnnnnnnnnnnnnnnnnnnnnnnnnnnnnnnnnnnnnnnnnnnnnnnnnnnnnnnnnnnnnnnnnnnnnnnnnnnnnnnnnnnnnnnnnnnnnnnnnnnnnnnnnnnnnnnnnnnnnnnnnnnnnnnnnnnnnnnnnnnnnnnnnnnnnnnnnnnnnnnnnnnnnnnnnnnnnnnnnnntgacaaagtgagacttcgttgcaaaaacaaaaacaaaaaaacaaaaacaaatggaaacagagaagaatgtggtgctaaaaaaaaaatctaggctgggcacggaatatgcctgtattcccagcactttgagaggctaaggtgggtggatcacctgagctcaggagtgtgagaccagctctgccaacatgctgaaaacacatctctactaaaaatacaaaaattagctgtgcatggtggcgcgtatgtgatggtgcgcacctgtaatcccagctactctggaggctgaggcaggagaatcacttgaacccaggaggcagaggttgcagtgagccgagattgagccactgcacttcagcctgggtgaccaagggagactctgtttcaaaacaaaacgaaacaacaacaaaaacaagatttggtcgttgtcggcagtttcactttcctgtatctttataactgtctatggttgttttttttgggtttttttttggagagacagggtctcatttggtttcccagtgtggagtgcagtagcacaatcacaactcactgcagctttgaactcttggactccagtgatcctgctgcctcagcctcccgagcagttaggactaaaggcatgggccaccacgctcagctaagttttactttttttgtagagatggggtctcactacgttgaccaggctggtctcaaactcctaggctcaagcaatcctcccgcctcagccacccaaagtattgggattccaggcctgagctactgttactggaaaggggtcctgatccagaccccaagacagggttcttggctcttgcacaagaaaaaattcggggtgagtccataaactggaagcaagtttattaggaaagtaaaggagtaaagaatgcctcttccatagacagagcagcaggatgagctgctagttggccatttttatggttatttcttgattatatactaaacaaggggtggattatttatgacttttccgggaaaggggtgggcaattctcgaaactgagggttcctcgcctttttagaccgcatatggtaacccccctgacactgccatggtatttgtaaactatcctggccctggtaggagtgtcttttagcatgctaatgtattataattcgtgtataatgagcagtgaggataaccagaggtcactcttgttgccatcttggttttggtgggttttggcaggcttctttcccgcaacctgttttattagttaaggtctttatgacctgtatcttgtactgacctcctatctgatcctgtgacttaaaaggcctaacctcctgggaatgcagcccagtaggtctcagcctcattttacatagcccctcttcaagatggagttgctccagttcaaaggcctctgacaccaccgtgcctgggcaatagtaggagctccgacatttaattgttcctgttagtgaatagagcatcatggagaataaatgaaacaaataaataatcgtttctggtaaagagattttgttacatttcagttacaggcaatagaattataagcagttacaaagcagcactgatgtgtcaaagataaagaatgaccacacttggcctggctgtggctcactcctgtactgcaactgcaactcccaacagtttgggaggcgaaggcaggcagattggttgaacccaggagtttgagaccagcctgggtaacaaagtgagaccctgtctttacaaaaaaaatttaaaaattagctgggtgtggtggtacgcacctgggctgaggcaggaggatcccttgaaccgagaaggttgaggctgcagtgaattctgattgcaccactgtactctagcctgagtgacagggatgaccatacttaatagtttgcccggagcagtcctagtttactttttttttttttttttggtgtaattattagaagagcctcatttcactgtcctgacaagatgacaaattctatgaccactttatagatactagttggtttcaacagaatgaaaaactaaaggaaaataatcaccgtatcttcaggatttttttttttttttttgagacagagtcttgctctgttgcccagactggagtgcagtggtgccatcttggctcactgcaacctccccctcctgggttcaagcaattctcttgcctcagcctctggagtagctgggactacaggcgtgtgccaccatgcccggctaatttttgtatttttagtagagacggggtttcaccatgttggccaggctggtctcgaactcctgacctcaggtgatcctcccggc

SEQ ID NO: 93356 - DNA, 13367 bp, Homo sapiens
gaagttaagggaaaagaaaagaaacttcataaataaaaacaggctgcatgtggtaaaatcaataatcagccctgggacttgtgttttcaaaacgctttatccaggtgtgacacctctgacatcctggattccccaccctctagcacccagttccctctcctgtaatgagaccagggtcaggaggagagatggacagatgggcccatgctgaaggcagtcagtcacctgtgcctgcagatgagaaaccgccgcctaacctttctgaacctcatgcggaaaaaatgtttgcaccactagcctccagcacagagattccatcccagctcagtatttagtatttagagatttagtatttagtatttagagattcctaaataccgaggactctgcccagtctggtttgaccatgctcctccttcctcacactgtggggccccagctttccctcccaattccacacccccagatgctggtaccatgctcaggttcatcgtggacaccactccatccgacatggcaacacttttgatccagccgctttgacaacctcgttcagtctcctctggagacagccacccagacctttgctgatgagctgggactgaggggaaaaggcctgcgatctctgatggggttggcaatggacaccaaagtcgtcttctaaagaccaagtacgctctaaccacggaaatcgtctctaaccactgactcctccagaaaaggaagaaagaagcctctctacactaagctgaaacactaaatacactaagtgttgattaagtagactaggtacactaagtggtaaacttggtaaacttagagcactaagtacactaagtacaataaatggtaaacttggtaaacttagagcactaagtgcactaagttcactaagtaataatattagtactaagtggtacactaagctgaaaccgcaaaccgcagccatggcagaggaacctcagcttaaatagtgtggagcggccactggtttccgcggctcgtagtcgcgcccgcgaggaaacgccagggaggcttcctgccccgcccagcggtggcccagggcacagggaaccacggctgcttctctccgaggtttgtggcctgagaaactctccgctgcgaatctgggctggcctctccgggaagccttgaaactcaactcccgggtgggccaggaaggctgcccgacttgggcagcgccggccggagccttcttcaaagccgagctgttcgccgccctcgaggcccaggcgagcctggaggagggaccgggtgcgctcagatggggcccttggtgactggcgaccccatgagcacccaccctccagcctggggcgggatggcccaatcgggcgctgtgggggtccgtttggaaaccgctctctgctttgaggatacgcggggagcttccctggaagctgtgaagaggggcagacacgaggcctctggccagccgcgcctcgggtccaggcctccctgtgtccacatctggtctcccggcttttcacaacagtgaccttgacagcgcccagagtccgctgcttccgtccagtccgctcttcccctacgtggccaagaggacgcagcactggcggcttcaggaggtggctgtgagcgyggggctggggccaagagcagaggaccagagaggagtctccaagccaccaccggccccgtcaccggctaccggctaggtcaggccccagattcgggtttgcccagcaggcgctcggcgtccacgctccctctccaccttcttgcctctctaaggaggacctggcccactaggaagcccggggcgttctgtgaactgggtgktcaaacacggtgtgtggggaaggggccaattgagattagacgtgaaaaaccgggaacctggggaccgcagggttggggcccaggaggggcccgaagcttccatctaagacaggtgactaagtgaggggcacaggtgcaacagaaagaaagactgatttgcaattgacttgtaggtgtaatcggttttagtccctatttgaccaccagaggtctgcagctctatccttggtgagttctgaaggcccctggggagagctgagcccaagagactttttaattccacagaagaacttcgcctgaggcaggtctcctctgtgcccagggaaggaaggctggacgtgatggtttctgaaaaaagttacacagagaaaaggtcaagtccatttttgctatcctgtactgaacacagatcaattaactggtcccaggattgatagcaacgggcctataactggtctcctggttcctatccagcccttcccccataaaggcagaatcctgtcctcttggaacagtgaatccccagcagaggacctcagctcccaagctccattcagcctgggctccctggaacctgctaccctgcccaggagctgtcaacacctggagtgcagtgcaggaagaatgcaggggcgcttgatggggaggtgagtgagtgcagatggggttcctggaactccttgggcccttggggtagctcccactcaggctgtcctgcaggtcctcacaaggcccactactgagcaggaagaatgtccccaggagaggcaagaggtggggcaagggcgagtatggggtcccttgcatttgcggcaaaatggagagggagatgagaggcaaggagtactggccctcacatggaaacctatagcacactgcccaaagggaatgggaagggaaacacagccacgcacgtccacagaagacttggcagatgggagagggtagctttgaggactgaaatccctacttcacaggactctggatacttggacacttgcttcctcctgtgcttctgtacgaatctcaggactgtgggacactctctgcactcttattcttgtaattctcttctctccggatggcctcctttcccttggagtgcagcagtggccatcagattcttgggctgaaggtcactgggtgactgtgggattctggggccagttacttccctttcttagccaccccatgctttacagaactgagctccacagtcatactcatctctcccagtgaagctcaaaggaattattaataaaaaacacaaaaacataaatggaatgatgtttatggaaccaattgattaacgtggaaaagtatgggcttcccagttttctgcccttcgtgagaacttaatcctgaaacactgatctcatgtcaaccttctgccttaactgggaattcctgtggccagtctgttctaagggtatcccgtgagcccctagggatggagaacagaaggccacttttcctaaacacacacgtggttctgtcctggccagatcagtggacttccagtgtccttcctgagtcacaccgaggtgaattgcatagaccagaaacccacattttaaaaagaataaaataaaataagtggcctgtagtgtgggggctggggttggtgcgggcttccggcttggccgcgggtgtctgcatcgttcagccccggggcttttgtgtcgggtctggcctggctttctgtccgcaagtttttgccctgctccgcggcgctcctccggggcgggagccgcgaggcccgggcgagctcgggcgggaccggaggctgcgaaggctgccgggagcgggactcgcagctcctggatatgccagcgttcctggaagactcctgggtcctgacgaaagacaagttgatgagtgagttggtcgccattaaagtgaggctcccggcccggagcagcgcagagaccaggacgcgcagcctcgcctgcagcactcggccctacctctaccccgccgctacctctaccccgccgcggcgccgacagcgagggccccgcctcccccagctggctccagagccaagccacccacagcaggaaagccacgaagaaaacagttcaactcagaccaaaagataaagctgatctcgaggtaaccgcgctcactaatgaagatctcgtggacccgcttgcgaggtataaagagaaacctagtcctactggagaacaaccaggaagcgatgtgagaaaaaaaccttgaaaccgaaggaacgaggacgatctgtcgcccaggctggcgtgcagtggcgcgatctcggctctcggctcactgcggcctccgcctcccgggttcaagagattctcgtgcctcagactcctgagtggctagaaccacaggcatgcgccacctcgcctggctacatttttttttttttttttttttttttttttttgtatttttggtagggacgggctttccccgtgttgtccaggctggtctccaactcctgagctcaagggatctgcccatctcggcggattaacaatttaatcttcagcagaaaatggaaggcagaattgaaataaaggttctaatagatactgtgacaatgaagaagactaaagtaaagatcaagcttgagaagacagaaccactaaagggcagagcaaagactccagtaacactgaagaaaagaagacttgagatagtcagagctattctcacgctggaataactgaggctgaacgcacaagtggagcttcagaaggcggagctctgcaggcctggagtagggagtctaccagagaccggaggagaaggccaaggaagagggtggaaaccagaacattttccaatagacagtgcagtaatttcagagagtgctcccacagctgaaactctaatggcttcaggacacaaaaccttcgttgtcagtaggatgactggaaatttcaagcatgcagctcctattctgcaactcagtaaattttcaaacataccccaaactccaaagagaccactggggttgggggggaacagaataaagaagagtagaaagggatattcttaaggaaatgttgccctatgaagcatctacaccaacaggaattgctgcagaccagtcaaaggggctacaggcaggccattagaactcactgagttcaggatggcagaatctttttcatctaaatatgttcctaagtgtgttcccttggcagatgtcaagtcagaaaagacaaaaaaagaatgagccatttctgtatggacaaaaattttgctgtttgttgttgtagtaggttttgtttgtttgttttttggtctatcaagctatagaaaccaaacaaggaaatcttttctctaacgttcttcctgatgactctagaaacccaactgaatggaatccatctggcacattcaagttggtctcctatttttaataactgtattgaaaaacacttgtgtacccttgttgacttaaatagctaaaaaaaaaaaacaggtgatttcacctcaataaatgtagtattccatgaaaagcaaacaaaatatatataaatgaacttcattagagtgtttttgaactctggactagcaggagatcacttcatgccatatgaaaatcttttatagctctgaaacttttttgtaggctttttaaaattttttcttctcattgtccaaacccatgcagggtttctttaaaatgtggacacctggtttcctttttgaaaaatgagatatatatatatatatatacacacacacacacatatatatacatatatacacatatatatacatatatacacacatatacatatatacacatatatacatatatacacatatatacatatatacatatatacacatatacatatatacacatatatacatatatatatacatatatatacatatatacatatatatacgtatatatacgtatatatatgaaacaagaagggaaaaacatggtaatatagtatgaagttacacatttaaatactttgaattcttacagaaaagagtggaagaattatcttctactgaataaaaactttacagacatggaagacaatgaaatttggtaagagaaaaagtaacatggttgtactttttgtaactgcaacgaaatttgatggtgtttatgaggaaaactacagcaataatctcttctgtaacttttattaatagtaatgttagactcagaaatggtggcctccatgttcttccrcccgctgttggtggccgccacccttcggaccacactgcgggctgctgctcaggttctgggaagttctggattgtttaataaccatggactccaagtacagcagcaacagcaaaggaatctctcactacatgaatacatgagtatggaattattgcaagaaactggtgtctctgttcccaaaggatatgtggcaaagtgaccagatgaagcttatgcaattgccaaaaaattaggttcaaaagatgttgtgatgaaggcacaggttttagctggtggtagaggaaaaggaacattkgaaagtggcctcaaaggaggagtgaagatggttttctctccagaagaagcaaaagctgttccttcacaaatgattaggaaacagttgtttaccaagcaaatgggagaaaagggcagaatatgcaatcaggtattggtctgtgagtgaaaatatcccaagagagagtgctactttgcaataacaatggaaaggtcatttcaaggtcttgtattaataggaagtttacatagtggggccaacattgaagatgttgctgctgagactcctgaagcaataattaaagtacctattgatattgtagaaggtatcaaagaggaataagctctccagcttgcacagaagatgggatttccatctaatattgtggcttcagcagcagaaaacatgatcaagctttacagcctttttctgaaatacgatgcaaccatgatagaaataaattcaatggtggaagattcagatggagctgcattgtgtaaggatgcaaagatcaattttgactctaattcagcctatcgccaaaagaaaatgtttgatctacaggactggacccaggaagatgaaaggaacaaagatgctgctaaggcagatctcaactacactggcctcgatggaagtataggctgcctagtaaatggtgctggtttggctatggccacaatggatataataaaacttcatggagagactccagctaatttccttgttggtggtggtgctacagtccatcaagtaacagaagcatttaagcctatcacttcagataaaaaggtactggctattctggtcaacatttgtggaggaatcatgcactgtgatattacagcaaagggtatagtcatggcagtaaaaagtttggaaattaaaatacctgttgtggtacagttacaaggtacacaagttgatgatgttaaggcactaaaagcagacagtggacttaaaatacttgcttgtgatgatttggtggaagctgctagagtgcttgtaaagctctctgaaatagtgaagcaaagcaagcgcatgtggatgtgaaatttcaattgccaatatgatctgaaaacccagtgatggctgaaggtgttaaatgtgctacaatcattaaggatactgtgttctgtgttattgttcttttaagtgtgtggagattgtagttgccatctaggcacacaaacatttaaaagcatttggtttgcatttaattctaccattcagaatggactgtttgtaagaagcatgtataatgcaaatatcttctttatttcgtcacagccagtcttttttgcttctacaaaatgcaacttgcaatatgacagtttattattgttggatacaaagttcttcattgataagagacctacaaataaaataaatatgaagataaagctttattcttcagtgttaacatacagtatatctaataactagcctcattagtagaccagtatattaaaacactgttttatgtaaaaagtgtttatcttcagcaccaaatacataataaatgtaacaatcactatttataaacagagctttcaaacactcctcagaaaatcaaaatacttctaagtattttgatgaagtaactttgtaattatgtgaacattgttttaatcattaggaaacgctgataactgcaagaattcatgattccatggtattaagaagcacctgtaggtttgtttcaaatagaggcatattaaccaagggaaaaaaatagtaatgttattattgtagccctatcatattcactttttaaacgactggcttttaaaagtatcatgaaagtcctacttcagtaaaacccatttaagtacagttgatgtttagcagggatcttttagtgcagcataaacatgctttagagaactgttggctggctgtacatgtttttaaaagctgttagctagctatgaggctacagctgaaaattacactttttatgagaaattgtaaacactggtcttatgtttcatctggattccttattgcatcatcttctgttaacaaaaacaaattttcccagtttttttgccttgtatttcccagcacaatttcatttaaaagtacaaaaagtgtttgctctcaaattgcatcataagcaagtgttaatactctgggcttttttatgtttgtttgtttgtttgttttttgagatggagtctcgctctattgcccaggctggagtgcagtggtgctatctcggctcactgcaagctcggcctcccgggttcacgccattctcctgactcagcctcccaagtagctgggactacaggcgcccaccactacgcccggctaattttttgtatttttagtagagacggggtttcaccgttttagccgggatggtctcgatctcctgacctcgtgatccgcccgcctcggcctcccaaagtgctgggattacaggcgtgagccaccgcgcccggcctgaaggacacccttagagaagtgcaaaatactatggcaggtttcaacaatagaatcaaacaactagaagaaagaacttcagagctctaagacaaggctttcaaattaactctgacaaaaacaaagaaaaaagaatcaaatgaacaaagcctccaagaagtttgggatcatgttaaatgaccaaacttaagaataattgatgttcctgaggaagaagagaaatctgcaagtttgaaaattttatttgagggaataattgaggaaaacttccctggccttgctacagatttggacattcaaatacaagaagctcaaagaacacctgggaaattcatctcaaaaagatcatcacctagacacatagtcatcaggttatctagggtcaagatgaaggaaagaatcttaagagttgtgaggcaaaggcatcaagtaacctgtaaaggaaaacctatcggattaacagcagatttatcagcagaaaccctacaagctagaagggattggggtccaatctttagacacttaaacaaaataattatcaacccagaattttgtatccagtaaaagtgatgaaggaaaagataaagtatttttctttttttttttttttgggacggagtcttgctgtcacccaggctggggtgcagtggcacaatctcagctcactgcaagctccgcctcctgggttcatgccattctcctgcctcagcctcccaagtaactgggactgcaggcgcccaccaccacgcccagctaattttttgtatttttagtagagatggggtttcatcatgttagccaggatgctctccatctcctgacctcatgatccgcctgcctcrgcctcccaaagtgctaggattacaggcatgagccactgtgcccagcggaaagataaagtatttttcatacaaacaaatgctgagagaatttgccactaacaagccagcactataagaactactaaaagatgttctaaatcttgaaccaaaatcttgaaatataccaaaatgtgacctgcttaaagcataaatctcacagggcctataaaataatcacactacaaaaaaaaaaaaaaaggtatttaggcaacaactagcataatgaatagaatagtacctcacatctcaatactaacactcaatgtaaatggcctaaatgctccacttgaaagatatggaattgcaaaatggataagaattccccaactaagtatttgctgtcttcaagagactcacctaacacataaggacacatacaaacttaagataaagtgatggaaaaagatgttccatgcaaatgggcaccaaaagcaaacaggagtagctattcttctatcagaaaaaatagactttaaagcaacaacagtttaaaaagacaaagagggacattatataatgacaaaaggactagtctgacaggaaaatatcacaatcctaaatatatgtgcacctaatactggagctcctaaatttataaaacaattactactagacttaagaaatgagatagatggcaacacaacaatagtgggggatgttaatactctactgacagcactagacaggtcatcaagatagaaagtcaacaaagaaacaatggacttaaactctaccctagaacaaatggatttaacagatatttatagaacactccacccaacaactgcagaatgtacattctattcattagcacatggaacattctccaagataaatcatatgataggccacaaaacaagtcttaacaaatttgagaaaattgaaattatgtcaggtactctctcagaccacagtggaataaaattggaaatcaacaccaaaaggagccctcaaaaccatgcacatacgtggaaattaagtaacctgctcctgaatgatcaatggatcaacaatacaatcaagatggaaatacaaaaattctttgaactggcctgtgtggtggctcaatcctgtaatccccacactttgggaggccaaggtgggtggatcacctgaggtcagggatttgagagcagcctgactgatatggtgaaaccttgtctatactaaaaatacaaaaattagcttggtgtggtggtgggtacctgtagtcccagctactcaggaggctgagacaggagaattgctttgcttgaacccgggaggtagagattgcagtgaggcgagatggtgccactgcactctagcctgggtgacagagcaagactctgtctccaaaaaaaaaaaaaaaaaaaattccttgaattgaatgattatagtgaccgaacctatcaaaacctctgggatacagaaaaagcagtgctaagaggaaagttcatagcattaaatgcctacatcaaaaagtctgaaagagcacaaataracaatctagggtcgcacctccaggaactagagaaacaagaacaaaccaaacccaaatgagcagaagaaaaaaaaataacctagatcggagcaaaactaaatgaaattgaaacaaaaaattacaaaagataaatgaaacaaaaagctggttgtttgaaaagataaatcaaattgatagacaattagtaagattaaccaagaaaagaaggaagaagattcaaataagctcaattagaaacaaaacagaagatattacaaccaataccacagaaatacaaaagatcattcaaggctactatgaacacctttatgcacataaactagaaaacctagaggacatggataaattcctgaaaatatacaaccctcctagattaaaccaggaagaaatggaaaccctgaacaggccaataacaagcagtgagattgaaatggtaatttaggctctacctctccccctccccctccccctccccctccctctccctctccccacagtctccctctccctctctttccacggtctccctctgatgccgagccgaagctggactgtactgctgccatctcggctcactgcaacctccctgcctgattctcctgcctcagcctgccgagtgcctgcaattgcaggcgcgcgccgccacgcctgactagttttcgtatttttttggtggagacggggtttcgctgtgttggccgggctggtctccagctcctaaccgcgagtgatctgccagcctcggcctcccaaggtgccaggattgcagacagagtctcgttcactcagtgctcaatggtgcccaggctggagtgcagtggcgtgatctcggctcgctacaacctccacctcccagccgcctgccctggcctcccaaagtgctgagattgcagcctctgcccggccgccaccccatctgggaagtgaggagtgtctctgcctggccgtccatcgtctgggatgtgaggagcccctctgcctggctgcccagtctggaaagtgaggagcgtctctgcccggccgccatcccatctaggaagcgaggagcgcctcttcccggcctccatccccatctaggaagtgaggagcgtctctgcccggctgcccatcgtctgagatgtggggagcacctctgccccgccgccccgtctgggatgtgaggagcgcctctgccctgccgcgaccccgtctgggaggtgaggagcgtctctgcccggccgccccgtctgagaagtgaggagaccctctgcctggcagccgccccgtctgggaagtgaggagcgtctccgcccggcagccaccctgtctgggagggaggtgggggtcagcccccgccaggccagccgccccatccaggagggaggtgggggtgtcagccccccgcccggccagccgccccctccgggagggaggtgaggggctcctctgcctggccgcccctaatgggaagtgaggagtccctctgcccggccaccaccccgtctgggaggtgtacccaacagctcattgagaacgggccaggatgacaatcgcggttttgtggaatagaaagaggggaaaggtggggaaaagattgagaaatcggatggttgccgtgtctgtgtagaaagaagtagacatgggagacttttcattttgttctgtactaagaaaaattcttctgccttgggatcctgttgatctgtgaccttacccccaaccctgtgctctctgaaacatgtgctgtgtccactcagggttaaatggattaagggtggtgcaagatgtgctttgttaaacagatgcttgaaggcagcatgctcgttaagagtcatcaccactccctaatctcaagtacccagggacacaaacactgcggaaggccgcagagtcctctgcctaggaaaaccagagacctttgttcacttgtttatctgctgaccttccctccactattgtcctatgaccctgccaaatccccctctgtgagaaacacccaagaatgatcaattaaaaaaaaaaaaaaaatggtaatttaaaaaattaccggccgggcgcagtggctcacgcctgtagtcccagcactttgggaggcctaggcgggcagatcacctgaggtcgggagtttgagaccagcctgaccaacatggagaaactccgtctcttctaaaaatacaaaaaaattagccaggggtggtggtacatgcctggaatcccagctactcgggaggctgaggcaggagaatcacttgaacccaggaagtggaggttgcagtg

SEQ ID NO: 93357 - DNA, 36491 bp, Homo sapiens
ctcgtgacatatgcagagtaataagcgctcacaaaacttctgtcttgagggctcaaacaccaaatgattgctctaagaattttcacagtattacctcaaaccctattggttctacaacctttctctaccctagagtcctgttttccgcaattcccaattgggattcttctccggttcatttctgtaagaaatgagggcagagaaatgccatcagtaaacctttgaacacatgttaatttttctaggtaatacaatttgcattttcgtaaaactgggctttaatgacaaatccgatttcagtgatctttgcatacaccctttaaacacaccagttgccgcctgcgagatatcatcagactcatgctaagagccactccctaccccagctttccccagacctctccccgctttacagttattcgccacagcccgggagagtctggggacggccgcctgggaggggacggccgcctgggaggggacggcccggagcagacgccaggtttcccgcggctcaggagaccggtgccgcctcggagagcgcgcgaaggtgccgccggccgcccgacccgcccgaggaacggacatctcccgcccgggcccgcaaggacgaccatgaacaccgccgcagctcagctgaccctgcctctcccgggtggctgggggtcgccagccaagggggcagcgggcggaggatgaaccccggagcaagggaaagcgacagcgcgcgccttcaccctaccgccaacaagtcgaagtctcccaaaggaacctgatcggcggggctgccgtggtacgaccggccgctaaggccaccctgcgggcgtctcgacctcggctgaccgccgctggccccctgggaaccgcgtgccggccgcaggagaaggtagattcccgggagccccggcgcccaccgcggtactaaccgcgcctgcgccccgccctccctcccttcgggctccgcccgcgcctgcgcagttgcggggtttcgcgccgccggagtctgagaggccggaagtgccccttagcgggtgggggaagctggtaggcacgggcggctccgcagtgaccggactcgggggaggtgagtgatttgcctaagtaaaagggaaagataattgagcgcccccggcagctggtctacgcatgcgtccgctaggccggctgggagccggcaagggaaagccgagcgggccccattgggggaaaggggtcagtcacttcccggaagaggcggggccgcgcgggcccggcgctggattcgaaacgcttcctggtgctcctgggcctggcggttgagcccggggagctagtctttgcttgggtaaagaaagaggactttcctttttttttttccttttgagaaaattcagaaatttggaggcacagtagttaggattcaggccaaactggtaaatgacgaaggggcttcttccagagccaaggaggaagggttgtccgggtaagtcccgcgggacgtggagagacggcgccgcccgggtcctcccactgattcctttgaccatctggcttacggacgagctctttgttcgctgctcctccgaaaacgccttcaatgactccctttgaataaagtaggaagtccgaaccgagccgccaggccgcgacttggcccctgttttccactcgcgagggccctgcgtcaccccgcctcgggaaagctgcgcgttctccggccgcttgcgcttggccgaagctgctgggtcccgctgtgcttcccccgggcatgcgatggggataattcccacgcctcgctcaaagccatcccgggagagccctccctggtccccataggcacagttgggtgttcccttttccgtgttaaccttgtatttcggatatagttctgttatagtaattactttaaggtattgtagttatttacaatcagtctttcccccacggtaacctagagtgtaaaccccctaaataaacgtcagaagtaatgaagtcttaacttccttggcttaggtttcagcgcccttctcaaccccacactcccgcttcagtctttacacaacccttcccatgaatatgctgacctaacaagtaacctacttttcatactccaaaatcttctcttctgtgtggggaaaataatgcattgactgccacctcactccacctccaaataaattgatgttgaaattctggcctccggtaatggaattctttacatcaaagtcactttttatttctaaaagtaatcacatatatattatattcctactgtggcccttgccatggatcaacgaaaaatatgacatagtcaaaatagaccaaaacatctggccttgttgtaaccaatgggaaacacggttgggaggtccctacttacatgtcacttgcttcaggaaccgttccttgattcctaagtgggggaccttttttcctaaatacaactatagcttgctttcttacctcttaagccctttttatctgcagtctcacttaccctactaaggtctttaaatgcagggcttgatcttccattattgtatctccagcacctataaagctttcctgttaaatagtagacatttaataagtatttattgataaacgtgaagtatgcctcaacgtttaggctaaattcatatgaaaataaaattgaaaaaataattttaaagaacagcattagttactgagattatgtggtaaatcccttaaaatataatcttgcattgaaatagttttcaccatttaccagtctttatatgaatatatactcatctaaatggaaattgggaaatttaagcattttctgcttttccgaagtaaattttctaatgtttttcttaaagctgaactaaattgcaaaacttgctttaataaagtgtgtatttttgcatcagttaagcccctgacctctttatgttctttaaatttgattcattagtgaaattaacaaggttctgtgtttttctcacctcattcagttttataattaaccaataaaagcttattagcttttaaggaagttttaggaacttaaattgatttatgggcaccatatggttacatcaaaggacttgtttttgttttaactggaagtggattcttaagtcctttaagatggaaatttatgttctttctattataccaagcaatgctttctgaaatagagtgatttttttttattccatgctaccagttggtcatgcaattcaaatattaaatactagattacagatattagaatcttgtaatgcatctggtttaatacctgtcattttgtagaacggttaaatgtcttcccaaggtcatacacctaatcagtggtatattcaaaacccaaatcctaggcttcctatctgaagtccattgcttatgaagtggtttgctatgtgttctgactttgttgattcaaataagtaagctaaatcaatttaagccattaataggtttataaagttatttgctatgtgttgttcttacatcattgattcatgtaagtagacttgtgtgacagctaattcttaaaaaattatgaagatgttagacttcttttgatatatatatgttgattgtatgaacagattgacatcaatatacttattcattataaaagatttgagtgggaactcaccaaatcccacaccaaaaaaatttaaaattttaccatagtaaaaaaaactaaaaagcaagatgaaattatacatagttcttggtgtagtatttttaatttttattatttatttttatagaaatggggtctcaccattttgccaggctgttctcaaactcctggcctcaggtgatccgcctgcctcgacctcccaaagagccaggattataggcatgagctaccatgcccggctagtgtagtatttttaaattttacttaatgctgagccattttcaaataacctcatcacattgattatgacctcatgcaagaaccatctgttctatctttcagtgtagttgtactttaatatcttagaagctattgcattctgtccttttttggaatgttttatgcttttacagtcttaaccattgcttcttaatatcacttccgcggaacagctggtgcaaagaacatgtgataaggaatggaaaacaattgatgatggaaacagagatttggagttaattgcgttcttaaaatattatgatgttctttctaataaaatgtacatttcacataattttcctctttcagaactaaccatggttaatcattctttaaaccaggtttgtttccgacaaaagaaatgaaataataaaaactaaattctaactgtagtaatcatgtgatattaaagatattatttatggggttaaaagccctctttatcttgcttaggggtttccaataatcgartcagtgctggactttttttttttttttttaggcatggctgccccctgttaataatatatttaattaacagctttacacaatgatcttaatatacttgaaatacttagaggactgcagtttataaaatcaagagtctaccttattgctgttttatttttttttttaccataaccctcagaaggaatacagttaacatcacagtcctatatataaatgtgtgtttatgtgtgccatcataaacatcactgcactaggtggcaatcttcactactattcatttgtgtatgtgtagtcaacctacgaaaggaatcattagaaacagggtaggaatgttgaaccttagaaccggaagttgccagagaaaatatgtgccctggccaactccacaggactagttctaggcaatctgaaggaaaccagaaaatgtgaatttctcttccctcaaaaagctatactgaagtagtatttaatattcaagtacttgtaaatttgcagaacagtactttttaatttgacccatgaattctatttaaatttgtcacttaatatttagccaagaagcaaaccatctaaaaagatttctggtttatttctccaactcctaataaatagggtcacatattttttaacttttttctaatttgaaaagtaatacaggcatatggtattttaaaaatgaaacaacacaaagggatatgttttgaaaagtggttcttgccatccctgaactgtaatcatccctaacatattcatacctgttttcattttaaaagttgggtcagtttttttattagtacatgtatttctatcctactgatttatttgctatatcatctaatttagtttgaatattccataatttacttaattagtcctgtatggagacctagctcttctcagtgtctactattataaacaatgctacagtgaatattgttgtataaatccatacacaccacgtaacatatcttaagttcctggaagagatattgctaaaccagaagataacctgcatttaaaattttgactgctagggtcagggtcacatttaaattaaattagaacaaaggaattgcataattgtcttcgatagcaatctattccagtgtgcaccgtgagtcacaaaggaaagcaaaactgtcaataactttcttctcagacttttggtttaatgtgttctgatgggttaataatttgtctcatttctcttcataataatgactttgagaatatttgtactgcactctttttccagaattaaccacaacttttcacagtaactgaattaatgccacaatggtacattcaaccagtggggcttcaggatgtgaaatagacaatattctgggccactgttactaccaaatactttctttacctttaagtctgtatatttttatctgtaaagtgacatccatagatgtcactgtacacttcatagaaatgagtacacagaataatactcatggcagggctgggtgtggtggctcatgcctgtaatcccagcactttgggaggctgaggcaggcagatcacttgaacctgggaggcagaggttgcactgagctgagatctcgccactgcgctccagccagcstgacagagcgagaccctgtctcaaaaaaaaaaaaaaaaggaataatacttatggcagcactggccacactataaaattcaggttcagaaaaacagggtaagtcacagacagcaacgcttccagcatttattttctttgcacccatgggcaatttgagaaaatttacctttagaacgaactctgttaaaggtacagacaatacagtactttttattcagaaggtttctgcataaaggtgatagtcttttgacttaatatattattgtctcctgccttgtgtttctggaatgaatgaaggtcattatttagaggataatctgggttgtatttgtgtcgtcagattgaattttcattgcacatgctacttaatgtctttaccaaataataacaaagggaaagaaaaccaaatatagatgtataataaggaaaagctggcctatagaaaataccaaaccagataatagtagcaaagtttaagccaattttgtttttaaaatgtcatgtacgtggaaaaaggtttaactttagttttctttgggtggtggttaaaagttataagtgattaaaagtttttttctttttctacaatgaacattatgtgaccttgcaatttaaaaagccaacgcccttttaagaaagttatgtccatcagtattcctctaacttcattttctctcgtttcttcttccctcacttttctaagttttcctttattaaccccatttttctttagtttgtttgcatgcttccttgcttttctttttttttttcctgggtatgatagagaattagtcccattctctaagtatgtaaatcaaggagtgaattttcaagtagacaaaaatgatttacagcatccttgcattcgctaccgatctctgcttttgttagctcttgtttttagctgggaaaaagccaattaccgccattttaacgtttcaggtgttcttaattcattttgaaacgctgactgatgaaaaaaataaggaatatcctctatgaattatcctgaactggcttataatatattgtttgaattcctgttatgagcttctgtttctttaacaatattttgtaaagtgtgtttcacataacagcagataatcaccagaatgggagtgaatgacttgtggcaaattttggagcctgttaagcaacacatccccttgcgtaatcttggtgggaaaaccattgcagttgatctgagtctctgggtgtgtgaggcacagacagtcaaaaaaatgatgggcagcgtcatgaagccccacctcaggtatagtaaaagctcttacagtataaatgtatgatgtataaacagtcttggkatcttgattttgtttcacctttttttttcttttgttgttgttattcttttacattttgaggttttaagatctatttaacatgtctagattcaccatctttatattaaggactcacattcgtacctcttaccctttgagctccagactcacatagctatctcctacttaacgtatccactaggatgcttcagatactaaaagccggagatttgggagacattttctccctattttacttctctccacatctaatccgtcagtaagtcttgccagttctacctccaaaatatactttgtgttcacaaacttatctcagtgtccagaggcaccacctcagtctatgccaacctcatctctcatctatactcctgaagtgccatcttcactagtttcttgctcttggcctcccctaccccagactattttccacatagcaattagaataatcataaatctttcttgcttaaaaatattcagtggtttggccgcgtgcggtggctcacgcctgtaatcccagcactttgggaggccgaggcaggtggatcacaaagtcaggagtttgagaccagcctggccaagatggagaaaccccatctctactaaaaataaaaaaaaattagctgggtgtggtggcagatgcctgtaatcccagctacttgggatgctgaggcaggaaaatcacttgaacctgggaggtggaggttgcagtgagccgagatcacaccactgcactccagcctgggcaacagagtgagactccacctcaaaaaaaaaaaaaaaatcagtggttttggccgggcacagtgkctcacacttgtattcctagcactttgcgaggctgagatgggcggattatttgagctcaggagttcaagaccagcctgggcaacatggtgaaaccccatctctacaaaaaatacagaaaattagccgggcatggtggcacacacctgtagtcccagctgcttggggactgaggcaggaagatcacttgagccaggagattgaggctgcactgagacaagatcatgccactgcactccagcctgggtgacagagtgagactctgtcaaagaaaaagaaaattcagtggttttccactctaattaaagcttaagtaaaatgttattacattaacgtttttgatactagtctaatgttcttgcctttgtgttatactattttgacttttactatcagtgtttgatgattaatgtattactaatttatatatttcaggaacttattttttcgtatctcatatttaacacaaatggatgtaaaactggtatttgttatggaaggggaaccaccaaagctgaaagctgatgtcataagcaagaggaatcagwctcggtatgggtcttctggaaaatcgtggtctcagaaaacagggagatcacattttaaatcagtcttaagagaggtgagcattcagatttgattcagtaattccgatttgaattaaagggtgcattttactcttaatagtttgtcatctttaatacttattaattttattgtgactagcagggatgtgcctagagaaaagagtttattttttagagtgaaattgacctgagtttcattcytggcactggtatgtagaaactctgagacactgagcaaaatttgtaacctatctctaccttgtatgttaccttgtgaaatgacaacagtaatactcagcagggatgtgataaaaataagagaaagtatatctaaagcaactagtacatggtaggaacttgatcatattaccttttataacaccttcaggacttaaagaagtcccagaatacatgagatctcattaattcgtacttcactcattcagaattcatgatagttcatatacagaatatatatttggcttcccttagggcttgtaattttaaaaactgtcgttacattataatatattatttatatgttactttaatattgctatattttatatttgtatgaaacttaagaaagaaatcatctatagtatataattaaaacaataggaagcttttttttttctgttttctttttttggttgttttttttttttttttgagatggagtctcgctctgtcacccaggctggagtgcagtggcgcaatctcggctcactgcaagctccgcctcctgggttctcaccattttcctgcctcagcctcccgagtagctgggactacaggcgcccgccaccacacctggctaagttttttttgttttttttttagtagagacagggtttcactgtgttagccagaatggtctcgatctcctgacttcgtgatccgcctgcctcggcctcctgaagtgctgggattacaggtgtgagcccctgtgcctggccttttttgtctgttttcaaatgtgtgtatttttaaagagttgtagtagtacacatgatttttaacctagccttttcacttaatgcttcatgttgtcatatttcccttttgtcacattctaatcaaaatcataacttgtagtggttgtgcaacatgtatgaagctatgaatcatacccctgattgtatatgttatttacttttttagtttttctctactatacatggaagtgtgattaacattttttgtgtatataatgttttcttgtgatttgaaattttagataaaattacccaatgttggattgatgggtcaaagttttggaatgattttattgctcttgctgattaatttctgctaatgcagatgtcagagaagcagtgtcggtgcactcacaagaacattggatgttaggaggcttgtctttgtaatatttagtgtgcaacaacaaagatatttaatatgcatttgtcttttaatagtaatgttaaacatttcatctatttttagtctccctttgggtaatggctatcatcatgtcctttacctacttacctcttgaggttttaatttttcttttgtgcaagttctttatgtattaaggatataagcttctatcatatttgctttgaatttgtttttctttttaattttagttaaaaaattatgccatttttctcctcttctgaaattttattttctactcacttttaaaaatagttttcaattagtgaatattccaccctaatgactatcagcagttgaagaaaatatctgtgctaagttctaattacttcttgtataatcaattcctggaaatattcatggtcctcaatcttagagtgttaaagaaccagcataaaacaaaaaaagagatgtccatctcttcttaagaaaattgctccattcctgtttctttattgctgcagtaattatggtgttcttaggcattttgtgtcagttcagtattgcctgttagtcatttttatatttctgtactcttcagttactaggccctgcttcctcctaatccactgctatcttttaggtattcgcatgaaaagcacaaattagtagtcctccaataccacctccaccccacatggtagagacatagagtgggaaaaattgcaacagccttataggaaattctgtgctggttctttgaaaaaatttgaagtggcaaatagtacaagaagttgaaataactgtattatgaaaggctattttttacctaggggtaaggtcgaagcaacactgtcacaaaactgtctctctaaaatcacggggccagcgtcctgaaaagtgatatttttcaacatagtactttgactttttgaaccttgtctgccttgggcaacatctgacagtggtagttattatgtaatgtggcgtggaagtgattaatcaaagcaagaaatggtatttattctgtcagtctctagaaactacaagtaagtagccttttctccccaccatactcagtagtccctgatagagaatgatacatgacaaaaaagaatggcgtattacaagaaagaatgaactaggctataaggccagactacaagctacccagcggggttaaattcataaaccagaggaaagtcacagcaaattatttgtgcatcagcaaaatgatgtaatcattctgcacaaacatttgatttcctaggaggacactgacagctgacttctccgcagtttcccacaatacgagagtttcattgtacagggaaggcaagatgagaaaaaaatgcaaacattaaaattcaagccaaaactgtatgatagcatcttctttggaagtacgcgtattgggttgaccatcatgtgagaaaaattattgaagtcttctagatgtaaatcttaatatgattaattattatttaaagatattttcagaatctgactataatagcaatgaaatgtgaatatggattactttgtaattaacattaaaatcttaattttttattacagaaaatttaaatcaacacaaaagtaacccatcactaatcttaaaccattatcttggctcatcttgtttcatctattcccctatccacacatcattttgaagcaaatcgtagacataatattgtatcattccctgtatttcatgttttctaaaagatgattcctaaaaaataaaaagaaacataaccacaatataatttttattagcacacgtaaaagtttggcagttcattccttaaagccctcaaatattcagtcattgttcaaatttccaagtgtttcttaaatatcgtaatttttaaaacaccaaaatagctactattaatatttgtaatacagaaataggtttaatagtaaataaatgagcagtgaaaacattctttaacatcttgcacctgctttttgttttcagtgcctccatatgctcgaatgcttaggaatcccctgggttcaggctgctggggaagctgaagccatgtgtgcttatctcartgctggtggtcatgtcgatggctgcctcaccaatgatggagatactttcctttatggggcccagactgtttacaggaatttcactatgaatacaaaggtgtttattttctttctctttttcagcrtttgtttacgaactaccttttttaaagggctgattaaatgaaatagtagatataaaatgcttactgtaatgccttgcacstagcaattgctaattaaaatgcttactgttattaaaaatcattgccacatagttcattctcttcaaaatgtggatttatctcataagaacttgacttgtttgtttcacatggtttgattctaaatcattttcaaaaatacatcacgaattgcatatgaaaatgtgttgctttgatcctgaatttccagtttagtgtttcatcctcagaaatacctccaaatatgcaaagagagagatataaagatgttcaatgtagcattgttaataattacaaaaatttggcaagcagcccgagtgctcattgatagggacatggttaaatccttcacacttactggttcccagttggagagatactgctgggagacattttggttgcaacagttcaggcttgggcaaaggagagtatagatatgtgatggcttggtgccaaccaaactaaaccttctgccagacatttctgctatccctcccgaaatgctaatattagcacccccattgagaaacactgtttcagagtccatatgatgtaatacagtgcagtcattgaaaaggctattattgacataaaagatatccagacatattaatggtggaaaatttctcaaaatagtatttttatataatcctacttttacttaaaaaacgtaattaacaataaatattcatatatatgtatcaaaggagatggttttttggaagaatatgcaccaagctattaatgatagctcaggcagtgcagttacggggaatgtttactttctataatatatatatatatatgttacagtgttttattttgtaagatggaaatctacattttttagacaccagaaagcaataaaatggaaaaaattggctagcatagttatttttaagccatttttgaaactacaactttattttcatatattgaaatgtcagattctataaagattctgctgatcaggataattttcttatataaagtttttggaataattaaactttttttctttttttgagacgtagtctcactgtgtcacccaatctgaaatgcagtggtgtgatctcagctcactgcaacctcctcctcctggcttcaagtaattcttgtgcctcagcctcccaagtaactgggactacaggcacatgccaccacgcctggctaatttttttgtatttttagtagagatggggtttcaccatgttggccaggctggtctcaaactcctgacctcaagtgatacacccaccttggcctctcagagtgctgggattacaggcatgagccaccatgcccagcctggaataattaaacatttaaagataacattgacaaattatttttgtaatgtggtttaatgtataaatatgtactttttgaggattaaactaaatctgttctttctttaggacccacatgttgactgttacacaatgtcatctatcaagagtaaactaggtttggatagagatgctctggttggattagcaatacttcttggctgtgattatctcccaaaggtaagctgaaattgtcatatttatttgctattcataaagtctttttcgtactttatgtgctgtataaatatgaatataatatggctatatgattaaaaatcgaatttaaaatataatttcaggcataataagctattcagtgactaaaataatcggcatttcagatggcactaaaaagctgacttgtgacacttaatattataagcaagaatagaataatgtagtaccacagcttgaatctcagtaaactgttactctagattaagagattcacatttatgtttgactatctttttaaataaatataggagttattcttttcttgtattatgccattgtttctttcactcttttttctgttttttagttttcagtattctttgtgcacatgctcaatgctattactgttgctaagtcacgtgatcattgggataagccattcatatttccatgcctctcagcgttgtgctgggttttgttcatggaaatatttgtatcttaagatgcacaatctagtgctctgtaacaaataggtataacaggtgagtgatgagttaagtattatgagaataatcccatttttttaaatgtagtgtttaaaaatagaaaatgactggtattgtaggtcttactatgtagttcccttattatgttcctactgattatttctgtatccttacaatccgtcattttacctctattcccaagagaagtataaagaagaatgacatgtaattttttttccatctgagctcaggagaaaggaaaatatagcagggtaataaaattattaagcctaatttgtaatttatatcatcaaagaactttttttaaactgtgaggaaaagaaagcaggaggaaagaaacttttaaataccacaaaccattattttgtaattctccttctaaagtaaaagacgatttcctaaataaaattatatcataattaaaatctataaacagcccaatgtttaatttaagaaaaaatttgctgacttgaactcacagaaaccaactttagctacagtggtatttaaattatgcattagccatagctatattgaccttttgtgttttttaaaaccaaaactgctatgtatttacattgttctacttaaagacttttaagactatgtactaacttgatttgccttcaaaaacttaaagctaatgctaatacaagaagaatgatattcaagatatctaataacgtgtatgccaaagacataggcaatagagatggaagagacttctgggtatccctgctgtgccatagactctctttttagtagctggattctgggtataggtggattgggaagtattcaggttagatgggacattcctgtgcaggcagatactcagaatgcttgggcagtagctatttactaaccagttaacacgagtgtgtaaatcctagtgtgtactggttaaataacagctctgcttataaggacatattcatacacttataggggctggaagactcagtttaaatcagaaattgtgacaggaatatacattaaggcatatcattttcgtatattggaaattcacactttaaattttcttaagtttttaatttcaagagttaacttaaaacgttccttcgttctctgtttatgtctgggttttggaatattaaatgttcatgtaattaaatgaacttgctttttcctgattacaaacataaagttaggttaaattaaaatattatccaaataattaacatagtaaatgaaagccctctaaaattatgaccctcccttccctaaaataaacaccatcagtggtttggtatataactcgctgaaatttttgtttacatagataacagtgtaattgtcatttactttacaaatcctgatcatatacactattgtgaagtttttgttttatgcatagcagtgtatcttgcatatcttttcctatctttattgaagagttacctcattctttcagctgctgactcttccgttcaattaatatacttttaaccattcctagtgattaacattggaattattttttttcccactttctgaaagggagtccctggagttggaaaagagcaagcattaaaacttatacagattttgaaagggcaaagtttacttcagaggtaactaataattactttctcttgtgacattgaacctttattcttgctgaacttaataacgaatagtacaggaaacaattgttttccaaaaaagggttttgtatttttaaactgacctatattttgtttgatttaagataatttatttttatttattttgaaattttccaaaggaaggatgagaatacatgttccaagccgtaytgcatttttttttctttttttggagacaaggtctcactgtgtcgcctaggctgcagtgcagtggcgcaatcactgctcactgcaatctcaacctgccggagtcaagtgatcctcctacttcagcctcctgagtaactgggacaacagatatgcaccactgtgcccagccaccatactacatttaaaatatacatattatttatattaaacatgttaatatattaatttttaatttttttttttgtagagatagggtctccctatgttgcccaggttggtcttgaactcctgggctcaagtgatccccctgccttggtttcccaaagtgttaggattacaggcatgagccacggtgcccagccaccatactgcattttaaaaaatctattattagctcactaaacacatttagtacaatgtcaagtgcatttatgtatgaccatgggcattttgccactagctattttaaacccttttaccaaaaggtaaagataaacatgacattaaaataattttgtatttaatactttgatattgtattttctttctataaatgaaatgtctgtggcgtgttgtaaatatttaataataagcaacattaattgaaatcttactcgactggcctttgctttatagctacatatttaataataacattaattcgtttagtctctatagttggaggattcagaacaagatgcagattatatagaagttaacaaactatgctatttactatctcaaaaacacatgaattatatttgctgatgaaagcaatgttttataaaaattaatattaatgatgataggtatagaatcaataagaaaggaactaggacactgggaaacttaaaacagtcttggcctccagcaggttcgagatggcaagtgcctgaaaaaaatgttaagaggtaaaaatgaaaaaggaatgaccataaaaaatacatcaaatcactgtattctttcctatgatacttctcttttagctgtaaaactgttgataaatgtaagacttcagtaaatccattattgacatcagttattactgtgcccaagcaagaaaggaaaggtataatttggcctgggtgtgagttaaggaatcatttgggaattgtaaaaaataatataaagaaggaaaagcaagtgaatataacaccwggctaactccaaaccattcttattgaaacagtttcagcaaataagcactgttgacacttgaaaataataaaattacatttattttataattatctattattctgttttatatactgacttttcctctcagttatttttaatttttgccgtgctattctttatctggaagcaattaatgctaatttttaacaggcttgtacttggtctttgtagtaaatgaattagaaattccagaagctaaatagtaactcttaagtaccagatactgcacaatgacctgaagagataatttagcttttataaaaacttcaacttgtttaagtagaggaacataattcagaacacatacgttttatgattaatacctaaccataccctttgtggctttatgttaacctggaactttagccaaaaacgaaattaacttttaattagtagaaatctttatagtactatacatttttcttaaaatcttttatgaagcaggtaatgttttgctctttgcacaagagattaagaaatgattattttacatgatttagctttttgatacagttttcacccagaagattaatgttttatttaattttatatattactctttactcttctttctgatatagagaaatgttcatgattctgttttgtactctggcacacagagtcagtctgctcacatactgctgcctaacttaagattcttcaaaaaaaaaagactgattggatatatatatacatacatatatatatatacaattttttttaatagagataccgatatatagatacacacacacatatactctctctcctgtcttgcagttctgctgtccttgggccttggggccacatttaaagcttgtgactgagggttttcccacactaggccagcaactttatcagccaccaaagggaaaataattaggtaggtgaaagggaatagatcagcctgatatttgagaacataccgtttttgtgacctcattttttttcctttttttaaaaaccactttctattaaaggtttaatcggtggaatgaaacatcttgtaactctagtccacaactgctagtcactaaaaaactggctcattgttccgtatgttcccatccaggtaaggagacatagggaatggttattagtatctcatacccatgttttaattcttgttcacatagtactttttacatgccaatattaataatactttgaagggttttacattgtcttctccactagattaggaattccttgcagtcagttttgttatatacacatagtagtcactcagtaaatgtttattgaaaccaataatgtgatgtagatgataaatataastacagtttcaaactatgataccaaattacttagatcttaaaactatgttttcaatatagaaatccattttaagaaaaaaatatatactaataagtcttagggaaaatggaactgaaaccatttgttaatatattggtgatttatatttatctacttaaatgattcttcattgtcctgtawtgcattttgtgtgtgaagacagtgacttaaaactaatttctaatacatgttcactattcttgaaaatagcttggatcttcttcattagtcttggtttaaaaaaaaaaaaagacactacggaacacgtactggatcagaaaggcctttcattcccaaaagagattaggatatcatgttaactcatcttttaaaagaaattctgctatatctagttgtcttaatatatttttattaacattattaaattatagataaaatcatggaagaaaatcaatgtttttataaataagatgctattgtatagttttttgataacttataaatgacaattttaggtcatatcaagtatatgtgctcttacatattctcaagacaatgttgaaagtaatcacactttgcttttaaagggaattaaatttccacacccgtgccacagtcatcatttgttcatgttccaaggatagtttaaaaataactgtaactgagagctagacactagcagaggtaattaactgctatattcttttaatacactcgttaaagaaactattctattagagctattctattaagtaaataatcttttttgctagtaattacatyctactttttatgcatgtagcttccacctaaaccagaaagttttctgttgttgattattgtaaatgtataatttcaagtgtctaattawcactttcagatagaagaataattttttctaaagtgtcatgtgatagtaatagctcaagatctacttgagcccaagaattactatggtgtctattactctattcatcctaaatgtattgaaacctttctatatgctaggtagtgtgctaggcaatattaattttggaaaatttagatactggcaaaaagaatgtatgtagaaagtaattataaaaggcaaaaaatattatactttttttgggtctccataaaggttcacctaaggatcatgaacgtaatggatgcagattatgtaaaagtgataaatattgtgagccacatgactatgaatactgctgtccttgtgagtggcaccgtacagaacatgataggcaactcartgaagtagagaacaatattaagaagtaagtttttttaaaaactcatgatttttcctggcatgacctatacacatacctttggttgaattatttccatataatctttccccatrtctagattagtcacatgtttaactaaatttttttttcatttctgttcaaaaatttagctaacctaggagatagtaatgtaatagttattcaaagggaagcttgactgtttgggatactgtaaattcacatttcttattaaatgggaggagattggctgagatgatttcagagtctaaaattgtctgattatagtaataacatgtatataatttttttttcaggaaagcttgctgttgtgagggattcccattccatgaggtaatatccagtaattcaactstattaattttagaaactttcttaaaagtttaaatctcagtttctattttcttttttcttgctaggttattcaagaattccttttaaacaaggataaattggtgaaggttatcaggtaccaaagacctgatttgttattgtttcaggtatctgaaaataaattcttctttactgtatgaagttatatgctggaaagataggaacagatattcactctgattggtctkagaggaggtttaaaattaaaacaggcagctcttatattttttcagcatttatttctactctctcatttgccatacagtggccatctttgcacactataagacaaagtatagttatgctgttttagaagatgccttaattagcatatgtggatatattgcatccatggatattttgggggaagagggtttaataacaagagaatgttaagatcaagtatataattatggaaggtagtatcatttacaaaaacattgatatctgaaattaatgacctaaatttaaatttggaccgtattccacctactgtgtgaccctggatgtgtgttattctcaaaacagaaataatattacttatctcataaagtcaccatgaggattaaatgagattatttatattaactcctaatatagtggctagggacacggagtggctcaataaattgcaacaactgggtacttacaagtaccagctgtaagtaatgacagccacattaagaacgacagccacattaataatgacagccaacatttgttagacatttaaatttgctgttaygtttaatgcattgcatgtaatctcaatctttgtaatctgtgaagtggrttrtaatattttcacattacagatggtaaaactgaggctaagagagtttaartaagttacccaacatctaagaaatatcatcctggcgttcaaaccgagagccttcactcttaatcattatgcaataatgattcttccttaggaggctcattgtttctagaatattctcattgatactactttaacttacgttaattctaaaggaaaaaatattaatatcacctaggagtrctatttgtctccaagagataacaaaatcttgttttatttttattatatttatagagatttactcttgaaaaaatggagtggcccaatcactatgcatgtgagaaattgctggtacttttgacccattatgacatgatagaaagaaagcttggtagcagaaactctaatcaactacagccaattcggtaatgtaaagaactgtatggtgaargtggtgtttttacttgagtattttataattaaaatattcctaatatctttaagctcgtttttgtaaaggtggaggaaaggcctcctggaatattaaaagcttattcagggcttataatcagaacaacatagtaagtcatgctttatcatacttttctacttcaaacacrtagtaataatagattataaaaagaaacaagcataaaaggatatagccaggctttataagacaactatttcagtggaccagaaaaggaacaaacgtgttaagggaatgtgggaactaaaactggttttgcagagccttaaatctagaagcagccgtatcatccaggaggtaaatcgcttcagagaaaaaaaaaaaaatggggaccaaaagtgcaagatgttgatggagtcaggcttatttcttgaaacccagtagctagggtggaatttctctgttcctatcaggagattagaggctggggtagataataaaaaactaaccaaatgctgcctgaagcccagaaagcccactggaaattactcaaagagactagagagatagaagtgaagacagataaaatataaaagaattgaagaagaaagcttaacatataaagaaatataatatttttaaaatcaacaattgcgtcatgaattcacttcggattaaattaagttttaaaacagtctgacaggttttatgcaaggggtgggtgtggttggcctttcagaatgctagaatcctcaaaaagatgaagacatatgtctgtaagcaacagaaggcaaaattataaaaatgtgtgtaaatggatggatataaaaagtgaactattagcttaaaaatagttgttgaaataaaaagcaatcaaggggtctctaggctaaacttggtccaaaaaaattagtgatttggaagacaaatcaagtcacacagaaatgatctcaaagactctcatataaaaaatgcttaagagtagttttggattagttcctagaagctaataaaagaaaaggttgaaaagtaatttttgaagagatgatgtctgagagttttccaaaatttaagacagatagttatactacaaattatagtcgcaatacatgaaatacccaaggcatattgtagacatcaacgataaaaggaatattttaaaaagtaccaaaccaatcaggcaacaatcatcaatggatgttaaaaccattagatgaaagattgctgcagagaaaggatagtcacagtctcaagtaccgctctacagattaattacaaaggaaaaatggtatcttcaaaagtggagaaatccagtggacatcagtttaactcagtgattaattaccaataaaagaacaatagactgctttcatatgctttctaatacgttaaactgagaaagatactacattatcatataatatttttgccaaaaaagcttgagctaggtggggcgtggtggctcgcacctgtaatcccagcagcattttgggagactgaggccggtggatcgactgagctcaggagttcaagacccatctcttccaaaaatacaaaaaattagccaggcgtggtggagagcacctgtgatcccagctacttggaaggctgagttgggaggattgcttgagcctgggaggtggaggttgcagtgagctgagttcataccactgcactccaaacttggtgacagagtgagaccctgtctcaaaaaaaaaaaaaaaaaaaaaggaaagtttaatctgtatctaatcatgaggaaacaatctaatgaatccaagtgaaaaacgttctgtggagctattatcctggactcttcaaaaataaaaaatatctaggtagttttctggattaaaataaagagacaacacaattcaagaaaaatgatcctgattgaattctgaattgtttttaagtcataaaggaccttttttttaggacaattggggaaatttgaatatggtctatattgtatcattgttaaacttccagagtgtgaaagttttttgtggcaatgtaggaaaatactctacatagacaggctgcagtatttaggggtgatgtgccatgagacatgtttgcaactaacttgcaaatggagaaagcaaatgtgataaaatgttaacaattgatgaatctcagtaaaagtatgtgagtattcattgtactatttttgcaacttttataaaggtttgaaatttttcagaataaacagtttgctgggaagtataaaagaaaaaagatcagctatctgatagcacacatctttcataaccgtaatagatgccagaagatgctggagtgatgtttcaaagtaccgagtaaaaataatttacaaccttgaaatcattaaaacattattcataggaaaagcgtttttaaacatatgaagagtaagagagtttaccactcaaaccttccttaaaagtgcagttaaagggctgggcgtggtggtttatgcctggattagcactttgggagaccaaagcaggcggatcagttgaggccagggattctagaccattctggccaacatagcgaaaacacctgtctactacaaatacaaaacattagctggacctggtggcacatgcctgtaatcccatttacttgggatgctgaggcacgagaatctcttgaacccaggaggcagaggttacagtgagctgagatggtgccactgcactccagcctgagcaaacagagcaagactcaaaaaaaaaaggataatttattttttaaagtgttgttaaaggatatacttcagcaagaaaaaaaatgaacacagagggaagatgtgaattacaagaaacagtggtcagcccaggaattgattaaaacgtatttggataatttaataaactgactagaaaaaattatgtatataaatatttgtataatatttaatgattaatacatgatgatgatgatgataagccaaaactcccaaagtatgcattcaaacacttaagagtacctgctagaaatataatctctgtcttccaaaccagtacaattaaaataagaaagtaaaactatcaaaccaaaataatacaggcagaaggaagatggaagtaacaaagaaaaarctggtgacagcaaacaaaataaggtgcatgaatgaatccagcagctttatcagtaatcaccaaaaatgtaagcagattaaactcacctattaaaagacagattatattggataagtaaataaaattcagcaatattcagcttacaaggtacatgtagaataatactacacagagtttgaaaataaagagatttaagaagacttagtagacaaatactgtacttaccaaagtaatataacaaattttaaaacaaaaatcattattgtgaagatgaggaacactgcataataaggtaagaaacaacttacttagaagaactaacagtaataaactctakgtacctaacaatattatcttttgaataaactagtcaaaggaataggcagtaattccttaaaatgtttttacctgggaaaaaaaaatctatggaaattattcaggttagaaatggaaaatttccaaatatcttatgcaattagacttcattaaatgaatttgtttttcagaattgttaagactcgaatcagaaatggagttcattgttttgaaatagaatgggaaaagcctggtatgtattcactttaagcaaaatattccatttataatatttgaccatgtatgtctagtaaatattgtatatgtgtatatatatatatatacacacacacatagatatgtgtatatatatatacacacacacatatgtgtatatatatgtatacacacacatatatgtgtgtacatatatgtatacacacacatatatgtgtgtacatatatgtatacacacacgtgtgtgtgtacatatatgtatacacacacatgtgtgtgtacatatatgtatatacacacatgtgtgtacatatatgtatatacacacatatgtgtgtacatatatgtatatacacacacatatatgtatatacacacatatgtatgtgtatctatatatatacacacacagcatgtgtgtgaaaaataaagatgaaacccatcacatgcaccacaggttgatttcatagtttgcctgtgttattttagataggttttgactaatagtaaatatgataaactttgattttattttaatgtctcaatttgacatttcttttgtaatgtttaaggaagtaataccgaaataatttttatttatatttctcaaatacatgcttttacaaatgctgtggtcattcaatgtcatgtatagttgcatctgaaaaaattgagattgttaaaatactcctggggtacacttcctttcctttttttttttaaccctgcttagttttcagtgggaattttttattgtcaaattattcttatttttgctccagacagaaatacagtgaactctgaattagctcccaaactggagatagtgaaaaacagataatttaaaatgaaagtaataatactttttttttgagacggagtcttgctctgttgcccaggctggagagtgcagtggcaccaccttggcttacagcaacctctgcctcctggttcaagtgattctcctgcctcagcctcccaagtagctggggttacaggcacctgccatcatgcctggctaattttcatatttttagtagagatggagtttcgttattttggccaggctggtctckaacccctgacctcaggtgttccacccacttcggcctcccaaagtgctgggrttacaggcgtgagccactgcgcccagcctggaaagtagtaatacttttgatggccctttcaattgtgttcttttcagaagctatcactaaagaaagctgatgttgagttttaggaaactgtttcatttcttacctggaattttaacacttaactgaattaaaccaaccaaccttacctaaacaaagttttctgtcctttcagctactgctaccatctctgaaataagaggatttaaagttctaatttagaaagaatctccatccggccattgccaggcaaaaagaaaataaattatgtactgctatcaacagattgttagaatatagtgttataaagcaagatttgcaatgaatagttcatttgtgaatgatttattttacctgataaagctagttacctggaaagattgatttttttttttttgagatggagttttgctcttgttgcccaggctggagtgtagtggtgcgatctcggctcactgcaacctctacctcccaggttcaagtgattcttctgcctcagcctcctgagtagctgggattataggcacgcaccagcatgcccggctaatttttgtattttttrtagagacatggtttcaccatgttgatcgggctggtctggtgttggtcaggctggtctcgaactcctgacctcatgatccgcccgccttggcctcccaaaatgctgggattacaggtgtgagccatcaagcctgaccgattgaatttttttaaatgcctaattaaggacactttgctgtatttttaatcttttagaacattatgctatggaagataaacaacatggagaatttgctttattaacaattgaggaagaatcattgtttgaagcagcatatcctgagatcgttgctgtttaccaaaaacaaaagttagaaattaaagggaagaaacaaaaacgtaagttttgggtttgatagctatttatgccacatgcaaatgttatagaagagccacctcttctgtttgaatctgctgtgtctaaattttactgaaaaatctataaactcaaaagtcaagaattgtattcttccttctttgtcttcacatactttcttttaaagctgaaaagccaggaataaatcattctgttctgtctactaacttagacacgtgttaataataatagttatactgactagttgttcagcagctactgtttatagcatattcggattttaaatgttttctttatttcccagaactcagtgaggaaaacaactcaattataacattgttttcagagggaaatattttataatctagcaatgcactgagatcaaaaaaaggcagaaactattcatagagatttctctctgaactgtttatttttttattttttacccaagttaaagcaaagaaaataaatgttgattatatgtattttttttcttttcaggtattaagcctaaagaaaacaatttgccagaaccagatgaagtaatgagctttcagtcacacatgactttaaaacccacatgtgaaatctttcataagcagaattccaagttaaattcggggatttcccctgatcctacattaccacaggaatctatttctgcctcattgaatagcttgcttttacctaaaaatactccatgtttgaatgcacaagaacagttcatgtcttctctaagacctttggctatacagcaaattaaagctgtcagtaagtctctaatttcagaatctagtcaacccaatacctcatctcataatatatccgtgattgctgatctacacttgagcactattgactgggaaggtacttcttttagtaattctccagctattcaaaggaatactttttctcatgatttaaaatcagaagttgaatcagagctatcagccatccctgatggctttgaaaatatcccagaacaactgtcctgtgaatcagaaaggtacactgcaaacataaagaaagtgttggatgaggattctgatgggattagtcctgargagcatctactttctggcattactgatttatgtcttcaggatttgcctttaaaggaacgaatatttayaaaattatcatatcctcaggataatctacaaccagatgtcaacctgaaaactttgtccatacttagtgtaaaagaatcttgtattgctaacagtggttctgattgtacatcacatctttcaaaggatcttccaggaattcccttgcaaaatgaatccagagactctaaaattctaaaaggagaccagctgcttcaagaagactataaagtcaatacttctgtcccttattctgtcagtaacacagtggtaaagacctgcaatgttagaccaccaaatactgctttagatcatagtagaaaagttgatatgcaaaccactcggaaaattttaatgaagaagagtgtttgccttgacagacattcctctgatgaacaaagtgccccagtgtttgggaaagctaagtacacaactcaaagaatgaagcacagttctcaaaagcataattcatcccatttcaaagaaagtggccataacaagttgagtagccctaagatacatattaaagaaactgaacagtgtgtcagatcttatgaaacagctgaaaatgaagaaagctgtttcccagattcaacaaaaagttctctgagttctctacaatgtcataagaaagaaaacaactctggtacttgtttggatagccctcttcctttacgccagagattaaaactaagattccaaagcacttgaaatttaaaacacttaggtataacttaactattttagtactatcagcaatagcagagacagagggaaggtatctagttcatgtgtggtaaaaattttaatgttctctgtgtcatgaaacacttgccattttaatcaaagttgtaatttttaaaaagtcacctaaaactctggttttaaaagatcctctgtattgaaaacttctgataatgtatgtcattatgtccttactattccttaattgtagttttaaaatattggtatagtacttgacagagtaaatacttcatctgattgttcatttttactttttcttccacaagcctctaaagtatttatattccagcttgttcccaagaggataattctttatacttctcttcattcttttaaggccttgcaaggtcttccgttataactcgctttcctaaaagctattttctccctcagtgtgaagatacctttagtgtgctcttccactttggaaggccatgcaaggtgttccattataactctttttcctaagagttatattctccctcagtttgaagatacctttagtgtgctcttccacttttggtgtcttagtctcttttgaggggcaaaaatagaaaaggagagaagatgtcagtatgtttagtaaaaatcatgctcgtaatggctgaataaactgagcaaagtaactccttatgtatccccagaagttcacaggtatatcgggtggaaaaagatttggaaaatcaaatgtataaccaaaaggattagaaactagcccaggatcacgtagctaactaataatcctgtgggaatcagttttcttgcctgctaatttttttatttttctattttttccttctatagcacttttcccccttttgttttgaatctatgcaatattgactttaataccaccaaatattaagtcatgcattaatttaggtcgcactcaaaaattctagagaggcatccagattgaaaaggaaaatggtgtctgcagatgacaagattgtatgcatcaaaaattctaagaaatccactagaaaactattaaaactgataaagcgagttcatccaggtcgtagaatacaagaccaatgtgcaatgatcattgcattttgtttttgtttgtttgtttttttttgagacagagtctcactcttgtcgagactggggtgtagtggcgccatcttggctcactgcaacctctgcctcccaggttcacgcaattcacatgcctcagccacctgagtagcagggattacaggtgtgtgccaccatgcctggctaatttttagtatttttagtagagatgggattttcccttgttggtcaggctagtcatgaactcctggcctcaagcgatccacccatcttggcctcccagagtgctgggattacaggtgtgaatcaccatactcagcctcaattgtatttctgtacacctctaaataaatggaaatacattccatgttcatgaatcagaagacataagatgaccatactccccaaactgatctacaggttaaatgtaattcccattaattccagctggtttctttgctgattctaaaattcatatggaaatttcaggaacacagaatattaggaagaatcttgaaagagtttgaatgacccacccttcctgattttaagtatacagaactacagtaatgaatgtgttgtactggtataaaggtagacatataggtcaatatagatcaatggcatagaattgagaattcagaaaaaaagccttcacgtttatggtcagttgattttaaaccagagtgccaagacaattcaatgggaaaaggaaacagtctttgaaccaactgtcttctggatctattggatatctatgtaaaaaagagtgacatttgattcctacttcacatgatatttaagaagtaacttaagatggatcaaatacctaaatgtaagctaaagctataaaactcttagaagaaaacatagacgtaaatctttgtgactttggattaggcaaggatttcttaaatatacccaaagcataggcaacaaaagagaatacacaaactggacttcatcaaaactaaaaactgttgtttgaaatgacaccatcaagaaagtgaaaagacagcttacagaatgggagaaaatatttgcaaatcataaatgtgataagggacttgtatcttggtggtatataaagaactcgtaactcaattataaaaagacaactttgaaatgggcaaaatagctcaacaggcttttctgcaaagaagaaatacaaatgaccaagaagcacatttaaaaattttcagtactattactcatcaggaaaatgcaaatcaaaaccacaagacacccaatgtctacaatcaaaaagataataactagtattgatgaggatgtggagaaattgaaattctcataacatgctggtaggaatgtaaaatggggcagccactttggaaaaagtctggtagttcttcaaatggttaaatgtagagttacgatatgatccagcaattcctctcccaggtatatacccaagataaatgaaaacttatatccacataaaaacctgtgcacaaatgtccatagcagcgttattcataatagcctaaaagtggaaacaatcccagttccagaatgaggaaggggagaaactaatgtgtattagctattgtgtgctaagcattcaactagattatttacaaaccttgtatcatctcaactctttaaagactgtattgcaatgttttgaatattcagagagaaaaaagtcgttgctaaaacattttccaaggttctgcttattctgatttgttcagtcgtggctgtgatagttcaggaccatctagaccaggtaaataaaatatctagaggcattcttgagattgtatgagatgaaaataacaaaattagttgggagtggccagtctgagttcattttgctatatagctcaggggtccccaacccctgggctatggacaggtaccagtccatcacctgtcaggaaccggcctgcacagcaggtgttgagcggcatgcaagcgagaattaccgcctgagctctgcctcctgtcagatcagcggtggcattagagtctcataggagcatgaaccctattgtgaactacgcatgcgaggatctagtttgtgcactcctactgagaatctaatgcctgatgatataaggtggaacagcttcatcccacagccatctcccccgcatcatccgtggaaaaactgttttccacgaaagtggtcctcggtgccagaaaggttggggactgctgatatacctaatataggcataagtgtaaaattatagttcctcctcctcaaggatttctctgttttcattgtccaggttataccaattctttttaaagcattccatgttcttgttccttgatgtggtcatgttatcacttgtaaatcaaatcttttaagttgctgcttacgtatttgctcatcacttcattgtcttgttgaggatgccttgcttccctttgaaatactctgccaaagatctgcctccagctgctaggatcctgtaattggtttctttctgatggctccatgctaaggccctgctctggcctaactgctttgggctttgtgtaatcaatcttaagtccttggcggtttttcttttagattttttttccatataaaatctctatctggccacacatggtggccgtgcctgtaatcccagcacgctgggaggctgaggcgggtggattgcttgaggccaggagttcaagaccagcctggccaacatggtgaaaccccatctctactaaaaatacaaaaatcagtggggcctggtggcgtgcacctgtaatcccagctactcgggaagctgaggcaggagaatcgcttgaacctgggaggcagaggttgcagtgagctgagatagtgccactgcacttcactccaggatgggcgaaaaagtgtctaaaaaaaattaaaatttaaattaaaaaaaaatatacaatctccgtcttctagattttataatgaggactctactttttccttttgggtagcatggcttgagccatcttgtcaggcatacctagcgtcagattcttttctgctaacagattttctctgtgaccctggagacattttctaacttttctgagactcatttattcaaatgtttatgtgacaggcattgtgctgggccctggagatacagtgatcaatggcatcctataaggttttgatatctgtgaagtcactgccaccattgacacattctagggactcagtaaattgtagctgtgtccgataccatcatttggaaagagcactatcagattttggattcaaactgaatgcagccaagcactgccttttggtaaaaatgtggacacagtaacactagtagggggcagtgtgagggtgggagatgtgttttcagaagaaggaaactctagattagcatcacacaagggatcctaacgtggcatttgagctactggaaaaaaattgtgcttgcttaaatataatgtggtaactaatattcatctaatcacctaccacatttttggagcacccactttgagcaaggttcttaggcttttctatgtacaacagccagctggaggcccagtgagtttaaaatttttccaggtcacccaactagaaaaagttaaagctgggactagaactcagatctcctaattcatgagtgaaaacaattctctgtatttatgtttccatacatcattcagttcttgactcaaatatcacctcagagagtcctaatctttttatctcctgacattataaatgttgagttcagggttttttttttcattgtttcccaaactagaatgcagacttgatgagggcagggactaagtcctttctgttcacagaattctagaacagtgtttgacacagtaactactagatgcatgaatgacaattctccacaacgccccacccatggagcctgtaccagcagtggctgcacttaaccttgcggaatctggccttagtacttcagcatggctcacaaggctgaggcagcctggccccaacttgtctcttcagcttcatgcattcatagtcatgaaccttggctctagccacctaagaccatttgttattccctgcacggatgtctctgcctgaaatgcttgctgcttccttattggctagataaacctcatctattaaggaccagctcacatgtcataactttataatcccaagcagaattatttgctctatacgtgtccccaaagaaattacccatacattcatcagagtatttatcacattcattcattcgttccacaaatattagctgatgcctgccgtgtaggaggcacaatattccttacttaaaaatgcctctatctctccctcagataagactaagatctctgagcacaggaatcaagtcttatttctgttcacttcccccagatgcctacacagggtttgactcttctgcctcaccaactcttacccatcgagattcagtgtaaacgtggtcttctctaagaaagtcttctgttgcttctctggatcgctgctagtccccatagacttctaaaatattatctgtctatagttttgtgttgggttacattttttgtttcccacaccagactatgaacatcctcagggcagagaaactatattgtacttctgaatttatagcacccggcagagggattggcacagaaagtgtccagtgaggccgggtgtgggggctcacatcagcagtttgggaggccgagatgggcagattgcctgaggtcaggagttcgagaccaacctggccaacatggtgaaatcccatctctacaaaaaatacaaaaattagccgggtgtggtgatgggtacctgtaatcccacctacttgggaggctgagacaagagaatcacttgaacccgggaggcggaggttgcagtgagctgagaccgtgccattgcactctagcctgggcaagaagagcgaaactccatctaaacaaaagaaaaaagaaagtgttcagtgaatgggtgctgattgactgatggtgatttcagtcagggtcttagttctaaatttctctgtggagagagaccaaatctaaccgggtggattagcttgatacctagtcgcctttagccacttcaagacgccctgccaagatgcttgctttctgaaggtgaagagtctaaatcaactgctgttcctgttctgctggtagcacttagggtaaaacagcttaaatagtattactgaaggcagcctcctttcatctatatattaacgtggcaatgtttatcaccttcttaaccaagcaaagcttttatcaggctcagctaacagcttgcattagcctctttcaggaacttgccacattgcctataaactgacatgctgcagagtcagccccagcaatagtccaaaacagtgggactctttttgatgatttcaaaatggatagtttagttagccccaggccagataaattcactaagttgcctgtttggcaatggagggcagagttatcagcaaagtaggctgacccttctgtgggcagaatgaatattttgctaatgtttagaagaattccttttgtaagcatcaaagaagaactttaataaggattaagtgtctgagcttccttagcattattctattccaagacccaaaaaggaaaataacctccccaaatggtaaaaactgcttgtatatttagaattctctgatcaaagacctaatgaaaagattctatagtgtttgcgtcatcataagttaaatcttcatctaccacccaactgatacctgcctttctgtgagtgaaatcagaaacggctgttctttaataaatgctttcaatctgaaagtcagaaagtgatttatgaaacacccaggtgaggggagactacaagtccctttgccttttagttttcaagcaatactggttgcagtaactgctctgatgtaattattgctaacatttacgtttttattaaactgaaaatgctaactgtgaatgccagatgccagatgccagaagccttattttacataattgtccaaacacagacgtctctaggccaggcgctgtgaaggccccacaacttcacagctgggatagttctatgggaggtgtcaaaggactgggtacaatcaggtctacatcttctgaaacaaaccgaaggacattttcttaaacctgagaggcactggtctgaggaagtgtcttggttctgatagagactagctacactgggcaaacctcccctggcttcacttccttctgtcttcactctccatcccatttgaggacacatatcaatatatatgaaacacgtatcaatatataaattcagcatttctgatgtctttaaaatatgttccattatactctataattttttgagaagggaattgtctacatatgaagaaaaaagagacaaagttcattaggcactaatgaatataag
